United States Patent Application Publication US 2013/0034624 A1 - sequence listing, part 22

SEQ ID NO: 61689 - DNA, 966 bp, Bovine  19866881153636
  misc_feature (1)..(1): n is a, c, g, or t
nacagtatagacaaactgatattttttgtatgagcaggaagaatccaagtgctgtataagggatttcttttaaactcatttttttttctgaaatgattttggattaacagaaaagttgacattatagtacatagtttccatatgcccatcacacaatttcttttatttttaagaagtattttaatttacaaatttaccaaagtaatatcttatggtagaaagtatttatgccaaagcctttattctgacaagctaacaaagtgaaactggaggctgagaaggtcataagggaaagaagccaaaaggaacaaagactaaaggaggaaaactggggttaacttgcattctcgtgaagacgtgacactttgctgtgtataaaacagctccctgacaaatctgaatctgttggaagagttaactgagacatgactgggcaaatgtttgcttttgcttttagatactaggaaatcttttaagaaatgactaaaatctaagtagtgagaatgttccagaaagaatacaaacactgacattcattttccatttgacattttccaatgtctatgaatgctattgatttcaaattctaaattatttcacttctgaacatgccttgtagaattattacaatgctgtttgtgtgggcttgtaattattgattgcagcattatactctccataaatgtgccattgtgaataattaaacttgttagcattttgtttgcctacagtctttagagtgctagcccgttttttggcaatctcaaatatgtttctctagttcagtgtgtgctagatatgggacacatatcattttttcttgaaactttttaatagtttgccattttaaaatttcaaatcttaagagctgttctgtaacaatttagcttttagtaaataataactctgggaatcttatgatttgtattttggagtttataaataaatgatcttctagaatgtaaa

SEQ ID NO: 61690 - DNA, 1039 bp, Bovine  19866881165369
  misc_feature (1)..(1): n is a, c, g, or t
naccagagggcgagtctatttactcttttgccttaatatttaaaagtgtgagcactctggggatataactactttaatttataggtgcagcttcgaaaaagaagctaaatgcaaggcaaactagagctccgagtttgttttaggtggaagaagtcagaagttctgcccacagctgaatcatggaagcctgaaagtgtaacaaatgtcttgggatgtaatgtttcgagtcttaaagctgtgatgcatgacaacttaagctcttcagtgccagaggtctctgtctctggggcactaaaacatcccttcattgcccaaatgtcttctgtttggtgtgtatctgtgtaggggtgcgtgtgtgtgtgcgtttgtgtgtgtgtgttttcctttgggacatttgctttgaagtctggtcatcaaaccggctgttccctggggagagcaccatcctatagaaaaaacatctacatcagcctgcagtttgtgtgacttgctaaactgaagacagataacactgcatggcaactggaatgctttcatttatctcttaatttcattagatttttcatctaatggtcaaatttccagttttcttttttcaactctgatgatgaatattcagaattattttactcacagctctatttcattctgtagggaataagaagcattctgattttttttctttaaagacctcaataatatttatctcctacatagaatcttcaaatacaccagggctatcttacggcttgctacacgctgggacatgtctactatgagatccctggaaatagctggttttaattaaaatgaaatgtcacaataatatcattgcatattctgatgtcataacaaaaatcatttgataaaacttctaaagattgttctacataaatggaatcccctacagtgcattgcttgtatttcctttatatgcttctggtatattctttcttgcattatagctattttaagtcttacctttcaactaaattataagttctcaatagataacatctgcttcattctaagttcacag

SEQ ID NO: 61691 - DNA, 673 bp, Bovine  19866881181671
  misc_feature (1)..(1): n is a, c, g, or t
nttctcagcagtggctactgtctctttcattttctctgttagtttttagaattctgaaaatcattattgtcagttcaagtgatttttattttctaattgcatctccttgagagcactcattacatgtaaattaacattcttctctaattcattagctcttccttaataatagctacctgttcagcttgacctccttcccacaacttacagagtctatggaataggtattaattcttctttgacttcccccatgtcataggttttgtcactcaagaacagtccaggacttgaggttctctggagcaagtggaaggttgtggctgatgcacaggttttgtttcaggagctagtggtcacacagacccctgaaccccttctctgagaagggtataggatcaggtcctaaaactttacaggtccaagtggaagaaagtcagttcttcctaaaaggtgaatgcttggagaaatttattccttctgctccccagcctgcagcccttccaggtctgtctgccctagcagatcaggtaccttcacggaggacagatgtgcaagataggagcatcactggcatatgttggctgagccctctctagtggcaacaaaaatctgctgtattaatttcagatctactgggacttctgcttctttccccttcccaaggttaatgaag

SEQ ID NO: 61692 - DNA, 1687 bp, Bovine  19866881214861
  misc_feature (1)..(1): n is a, c, g, or t
ntaaaaggccagtataatttagaaaattagaccaaaggaaagctcccctttacacagctgaccataaaacaggttttatagattacttcaaaagttgaaactcatattatcaagatgttttttgttgctttggtcacaaaaatttggtgcattccataaaagggcattcttatatctaattctgttgttgagagaatacttttaaattgcagttttacatagttttgacattcattttgactaatgcatgtagcttaaaattacaatgtgtaaacattcaatttctattaaacattaatgttctaaagcatataaaatgccaactataataatttatgaatcagattttgtgttgtttctgcctgaaaaatacttcataggttaaaaaaaaacaggacacttactccacagaaagaaaaaatagtgctaaatggcttcaactgtcatccttcaaagcttttaaattaaagaatcacaatttctggtcaaattatttttatataattcatttctttatggaataaagaaaatgattttattaagcatttttttttttcaagctgaatgacaatgaagtctgcatgtcagaaattatggtgaagaacaatataaaacttccaagttttatctttggctgtcttgtcaaatttccaaacatttgcagtctatgcttacaacacaagttggaaatactgttttggtatcctgtaatcatactgtgaactacaatggaaatttagtcaatagttcagctgcaagacaacctaaaatttttagtagggaaaaacaggcaaagcgcaaagtgacaaaggggaacagtgtaaattacaagcagtcaacttaggttttctcaaacaatttaacaaaatctttcctaaaactacggggattatactacattgaagaggaaaaaataacatgggacatgtgattttcaggcatttaaactaaaaaaaaaagttcattaaatattaaataattgtacaatattcaaattggtaaatgttctttatgccattatatgaatatagtgaaaatgagataggtacaattttcctggaatgtacacattgagagaagaacattaaaagtaaaactcacaagctcttcaaattttatatggttattgttaacttaatggttgcaaatgagaatagtactcttaaagttctcctttatattattttaatatttagtgttttctttcttgcttattttgggacatacatatatctcgcttatacaactatttctaatacgaaaaagccatgttcaaggttacaaaatgtgcacatagttttcatagagacacgtgtaccccaatgttcatcgcagcactgtttataatagccaggacatgaaagcaacctaatgtccatcagcagatgaatggataagaaagctggggtacatatacacaatggagtattactcagccattaaaaataatacatttgaatcagtgctaatgaggtggataaaactggagcctattatacagagtgaagtaagccagaaggaaaaacaccaatacagtgcttatggatatatatggaatgcatatatatggaatttagaaagatggtaacgataaccctagcaagacagcaaaagagacacagatgtatagaacagtcttttggactctgtgggagaaggtgagggtgggagatctgagagaatagca

SEQ ID NO: 61693 - DNA, 1110 bp, Bovine  19866881283379
  misc_feature (1)..(1): n is a, c, g, or t
ncaaaatttaatatacatataattattttcaatgcaggatggcattatgagaagatttttctaatgtttttaaaggtcacatggaaagaacccttaacatttgttccctattgcataaaagatcatcactaccatctgttgacagttacctgagtttcaaaactttgatagtgagcatgactcatctgttcaacttattataataaaggtaactgttaacacaccatcattgaatggtatagccgcaagggaagcccaagaatactggagcaggtagccgatctcttctccaggggattttcctgacccaggaatcaaaccagggtctcctgcattgcaggcagattctctaccaacggagctatcagggagtcccatagataagcataaacatatgcaagagataaaaaataattctcctgtataagaaatgaccttatttgtccaagactttgatacaaccttgtcctgtatagaatatgaaataaagatgatttttaaatgagaaggaattcgaaactatttcactaggagatcaaagcctttttatacatttttctcattttttataggaatactcttgaaggttagcacagatttcactttaagcttgagcaaggcagggattatgccttagttatctttgatttcccacagcagctattagtcaaagccatatatactgtgaagttattgaagattaagctccagggtccctcacttgcatgggcctctttcaagacctaaatttgaatttgcaatttttttctttttttatagaaaagccctcaaattatataggcttcaggtctcacaaaatttgaatctattcaagctcagtgaattgtaaatagtaggtgctgaataaatgcttgaattaaagtgaaattcatgagtaatgtgttttatacttttttatgatttaatgcacatggtatgattcactttaatattagagtgccattactaattcagtcaataaatagtcaggagatgttactagaagtttaataagtaattattgcatttcttaaaatattcagcaccaacactataaatcaacctaggaatatgtatttggaattcaaaagcactattctattcacaggt

SEQ ID NO: 61694 - DNA, 1310 bp, Bovine  19866881425805
  misc_feature (1)..(1): n is a, c, g, or t
nactataaagttataagcagattttcaactttgtagggggtcagtgctcctattacccatggcgttcaaatttactatcttatagagatattatgaagattcaatgaataacttatgaccaatatttgacaatgtccatgtccatacattctaagtactcaataaatggtagttagtaatatgtataaaaataataatcataacaatgacctccaatttcaaacaataagttcaagacagtgatacagaagcaaccttgaacagagactagaattgcccaggtcaaatttcttttccctagatggcactacatttccatacttattagcctttctctagggtatttatttacttggaagaagaaaaaaaaaaccaccatattttaaaatcaacaattcatttatgttaataagttagattaatttatgtcatgatgtctccgagggcagaactataaaacatggatgcaacttgtgagaaggctgatttggggacaatgaatgaaatatatttctaaactagatctttctatgcctatagctggctgcattgccttaaagatctagcatgttctatcactaaaagtattcaagaacaggctacatttttttttcatcagggctcttcacacatgaacttagataattcagccaggtaatttttattccccttgctgatactgtgtgatacttacactgttttctaaaaaattctctgtatttttaaaggcttagtcaacaacctaaaacttaatatgcagtctatgcacttagaaattccactgacattttcatttttagacatataaacataaactataaaagcaacctaggatatgaaaattttaaattggccttttctcccttgattgagatcaatactcagaacaatcaatttttttgtgttaactatctgtttatgtggctagaaaaaaaataagctcaatatgctcttgccaagaaatctatgtattcatttactaattcatttatccaaagaatatttatgaaacatttatcaaactcttcctatacactcagcattgtgctgtgtggtataagactattttatggcaacagttacaatcaatactttgatgccaaagaaataatgaagaaccttaaatatttctcagattttagttttcagtattttatgttgagagaaactcattatttgtatatctatttacctaattatttgatacttaaaaaataaaatatatgcattcgagatattaaaaaatcaatcacaagtgtactgtaatatatatatataggtatgtgtgtgtgtgtgtatatgtgtgtgtg

SEQ ID NO: 61695 - DNA, 1256 bp, Bovine  19866881425826
  misc_feature (1)..(1): n is a, c, g, or t
naaaattccctcggcaataattccttcttgcttggatttcataaagttcccagaacagaagcatgacttccctagactcccttcagcctaaatgtatcagcattatgggtgctccagggcagaaggcggttttatactagcctcctccctgtgtcggttaatcattcacaccaatacggggttataaagatactgaggttttgtgcttctggttgtttttaactctagcattcagaaatgtggactaagtgaatagaccaacagatgtataaaatatcaattgttacactgtttacactaatgttttgcattaagaaaacaaatgtcaacctgcctgaagtctgcaaagaataaaaactccttgttatacacttaaatactcacttgcccttatctaaaatgaatccacacacagtagtgcaagtgactgctggcatttcattacctactgaagccttttgagtgtgttctgaacagtgattgggaagcctgctgagtttcagtttggctcagctcgcccacagttttgaacccctactggtggtatcagcaaaacatgtgcatagcctatttttccatagagtaagattttttcaagttactctgagtaacctcattaagaaactatggacaacactctttttgcatgatggacaatactaacctttgaattcacaaataaatgacaccccacatataaggaaagatcaaggtctttgcagggcctcagcataaataatgctgaaaagaatacgccattttcacaaatgttttaatatagaggattttgaagcatctctatttctatgaactatcgccagaatatgattctcaacgtgcatttgtttgcctatgaagatagacatggagcctgtgtcattcttgatttgggtggggagagggatgataaaaactaaaacaaaggaagtagtgatggaaatacccagcataggcaaaggaaaatcattgtgaagcagaagggaatgactggctgtaactgaccgacaggtcacggatcaagtgtgggtgcaaacagggcaactgcaggtcaattcaggcaagactcaaggagatcttatccagaaagaagtgggcaaaggataaagtccagaaatgcaagagttcaggcaagcagaatggatatgaaagcaaaagcagactttaggatagaatattagagacccaatgcacctgtaggaagtttacaaagcgtctcttcagacattattaattaccattactttcttttatcaaca

SEQ ID NO: 61696 - DNA, 857 bp, Bovine  19866881465952
  misc_feature (1)..(1): n is a, c, g, or t
ntataacatgactacttttgttgaaaaataaagcaaatggtagaaattttattaggcctatattaatttccttgtctagtcctgagtgttataaatataagtaataaaagtaaagacatctcctatccatttcactggatattttttgacagttatctttgaaaaattattgaaaaggttccctatttttttatcaccatgatagtccagaagtcctgcctggtgtccaattgaaatccctcctgctttattaaactgatttctgcttgtttgcttctctgtgtccatggagaacaactgatcgacatccttcatataaaaccctttatattcttggaggcagtaatttcctgtgtgatatttagttgaaagtttcataaactttaagagaaaaaaaggactgtggttagtttttacttcataaaaatattatccaaagttttagacataaagatagttacatttaccttcctgtgtgacaaattaactttaacctctttttaagtagcactttaagtcctatcataacacatttaaatcatgtatttcctgtcaagcgtggttaatcatttcgaaagcgtgtgcattgttgcaactcttttcggcttctcttaatttcttggtaattctcttcgactgtgttctatcatttaaatttataattgtttcaatatgaattatcactcattttgaattgattttggcaatttgattttaaaacctcgaaatctgattatggggaaccaataaaaaaaatcatgtcagagacagacacaaaatattaccttttaaggttgagtgattcaatttcaggagcagtttttaaaaaatacctcatctctagcattcatttcaca

SEQ ID NO: 61697 - DNA, 1193 bp, Bovine  19866881543593
  misc_feature (1)..(1): n is a, c, g, or t
nggaggagaaggggacgacagaggatgagatggttggatggcatcactgactcgtggacatgagtttgggtgaactccgggagttggtgatggacagggagttcttgtgtgttgttgtccatggggtcctaaagagtcagccacaactgaccgactgaactgaactgatattttagtttacttaaaattatttttctcactgaattgacattttatatctagtacaatgtagaacaggtattttaaccagcagccatctttgtttcacaatgacctgaaagaaatgcttaccattaagtttgatatatattgcaattattctgcaaacatgtttgattacttttaaggaaattcattcctgttcatagttgtctaggatggttttaaaattataagtagatttgagttttatcacatattttttctgtagctattgagatgatcatgtgaattccttcccttttaactgtttatatgataatttatattaatttatatacttctggttataaacttgcttcattgagataagctccaagtgtcattccatgttcacctttcttaggcctagtgggattcaacacgttaatattttgtttggtgctttgtatcagtgctcatgaataagattagcctgtaattcctcacactggccttttaatatcgaggttatgcctgtctcataaaatgagttgagagggtgttcctttttttgctatgatctattatattttaaaatctttcctccaagcacttcccattttttaaaagccacttttggaaggtctgcttttttcctatgcgctgaagaccaagctgaatgtaatgttggttagcaattctatagttaaaatggaaaataggagtctttttgactaattaggtttcaaacagctttggttgcacagtatattcatggatgttaggatggcattgtcacaattaaggtttttgaaaaaatcctttccaagaggttgtttcccatcaacaaacagaagtaaaattaaatgcccgattaacaaacataatgtcctctttaataattctcagcactctggtaattctgctaatattactgtgctatctgcaattctttccttttgtttcatgttttgaataattcaattaaaagtctgatgaagcaataacaagggattaaatgttgtcaaattggaactcgaaataaaaacata

SEQ ID NO: 61698 - DNA, 649 bp, Bovine  19866881604037
  misc_feature (1)..(1): n is a, c, g, or t
nctgggaattttctctcaaacacgaattgtgagatcatatgaaaaaataggagcaggaagagacccccaaagtcagtacccaaccttgattctgtgtgacaggaaacattgctgagtgcgagcaagccttggagctccccagattgtcatatgtgtaatagaacctggaccattgtataaccagtaatggcttctttggccataagtcgaagacatcctatttacactagggtccttttttcaatggtgaatagattgcttttaaattataaacttggaaaggagaagtaaaaggattactgagtatgagagatgaatgaagaaaagcagtaaatcctgtgcgatcagagggataaggctcacagttcatctgacataagagatggattacaatggctctgaagtgaaggatggtttacttaggaatttagcagtaatttgcatttaaggaatccattagtgccatcacatacacagttccatcatgcgatgactaacaggagtctatggtatttgcttatgactttattgattcttataaattaggacattattgttttgattcattcttattcagggataacctactttcccaggactattggctgacgtaacccacaccagccattataaatggcataacaatgct

SEQ ID NO: 61699 - DNA, 787 bp, Bovine  19866881644806
  misc_feature (1)..(1): n is a, c, g, or t
ntgcaaatcaattgagctgtcctttcatgttgcatccttcaactgctgaatattctatatggcatttcacagaaatatgatttgatttgagaacatctgcagcagtctggaacatattttcccctgtacttgacttttagctcattatagctctcagatgttctctcagcaatcctgtgacatattggagtgttactgaacaaacatcagtgaagcctatgtcttgagtagtgtcaatctcagttgaaaatgtttcagctttcttagcatcaacactggaagaatttaattaacccactgaaactttcaaaatgatagttaatgcatgtaagaaatgagaaatctgaaacggaggaggagagtggataagtgcttaacctcccacaagctgatgcctgccaccctcagtctgcactgagccaacccatgagaagccttgctctctgtgcagcctcctaaattttgctacgaaacctctggcttgctctatagcccctccggagatggagaaggtggaggtggcaactactgctgtcacactcccctggtccccaaacaaggtcagcttccagcctctaatcagctcccatccagctgctctcatgttttcagtaggtggggttgggataccaaggtcagaaaagcactgttggcagtgacacggttttttgcccactgctgctattacattaaggaagcagctggtgagataatgtatgccaaagtgctttgtaaattataaagtgcttatataattgtcaaaaataatcacttctgttatttcatt

SEQ ID NO: 61700 - DNA, 762 bp, Bovine  19866881710217
  misc_feature (1)..(1): n is a, c, g, or t
ntttcatcatagttcttaagaaaattatatatatcttttaatctgaaaaatgatacaagaatgacaactattttaaattattttggaaagagtatcaaagaaaatgaattatcattctatgcggtggaaaatgtggacgtttgtttaaaatcaaagcttccatgtagtactgtcagcttatgaaaacccttgagtctacattctggaatctggagtttgctgaaaggttcatataataagtgaggcacatatggctagtctagtccctgttggacacacatctgtggcgattagggaaactacattcattattacaagcaaggtatggctgtacaaaggtcacgtgatgtgctatagtcatccctgattagtggaaaagtttatgtatgaatgtgtatgtgggaaaaagtgatgctaaattctttaaagtatagatgatacatttgatttaaatatctgttcccaaaattaatgttggaaaagagtacagaattctagaatcacatctttgtcaattaattatttgtttgggataatcaaaagaactttgtaaaagagatcagtcaatatttctgtttaatacaaactttaggatcaaagaatgaggaactagaggacccccatctatccgaaacagccaatatttaaatcatttgatgtaggtgtttaattactttaccatttccttttctgtactgttaccaatgtcacaggttcatattttttatatcaggttcactgcttgcttaattatcctatcaa

SEQ ID NO: 61701 - DNA, 817 bp, Bovine  19866882238017
  misc_feature (1)..(1): n is a, c, g, or t
nacaagtcaagcaggaatagtctgaattccacccaaaagatgtgaaaagaatgtgctgcaattaaggtagaccttggaagaatgtaggaatcaaatttgtaaagagaaggaaggaatctaagctgaaagcaactggctcctttctttgtttatgccatcctcaacaccagaaaagagtagtatgctaggttgtctcagactagaaagaataaaatggacaataaacaccataatatttaaaagtgatgcaaatcaaagaaagtctcagttaacaaatctctccattccataattacgatatttgccaaaggtgatctgcttgttaatttttcttatgaagcctaaggaatcatatggcaaatcccaatgaaacggttcactttgaagcatgttaattgttcagctgttggtaccccagtactgtgtagtgtttggaggtcttttgtagctgtggaatagtgggacatttaaaaatgctaagagtatagtgtcttcccagagttgagtatgctggatgccagcctcagtgacacatgtcccacctaaaaaccatgccacacaaccccataatgtttgcagcagatttaaacatctgccttggagagacagaacatattactatggatttagcttggtgtttaatatggttgttaaattttaaattgctgtacaatgaccaatactttaggtagcaatgtaattcttccaggtttatcatctctcttgaagcttgactattcagtactttgtgtagcattaaattccagacagaggaagagtttttctttttatgtacttatttttaaatacacaaaca

SEQ ID NO: 61702 - DNA, 1110 bp, Bovine  19866880393312
  misc_feature (1)..(1): n is a, c, g, or t
ncttggttaccgaaggaggttcatggtggaggtgtgtaagttcccgcttttatctttcattagaaccagcctgcccttgcacttttccatttgttctttaggtggatggggtcagctacctccttcaggagatctatgggattgaaaacaagtacaacacgcaagagtctaaggcaagttccatccatggttctttttttttttttttggcctttccctgcaggatatgggctcttagttcccctaccagggatcaaaccctgacccgctgcaatggaagcacagtcttaactactggaccaccagggaagtcccccatccacagttctgaatgtcctcttcccaggaggcagggtgaggatcctgatccagccaggatctaggaatttagcacaccaaactctgaaatttgtctggtcctagaagggtacttcttcttcctcatttcagatgattataattatatttaaatttggaaatgaaaaaatgggctggtttggatgggttcttctacggggctctgctcacctagttccctggaccctcagtttgtcgctgccccctcccctgtgtggccttctgggctcctttagctctgactgatggagaggaccagatctcagctccagaggaggagcttggcacacacagttgccgaaagtgaaactgggcgtgcacatgcacttggtaaaccatgaagttcaatgcaggtgcaagattctgttcacaggacttgtctcagctctgcaggcgagctgccttctaaaccatgggggatttccctgggggtccagcggttgagactttgcctaccaacacaggggttgcaggttcaatccctggtcaggaggctaagatcccacatgccttgcagtgaaaaaaccagaatataaaaataaaaaaacagaggcactattgtaacagattcagtgaagactttaaaactgatccgcatgaaacaaacagatgaataataaaataaaccatgggtcatgagagtctttgtgacactggctgtctgcccccacccccccccccgacaggtggctgaggacgaggttagcgataacagtgccgagtgcgtggtgtgtctctccgacgtgcgggaca

SEQ ID NO: 61703 - DNA, 932 bp, Bovine  19866880456341
  misc_feature (1)..(1): n is a, c, g, or t
ncctgggagggggtgtgtttcatgccctcaggggctcctgccctcctccccacagctttccacctcctgaggccgggggttcagcagaaaggctggttttcaaagctgcccttggagcccacgggggccaggggtgcgagggggtccaacggactgggctgctctcctctctggctctcctgcacgctcttggctcaggaaaccctccccggcaagcccggccctggtccctggggttcggtggagggggctcccactccaaagggccctgcttcccagggagggtgctagggcgtggctcacccctccactgggcccgcaccccacagcctgaagctgggcagcagcggcttcctgcggggggacctggggcaggtggagcggagcgtggggcgcctgcgcaccatgcactccaagatgctcctggacatcgagaaggtgcagatccactttgggggctccatcaaggccagcagccagatgatccgcgagctgctgcaggcccagtgcctcagctccccctgctacaaacggtgggcagccgggctgggcctgggagcctggcaccagggagggcagagtgtgtgtgtgtgtgtgtgtgtgtgtgtgtgtgtgtgtgtgtgtgtagagtggggcaccagggagggcagagaatgtgtgtccgtgtgtgtccgtgtgtgtgtgtgtgtgtgtgtgtgtgtgtgtgtgtagagtggggcaccggggagggcagtgtgtgtccgtgtgtgtgtgtgtagagtggggcctccatgtaggacagagtatgtgattgtgtatgtctgtgagaatgtgagcgtgcgtgtaagtgtgtatgaaaatgtgggtgtgattatatgtgtgaatgtttatgtgtgtgtttttgagagaatgcaagagaatgtgtattgtgaatgtgtaacatatgtgcgaat

SEQ ID NO: 61704 - DNA, 1345 bp, Bovine  19866880456984
  misc_feature (1)..(1): n is a, c, g, or t
nctggccgctgttgctgagggactgctgccgatgcccgtgtggccgggactgcttgttcttgtgcttcatccccgcgtctgatgggagacggagaggggaggctcagttctgagacacactctgagggggccgtggggatggggagaagggcggcgggctgctggtctcagcctgcctcagcgggcgcccttctcagtctgaattcgtggaaatgccctttataagcaagcactttgctcattggaaaagaccctgatgctaggaaggactgaaggcaaaaggaggaggaggcagaggatgagatggttggatggcatcaccgactcagtggacatgaatctgagccaactcagtgagatagtggaggacgggagcctggcgtgctgcagtccccggggttgcaaagagtcagacataacttagcgcctgagcaacaacaagcacttcatccccctgtatgtctgtctggccatctgtccatccatccatccacttactctgatatctacccacggacagcagccccatgccaggtgctgggtgagttctgacccttggtttacagttcgggaggggaagtgactagaaagatgcacacacacctgctaagacccagagggaggtgacaaagcacatccaggatggccaactggaaggggacattccagaacacgagaggttcacagagtgtaggggctcaggaagagttttgaagagtgggtgatgctgggatcagaggcttaggtggaaaaactggggtgacagcctgtggatgaaggctggccagaaaagatggggccacgacattcctgctaactggccaagactggacagctgtccccctctgcaaacactcacctgggggcatttggagtcagggaggtggaggaggaaggcagtcggggtctggtggccccaagaagtgctggggcctccaggagccagacagaccctgcgggacccaagcaaggagcccgagggcctctgggccatctggacactcactgtctttgttcaggaggtccggcagccttgtttccatccgtcccttgtaaatatgtccatccaggcccaagatgtccacctcgtcgtgctgtggagatgggtgggtacccatggccacctgccgcctgagcgcccctcctgtcccctctctgagtcaaatggtgctcagagccctcgaaggggctgagtgacagggtgaaggggatgggccagatggccgggagggctgtcttcttcccaggaaaggaaaagaacctgaggctttgactgggtctgattaagaaactgcccccgaagctgagggctgaacaggggactgctggcggcttttccggaggg

SEQ ID NO: 61705 - DNA, 4146 bp, Bovine  19866880649063
  misc_feature (1)..(1): n is a, c, g, or t
ntgccctccctgtgggcttggaacttggaactagcttaggcaggagggaggaaacagcgctgctcccctgcagtctccatgcccagcatcttccagagaatccctcaaccctggtctcaccctctcccgttctcagatccttccatcccacctggccgaccccaggcacccctgagcccgcatggggcttcataccacatgtgcacccatgagcccgcctgcgtgcaggtgccagggaacggtctcgggctagacacccagccaggaaagagggtgcccctgagtctacctgtcccccggcttgaagtcgcgtgtgattttattcttcttcctcttgtgtttcctctttaaattctttattgacaaggggatgctcttcttgcgactcgtgccgctgccgctctgggaggaggtggtggagctggcggaggaggtcaccgagctggtgtcgtctgtgtcgtcggcggcctcatcgtccgcgtcctgctcggccgagtgcagcctgtcgtccccaccctccttcagcaggaaggggggcagctgctcacccgcctcgtgggcctcctctgggccctcgtcctgcatctccactgggcttggaggacccatcgggcgtctcctcggggctggcggagcccgtttcgctcttggctttggccgcccccttcttgcctgcgtcctccatggaatggtccctggagcactggacgtccggggagcaagatgtgatcctcacaagctgtttcttcaggaggcgcttcacctgccggcagagcgggagggcgggcgccatggagagctgactccaggcagctcggtcgaggggtgacggctgtatacacctaactggcctgcaagggtcatcagggctgccccccaaggcctaaggcacagaccttcctgctgtggaaatggctcaaggccagttcctcaaacgcccgccaagccccaaccccgaggacataccttcttggccacagagccctccccctgggcgcagtgtttttctggacattcacaggcaatcttggccggctctaccttggctgggaagacatacagacagcgctccccaagctgccgctgagcatggtcaaagcatccgagacgcttcaccctgggaggcgagagggagaggggaaaggcagacgctgggcgagggggtcctcggcaacacccccggcatctgtgcctgtggcccagagacttgcttggggaccacctctggggctgctggagcaggcagggggcgtgctggggccgctcacctgcctaggttttcctgggtaatgacagagggtggggggctgacgctgtccgtgccccctggacagaagctcttggtgatccaggtgaccttcagctctacaacctgcacctggggaggcgggcggacaggcccggtcagcagactaatgccgctcgctcccgcagccgtcctccagagcgggaggcaggtctacatcgtagttcagaccctcccagaggtcacggaggcctcctccctccagaagggcccagcggacctgccactggccacctccttccttcgctcagcccgggctccccgtcctcagagcagcccccttccaggcgaggcaggctgggcaggagtgcccgggcctcactccctgccacgcctcctccttacctcttcgaccaccacgcggaacttgctcttggtgctgagcaccggcttgacgcccgacagccactggacgctggagaagatcttggcagggccaatgagcacctggcccgggtagaagccataggaatcatcgaagaagagaccctgcaggattgggggccagaggagggtccctgtgagtgctgcctcttagggggcgggggcagcagtgtccacacctgccgtccaccccaggcctccatgctccacaccacctaagactgcagagtagcacctctcagacctcagatgcacacaaaccgccaggggttttactcactaaaaggcacggctggcccatcctgcttataacaagctctcgggccacaacaatgctgctggtctggggggacaaagctctaagagcaggggtccccaaacctgcttgatcacacacactctcctagtattacttaaaaactgtcatttaccactgctctaaaatgtcacatcacagtaaaatactgtgtacactccaagaaaaagggagattttaaaaggatgagataaaaacttaacaaaacgcaaagaaagttctatgcttcctgcaaacacccaagcttttacaccttctgatacacacccccctccttccaggaaagcactggctgagaccactggtcgccccgggccagaccctggctctctgccgagaagcccctaagctccctcctgcagagcccagggctgaggaacaggagacgcgccccccacccgcggccccccaggctcctggggtggagccaacgtacagagtcgctgacgtgcgggcagacgtcgtagagcttggcgccatcctccgtgttcatggagcacctgcaatagggggcgggggcttggtgggcaccggacccagtccctgagtctcaggggaggcgaggcagccaggaccccggaaggagctggtcagtgtctacaggacttgtgtggaggcgtcagtgcctctgcaggccttaaaatgggtaattcacccctccacccacaccttagtccctgcactggaacaaggaactctctaaaacaaacaggactcagccagcagatttcagcgttcacccccttaaagtgcctaagggagagcatcagcccctcttgggggtcctatgtgatgacgagggtctccccaagccagggtagagcgaagaccaggaactgagccggggaatccagccaggctgacaaggagaccagcccagggtcgggccctgagacgcaaggcccgcagcccctggcatggccctcgggggacctaggacgcacccctgccccttccccaacggccccgccctgcgagggctcctgtgtggtggggagaccgcacctggcgccgttggacagtttcaggatgatctggttcttcaggtcgtagaccttgcccagccagcagtcgtaggcgatgtagtccccgtacatgaagggctgcagaccagacagacaggcggtgagagacgacggaggactctggtgtccagaaccctcgttcctcttggccccacagacggcaggaaggctccatgtgggtcggacctagtaactgtgcagcaagcttcccccaagagtccccagctgctcgcccccacaggggcagaggctggacggccttctgaggacacaggacacgtgagtgggagtgagctggggtgggtggttacacagtaaagtgatttaaataaacagataactatatggaggatattaagagccaagtctccctgctggggacagcagccactaacacaggaaggggaagagggaggagctggactggggtcagagggatcaagacgggctcacacatctgaatacgtacacaagatgggcacaggcacatttagacgtgcatgcttatccacctacatacacatatagacgtgtgcacttatccacctagatacacatacgtggattccctagcgctgccctgaatggggcccaggagcaatcagcacacccagtttgcactgagatcatggcttttgaaagaaactagggctcgctgaagaaacggctgattctagtctggatcagaaatcaaacaatatggaaagtaaagtgttttttaaaaaaatggtggagacatgtcaaaagagcacagatgccagcttgaaggggttcctactggccaaatctgggtgggatcactgaagcaacagaacaagtaacggattacaaccaatgaataaaacaggagtctctgcatctgatgtaaaaaatgaggaaataaatgggacagaaagtacagctcttccatatggtagaatgccaaactcataataaagcaggcagtgatggtgtcatgaaatcaccatttagcagccatcaggctgctggctgggtcaggtgggaattgttaatggaggctaaggctggtggatgggagttgagaaccaccagtttattgacacaatcccggaatatctccccacaaaaccaatatgatcgcggccaaggggtga

SEQ ID NO: 61706 - DNA, 2305 bp, Bovine  19866880649695
  misc_feature (1)..(1): n is a, c, g, or t
ntgtatcaaagagtcgaaagtctttttctgatggtgctcagggatgacgtccgtcagcagctggtactcgctctgggccagcttaacaaaggcactgacgcagtgaatgtaggcatcggtttccacgtccagcatgtcatctctccctggggggacagcagggcccctgagctactggtttggggtagcccctctccctgctggggtgggggccgtgaatctctccagctcctgggctgcagccagattggcagcagatgggaggaagactgctggcagaaagctgagaggactctagcagagccgccagggtttgagggggaaaaaaaggggctgagtccagccttggtctgagcttcattttcagctctgctgtgggcagtactactgtcccagagcatcaggtatgggaggtgtgggggagatggattcaaggacaagacccctcagtcgacttcctggagaagacacgtctgaacccagacgggggattttgaactgtactgggaagacgacactcagggatgggcaagaggcaatatccaccccgaggaggctggcgccatctcagaagatgctgggcctctgaaggcagacactggcctggccaggccttctggaatgtataaaaaggcggtgggctctggtctatgaggctagctgacatgggatcaaagttggacagcaggccacgtaagccccagagagggaggcttgcttggtcgtcagctgccccgggaggagcagggggtccctccacgggactggaggctggggcagtggtgtccgcaggcaaccagatgctacgtgccaagggacgggctctgagggggtcagagccttggagctgctgctggagtcaggtgcgggcgctccctaccctccaaggggccgcctgcagcttctgccctcggcccaggcctggaaagcccagcctgcactcccgtctggagagaggcagggagacctagtgcccgagagagagagagagagaggagaccggggagagagagaggcgagtaggcctggctcgtccttggagcagaggccggctgggcagcgggagcgggcccttccgggggtggccgggagtgcggcgctggcggcccgcgggctgggctgcggtactcaccggccagtggcccggccttgtcgttcagggcctcggacaggtgcttaactcggaaatcatgctcgtgacctagcgagacgtcagccgcaaacacaagcagcgtttatccaggggcgggatggctgcctcttgggtgggggcgggggctgagaaggagccctcaatctccagggggcggatatgagatggggtgtacggacgggggcactggagagggctctgagcccctcctctgcctcagaccaccttgggaacagccgtttcaagcctgacttgcagtgcctggaccgcccttgggagccggcttccccaaacccggaggctgagaaagctgtgaggaccacagagggtttctgaagagtttccggcagctgcagtaggtctgatgctcagccccaggggctgtgtctcaccgtatttggggagaggtccagttagagatatgtcactgcccaatgaatggggacaggctccttttgtcccccaggctcattgttttgaaggcggatctggtccaccggggcagggctgtccctcctctgatgggagacggggggacacaggctgcgcacgctcccccttctgaaggtggggggtggcggggggcagccagcttggccctgccactgctggtctgagcgtgaaagggctgcccgtgacagagaactttctcagagttcaaaggggagacaagaaggacagagacaggatggggagggggcgggaagcctccccgggggggcagagcctccgtcagccagacaggactgggccaagaccacaaaggctgcccccgagccagccagcggggctcagtggccccagggacctcagttccccccgcccctctcaggcttgtgccagaagccctctggggggtggaggctctgccctgccacgggagtggacacacagtggaggaggagggaactggagaggaacacggggtgattaccttccagaggaatgaggttagagcccccctttttcccatctagaccatgctgagaatattgtttcagaagattctgagccttacggatcgtccctgtcaccagagccacacagagaggagacaagaagacctaggaaatgagcgagagaaaacagcagcagccctccaccgagccctctcccccaggcctgcgcccaccccagcagtgagcacgcccg

SEQ ID NO: 61707 - DNA, 2895 bp, Bovine  19866880659586
  misc_feature (1)..(1): n is a, c, g, or t
ngtggcggaggaactggtctctgtgagaggagaagtcctgttaccgcggcggtggcagcagccaagaccctctctggcctccccttggcccggggagcagctagggaaaccctgggaggggccttcctcgggcagagctgggtatgtcctgagctgcggggctcccttcctgctgaggggagcgcttcctgggactcttctggaatctggggagacccctccatggtcttgggtggtggggttaatgagctgacccccaaggaccggcaggaagacaggcaggatgggcgtggggacagccccttcccccaacccaagctgggtggtacctacaaggcccatgtatcccatttattagcagcagagttttagaataagcccctgatagcctctccaccttcttccccaccacccataagctcctctaccaggccagaggtgtcctgcccacacagagcagaaggccagggggttggggagtggacagggtaggaaggggacagggaggtgctggaccagcctgaagggtgtagtcagggtgctgggcacagcaggatgctgtctgcagaagcccagagacagaaactggcggtcagggagctgagggggtcaggagcaccctgaaggaacccgtgcccctctgaccctgctccaactggggccctgagcctgtccaggggcctctgtgcccagggaacctcacccacggggcttcagagagggaggatggggctgccgagccctgctgcttacctcgggggtctaaaggaatattgtatgtgtccccaagaactacgcagtgagaggcagtgcgcacagaggggaaggggggagacaaaggagggagaaagatgcaaagtgcaaaacaggttagagacggccgccacacccgagccaagcagcccacgcccctcgacgccgggacacagacagcaggacagcccaggttggacccccgcaggccagggacacactgggaagtggacatcaggagaacgacaggccagaggctgcccccaggatgcggggtacagggaaggcccagggctgggtctcagcgcgcgcctccccacgtgctgacttcccaaccccggtcacgggaagataccaggctggccctgagaagccagccgagcccgctcagtgggtcagcggtgtgagaccaagtaggaggacaggcaacacaagaggaggtggggagatgcagaaggagggggagcgggcgggaaagacaccttcagacaagtggggtctgcactccagggcgaggacagtggagggagccggggggacagaggccagggcaggaggtcagaccccggccctcctgatgctgggtctgatgacccaagaggcttgggggggagggtcctgtcacaggccacaactcctttccaccccctagggtggggggatctcctcacccagagaggagggtgccccctgggggggctaaccccacgtctccagcctggagggaggaatggggtggagggccccgctgggaggggtcaagtaccttgggaggccagcatggcgcccgccgtctcctggaagtccagaagctgctgcaggaagaggatggcctgtgtggggagaaaatagggccaagaagaaggtcaagggcaggacccaaaggctggatcagcccccacggtgcagcccctctggccattccaggacaggtgagggcaggcgtctgccggtgaaacagctggcagcaaacctgccacttcacccttgtgggtctggcctccggggaaaggccccgtctgcagggggtgctcagcgcctcccgcccatcctgccacctatgcccctcgcccgccccaggagtccccggcagcacctacgttgctcgtgagctcgtgcacggtgccatccttgggcatgttgtattccttgtccgggtcattctgtgggacagacagcctgaatctctgagacagctcctaaggatgccccagcccacccagcacctgtctgtgggcccaccgcgcaacctcctggcagacacgcatcaggacaccccatcgggcacaaacaaaaaagcaagagggacctaaaggagcttgatgcctcgggtgggggtctctgggaaagaaagggaggcccgtgggtactgacaggagaccagcagcacggctggccggcttccccgcagggcaggcccaccccacttggaggcctgctctcaggagttcctgaggccgttggcagtggccctgcctgcagccccgccggccggccggggtggcgtggacagaggaagggcaccttgatgttgtcggcaaagtcctccagcgctttggctcccacggtctccatggaggtgatgaggctgggcagcttgttcttggtgctggcggccgtgccctgaggatgtagccacatggctgcacagggctccagagccctgctccttcccagccccccgccccggggactgtctcttctcctcactcccccaagagcacctccacccacccagggccccggggaagctgctgctgcccctcactctgagcagagaatgcagttctcctgggaggccctgctgggcggcgggacacctcctcccggcgtccccaagggcccccctgcccccacgtacctggagcacctggtcaaactcaggcttggtctgcttgaggtgccgcaggatggggaagacagtgagcacggctgagaagtcgtggcggatgatggccttgcgggcggccaccacaatgttctcaccttcgagcatgagcccatccagggcatcctgagagagtggggcagggggagggctcagggaaggggcagccagctggctcccatggccggtgagggcagccggaagggtatggggggcagtgtgcctccgatcaggacacatcacccagttcagag

SEQ ID NO: 61708 - DNA, 1256 bp, Bovine  19866880667453
  misc_feature (1)..(1): n is a, c, g, or t
ngaaaatccccatggacagaggagtctggcagggctacagtccatacagtcacaaaagtcagacacacaaacttagcaactaaacagcaacaaccacaaataactaaaccactttgctgtacactcaaaattaacccagtactgtaaatcaactacactccaatataaaataatttttaaataatattaatactaaaaaaagaaataaaatttcaaacttgaaaaatagaaaataccagaatacatccacgtaggaatgaactcctagccactcgtactattcaaaactgtcttcaatttacaaatagaatcaagacacggctgctcttacatggcaattccagccctgggtggacagtcgcgttcttgaccatcggcggggaatggcggccatcatccatgtccatctctgcacactgggcctccccgtggatgacagccaggcccagacgcagcctctccgcgtacgactgggccctgagaggaggccaacaggagtgggtgagacgcatgagaaggaagacccaggcacagctttctcatcacttcattaaccacagaatgaaaataccagtccaccgtttagggacacacaaagtaactgtttctacaagtcagaatgtgaggctcaggccagaatgcaaacgtctcaagaggcaccctaggggggaagtgggctggcatctgattctgggcattttggttctactctttgcccaacagcctcacattcatctttagttgctttttggttttgtctttttctctattttttggccgcttgtcacgccaggatattagctccctagccagggagggaagctgagaccccgacactggaaactcactgtcttggccactggactgccaggggagtcactcatcttcagaattctgttcaaaaaggtttcaaaaaccaatgcctgaaaggcgcttgtgcaattcttgttttccttttgctgagaacttgaaggaagaacttcattttctcccaagggaaaactgagtaattccaagaaccactctgttacttggagactagaggtaaagctgtggtttggagtatgacaatgacttgggggaaagctggactcgggagctttcacaggctgtattaggacagaccctgggtcctaacacagcccatttggacttcagaagcacccaaaaggggatggagtgtgtctggcttatttaccttttttgcagcatcaggcgacttagctacaatgactgcatttctgtaatttgggaat

SEQ ID NO: 61709 - DNA, 931 bp, Bovine  19866880718597
  misc_feature (1)..(1): n is a, c, g, or t
naccccatggactgtagccctctaggttcttctgtcctgggattttccaggctagaatactggagtgggttgccatttccaggaagacacaggtcctgaaaacaccaaaattgccaaagctattttttcttgggtatcaatgtggtctgttctgaagctttctttaatgtttaccatttgcagggcacagctgtagacgcccagcagaggcatggaagaccaggcccccgagccgttctggtcatctgctgtggacataaagtcaacttgggcagagaaagcaacagaattctgcctctgatttgtagctgtgagtagtggagatgcttaatcaatactttggcttctgagaatctgtttggcaatgaataggagtagggcttccccttctcaggctgggaaacaggagtgcccccctcctgggagcacagggaaaatgaatgaggtcatgtttgtagagggctttgagctgttgggacgaaagcagctccccaagtgcaaggtgttattaaccgaaggtattattattttcatccgagaggacagagcgcagcaggcaaaacagagcaataaaagcatgcccattaatagcgaataaagtacagtagtagtctcggaaggaacaaaatccttgttacatcaatggtctaggctacagaaagagccaagatacaacaactaggagaaacagtcttagctagtatttcctcgggggcaggggaggtgggacgggggtccagataacaaggatgttgggaatgcaagtcctgaattggtggagagacaggcaacaataaatcgctgaatcgtcaccaacagttgcaattaaccaagcatttctggtgagccaggcatctcttgaagactttattgttgtttagtcgctcagtggtgtgcgactctttgcaacccagggactagcccaccatat

SEQ ID NO: 61710 - DNA, 1539 bp, Bovine  19866880776840
  misc_feature (1)..(1): n is a, c, g, or t
ncagggcctgaggctgcagcctccggagtgcccaccccggacgcctgtgcctgcccaagcccgcctacttgccattctgtcctcgaatgtcttgaccatgatgccatcaggcagtgaggtggccagcagtgccatctccttccgcactgtgctgaagaacttcttggcttctggaggctggaactcaattttcttaaaagagtgattcgctagagggggaaagagggtggtcagtccctcaggcgaggcctgggaacgccaaccggaggagcagcggcggctgaatgtgctccccagacaggtggacaaagcccccgcctcccccgccgccctctcctggcatggggactggggcccactccagggacacggcgccctggccctggagtgaggccagacgaactcacagggtgcgaactccagcaccgagaagacctcgcccttggcgctggtgaatgtgactccaggcttgccgccgcactgctggcagagcaccggggtctcactgggccactcggccttcactggcgactgcccctcgggcttgtcctccttgcgctccgtctccggcaccgcctccatcttctcttcctcggcgatggccacattgtccagggtcttcttgaggttctcctgcagcttcttgatgtcatctaagaacttcttctcccgcgtgggtttctcaggctctgccgtgggggaggtgggcgagcctgtcagcagctgctccaccgtcatgttcttgaggctctccaggatcttgatggcttccttcagctcccggaagctcttcgggggcccgtccttgcccgccttctccatcagcccggccacgggggcggccatggccacggccccctggatggcggccgtggcggcctcctcgctgatcaccacacccttgtcctcctctggggctgccggctgctcggcggtggggatggggggctcctctatcttggggtgctcatcctccaccagcccattgtctgtctcccagctgtcactgtcgtcttcccactcgtctgaggacgctccactggtgctgccttccactgagtcgtagtccgactcctcgatctcagactcgatgttgtacaggtgctgaggggagaatgggggcgcgggcttggtcagaggccctctgccagggaccccgagcctcagagctgacactgaccgggcaccctgaggcctcagcagccctgccgccctttctccctttcctgctctggcctcgcggttgggcctctgcgctaggtggtccctaggcctctgggaggcaccccagcccagcccctgggtccagggtacagcaaatgccagtgccagcctcctcgtcactgaccgcacttggtccgctggaccgcggcagactctgtgactctgttcccattcctggaatggcctcctagacgaagggggagccactccttcgtccatcctgtactggcacagggagaggggagctggggtgtgagcatcagatcaaacgaggggcacagaaatggagactgcgaaagcctgtccattcctgcc

SEQ ID NO: 61711 - DNA, 1411 bp, Bovine  19866880909834
  misc_feature (1)..(1): n is a, c, g, or t
nggggcttgggggaaaagggggtccgtggaggctgggcaggattgtgtgggacagtgcctctgtttgtgcctgcctgtgtgtgtgtgtgcacgtgtgtgtgctcacgcgtgctgggggaaggagctgtgctggcagggctaggtgggggccgggggtggggagtgatgggttccaggcaaagctggggcgagagggttgaaaggtgcctgctgagtgtcacccatttcctgtgcctcagtttccccatcagaactctggtaggttggttccccacaggctggaacctgacggtgggagagtagggtctaggcaccctgtctttcatcttccctggtggccttcctcaccctcagtctgcattggagggaaggtgccaggtggggtgattgcacccgagggtgggaagtaggggccctggggctggggccctctgacctcacaccctgtccctccagaaagggaccgaggaagggaggagctggagacaggcccaggcgaggactgaaggcaagcctgggcaggcccccgtggtgggggagttgggggtggtgggggagttgggggacgtgaaaccagccctgggcaagcccggcctttgtgagtccccagggccagggagggagctgcgcctcctttgctgctgcccgctggggactacaggtactgtctccacactgcataggtacaggcgctggggcctggctgcaggggacccctcccccagggctgcctctcagtccttgtctctggggacacagaggtcatggggagggcatcagctggcactctgcaggcctttggtgcccccaccccgtcttcctcccagcccttcccccttggcagtgaagcccccaaaaaaactggcccccactttcccccaaacaaatttgcaagcaggtccatttaaaattttttaaaagctttatttttaaaaatgttttactgtaaataacttttcatgaaaaagttaagttgcctcacggggcaggagggtggatgtgggacacagcccaaggggctcagggtggagcaaggcactcccctgcacaagcacaggcagggggctcggggtgatcccccgtttcctggtcccagtggttctagcaagcaccgcgtccctcccggttaagcctcagctatagctacactcactaaattagtctttctgtccccccttccctctgcagcttggctgctcctgtccccaaccctgcataaaaccaactccccgctgctctcagcctcaagttgggctcaaagattagggatttatacctctagagatggggccagaaggccccagaggccttagaaaatctcctggctccacccggcaccccgacctcagttcagtctcctctctctggcccccttccccagctccgccccacgtactgccgtactgccggc

SEQ ID NO: 61712 - DNA, 1670 bp, Bovine  19866880918629
  misc_feature (1)..(1): n is a, c, g, or t
ncatgggattttccaggcaagagtactggagtggggtgccattgccttagagagaggaggtttgaaggtaccaggaatgcatttgaggctactctgtatgaaactagttcctgttcagtctaggaaagcatcagagagaacataaattgagatctggctttaaggggtggaagggaagccatcctgtggtgattttctgaggagttaatataatgcttgcctcgccttcagatcaaactgcagccagtttatttgggccacctccgatctgccaggcacgtggtagatcctggggatacagtggggaataggtataccctctccctctcctcttggagcctactgtctagaaaaccacagcaaatgccgaagacctggctggggggccgaagcagtgctgggacaaccctgaggcctgagagcacggggcttgcccccgcaggtgtctatcctgtcatcctttgagagtcgccttatgaagctggagaactccatcatccccgtgcacaagcagacggagaacctgcagcggctgcaggagaatgtcgagaagaccctgtcctgtctggaccacgtcatcagctactaccacgtggccagtgacactgagaagatcatcagggaagggtgagctcgggccagagcgtcacattcctgacgcctcttggaccagtaggctttggaagggggatagaatatgtataagcctggagtcccctgtgttaattctgttctcccattccaataccattcctcttcatcttccatctgcccgggctgatgtggctcttctcctttccaggcccacaggtaggctagaggagtacctgggaagcatggccaagattcagaaggctgtggagtatttccaggacaatagcccagacagcccagagctcaacaaagtggtaaggggccagcagagtgatgtgagagattggcagacaccaatccctgcccgggtctcattactgacactgaaccagctaaaagataatatagtcgaataaaaagaagtatataatactatgcacatactatagacattaaaatctctgtttcaggaattacaggtatacattttgattgcattttaataatttagctaaattataagttgttgtttagttgctgagttctgtctgactcttttgcaaccccatgaactgtagtctgccaggctcctctgtccatgggattctccaggcaagaatactggagtgggttgccatgcccttttccaggggatcttccttgaccccggaatcgaacctgtagctactgccttgcaggcagatttttttttttatttttaaactatctgagctaccagggaagcccaataaaaaaaacaagcaaagcaattaaaaataacaaaagatttgaatagacatttcactgaggaatttatatggatggcaagtaagcatgtgaaaagatgctcaacattgtcactagggaaatctatattaaaaccacaatgaaatcaacctactggaattgggaaaatagcaataataaaggaaaaactgataataccaagtgctgttgaggatccagaacaaccatcctatattgttggcagggatgtaaaatggtgacagtccctttggaaaacagtttggcatttccttaaaaagtttaatacactacctgctccaacaatttca

SEQ ID NO: 61713 - DNA, 739 bp, Bovine  19866880962196
  misc_feature (1)..(1): n is a, c, g, or t
nctccagatccacgtcggcgatgaaaccccacgccaggctgagcacagagaagaggcgctgcccgcaggcggtctgcagggatagcaggtccatgggcgccagcagccggcggcacagcagctgcgtgcagttggtcaggaggtcttccttagtcacctgctcgtacctgcaggggagggagtcggatgaggagctggggcaggccaaagtaaccttgagcccctgggggagttgacagcgggtgacagccaactggagtcactgagagagagagagagagaggaccctggaacagaggctcagggctccagagacgagtggtagctcgcaggcactcataaaagaaagcctggcaggacctgagggaaaataaacccgcttggaccctggctctcacccggcgtaatagttcaaagaagcggccactgcattgccagagcctgccgggaggctacacaggggcttctggatggcggtctcccagtcaggccgctccatgagcccgttcaccacctgttggagcacaggaggcctcagcctgggaagctccccccacccgccacggcgcccccacaacccagacccaggcccagcctcccctgggaaggcctcacctcgtggatcagcccatctccggacatgaccaccagcgcgtcccagcgtctcaggtcctccgcacgcaccagctcccgggcgtggttccgccgctctgtgcagagggcgcggctatcaacgtgg

SEQ ID NO: 61714 - DNA, 1332 bp, Bovine  19866881112238
  misc_feature (1)..(1): n is a, c, g, or t
ncccctgcccaaagaccctgacgctgggaaagactgagggcaggaggagaaggggcgatagaagatgagatggctggatggcatcagcaattcaatggacacgaatttgagccaactccaggagatggtgaaggacagagaaatctggcatgctgcagtccgtagggtcaccaagagtccgatattaagcgactgaacaactgaacaacaacaccccaccctcctgagttcaggacccttccctgctttctgagacttcccagtaggtcctgggaggtggaactgagatctgaggtgttcgaaggtaggatttttaagaggcttcatcaatgcccagtgtgctaggatgtaaggcagtgtttaggctgcatttgcacgagaatgtgaaagtaagaaggtcctcccttcccaacctttccctgctccccttcctcccaggctcccagaaatgggcctgtgctcctctggggcatcctgggatacacctctgggtgggaggaggctggccagttccttggccactcaccaagagtcgtggagagctcccagcttctggtctcccagggatggagacctaggtggcctcttgcccatgagggctgggttctgaggctgaagactgcgggattttctcctgtccccaccggggtgctgcccaggggctaagctgtgactacactgagtgacatctcctggtactaactctgagatggaaaccagcctggaagggctgctgggggaggcagagagccgcacctccctcaggccgctgagcctgtcccggggctgagtgtgagcaggtaggaaagtctgcccggtcaaccacccgcccaggctgcctagggtgggcatcacccccataccttctccagaatctttctggcaaattccagctggtgcagttgctgctggtgggcagctgccacctcagtgtaggccttcgtcaggttcttctcctggagaggccaagggagggggtgcgccagcgtcagctcctccctcagaggctgcagagctggcagcccgggaaggaggaacaaagagcccggctcacctgggcttggatgctgtcctgcaggggcgcaactcgcggtctcttgggggccgatcccacctgggtgggctccagggaacctcggtaggtgtctgcctgcagctcatagtcctgagcaggtggggaaggacatagactggctgtcagtggggggagctaggggaggggggagtcggggactggcggaaggagggagggggagggggagcataaagagggaggagctgaagggactgcttacctggagggccacctgcaggtgctggagaggcgggatg

SEQ ID NO: 61715 - DNA, 1140 bp, Bovine  19866881380786
  misc_feature (1)..(1): n is a, c, g, or t
naggaggagcagacgagctggaggcaggcagggaggacagaagacgccccccatcacggccaccctctgggggtactcactgtccagtcacaggtgtctccaggggacggtcacatgagaggcagtggaagtgtgccaagagctgcctgtgagggatgggacacacgcagagggtgagagccctgcccagagggccccaaagggagggatggagaactcagagggtttggctggtaggctggacactcaacgcccagggggaacggggccccaggccactggaggcaggtctgggccccactccctgcacacatcagctcctaagaggtgcccacttctgggcacacatctagcgcccatctaccctaacccaaaaagccagcagggctctcaagggccccggcgggtgggtgccctgtgtaagccttgacagccctctggtggccaggaatggaaatgctgggactcgagctgccatgagccaggcacccccaggaggagttgcccccgcaggctctgcctctggtgggctggggcctgtcaccctgggagctgagctctgggggctatggacccccctcccacctgtgcccagagaaccttacgccccgctcccttccctctctctgctataatatgaatcggcctgagctacaagagcttttcaagctctgtcccttgctatggccggacagtcccagataggatctgccagtccctctgaacacacatggggaccctccagccggcccaccctcgcccctaccgggcctcacctccgcatggcggctgcctcgtccgcctggtagagtggagagcgctctttgagctgctgtcgcaaggatttccaccgatcctccagtgactgcttcaccgggtccaactccaggcggtccagcttgggggaggaagtgggggacggggaccaggtgagctctgagaaagcaggtgggggtctgcagtgcccggaggaggtggcgttgcccgggtcaccttgttgtccatctccaccaggagcttgtccagcatcttctgccagtcctgctcctgccccgtcatcttggccaccagctcctgcatcatgggttcagctgctccgtggggcgtcgaacggacgcggctcacttggccgccagggca

SEQ ID NO: 61716 - DNA, 475 bp, Bovine  19866881790171
  misc_feature (1)..(1): n is a, c, g, or t
ncagcctggcccagtcggtcatgtccatggtgtcctcccagagccagcactcccagatcagcaccgacaccgtctcctccatgtccggctcctacatcgcccctggcacggaagaggagggggggaggccctcccctccccccgggccgccagcaggaccccctcagatgaagaagaggtaagcggggggtgcgggatggcccttgccatctgcagagctctggttctgcaggctcatcccaagcagctcagtccagggtctgccagggagatcagaaagcctccccagtgctcgggaagggagcccagaaaacagggtaccgcgtccttaagtcgaagacaccctcatatctgatctttgatttggcaccacttctgtcctgaggattggtttgggcttgctgccaggcgagctggggaggtaagcttgcctggcagcttacaaggtggtgtctgcaccttgatttttgccgct

SEQ ID NO: 61717 - DNA, 1054 bp, Bovine  19866882106742
  misc_feature (1)..(1): n is a, c, g, or t
nctgtttcgggccgaggatcactcgccccgaacttcgcgcgcggcgatggccactcaccttctgggatttttttacacaactggactcccctccccctggcggcccccggggaggggcttgaagacccgatcccacggagagagccggggctctgactcatcgtcgggccggaacccgaggtcctagaaaagacaggctctcaggaaaagaccctttccccctgggggtggtggtggtgggagctcagttccaggacccgaacgcccttggtggcactggacctcggctttctggacctcttggaaaaataggcgatgccggtgcgcgcggctcccggagcgtggtcccagaacctaatggggcgccccctacctcagggggccgctccagactccaccagcgcggtttcctctccctcagatccggcaaccgcagggaatgacgcgggtgcccccacagccccggcaacgggcagggagggcgagccccatagccgtcaccgagaggcccgcctgggcagcaccgataaggagctgaagtcaggagccgccgcggcggacagcgtccggacggcgccggggacccctcggcagcggggcgaggtcatggatgcaggtttgtgggggcctggcggggaaggcctgtagggggattcctattctccctggtgaggaaagttggccggagtcaactgaacaagaggggctgggtaccctggaggcgagcccttttccccatgagactagaagctggtgggagtctgagcccagccaaactggctggagtgccccgctggaggccgctgccgctggccaggctcagctggatcaattacccgtggatttcaggcgccgcgtttccacccgggtgcccgagttgtgatcctcagcccctagtggcggttccggtttgtgtttacagcgggcggctcccggaacacgctcccaaggccctgccacgtgctggtgttgttaaatccgcgcgggggcaagggcaaagccctgcagctcttcaggagccacgtacagccgctgcggcccaggccgacgtctc

SEQ ID NO: 61718 - DNA, 1486 bp, Bovine  19866880363722
  misc_feature (1)..(1): n is a, c, g, or t
nggggctccaaaattactgcagatggtgactgcagccatgaaattaaaagacgcttactccttggaaggaaagttatgaccaacctagatagcatattgaaaagcaaagacattactttgccaacaaaggtccatctagtcaaggctatggtttttctagtggtcatgtatggatgtgagagttggactgtgaaagaaggctgagcgctgaagaattgatgcttttgaactgtggtgttggagaagactcttgagagtcccttggactgcaaggagatccaaccagtccattctgaaggagatcagccctgggattactttggagggaatgatgctgaagctgaaactccagtactttggccacctcatgagaagagttagctcattggaaaagactctgatgctgggagggattgggggcaggagaagaaggggtcgacagaggatgagatggctggatggcatcactggctcgatggacgtgagtctgagtgaactccgggagttggtgatggacagggaggcctggtgtgctgcgattcatggggttgcaaagagtcggacacgactgagcaactgaactgaactgaactgaactgaaagaactaaagttagctgaaaagtttattcagatattcctccttttataattatacatctctttaaggctagattttctttatatactcaaccagaacaacatatcactacagaattgaatgcaaaaagcatatatgagaataaagctgacttctgttaattcagacattaaagctttgcaaaaatgtaaatcattgccactcttctcaccaaatctttttgttttggaaagtagttatgttttcctaaaatgttatttatgttaacatgtaatggattttcttttttgttaagtgaattaatatttttaaatgtttgcagttttaatttcaaacatgataaatattgataggaataatcaactttggagtcctgagtaaatagtaggaatataaagcggtcctacttgtgagtagcatataaaagcccaaactagaagttctgacctgaaagaacagagttctagtactggctgccatgaacctgctgagtggccttaaataatgatttaacgtctcaacatgttctaattcatttagtcagtccatgtcatagggctatcagaaacaaattaaaggtaaatagtattcactaggatttttttttttttttttttacatcgctcagttgtgtctgactctttgcgaccccgtggactgtagcccaccaggctcctctgtccatgggattttccaggcaagagtattggagtgggttgccatttccttctccataggatttttttttaaggtatgctgggagagaatattacttgtaaaatttggaattcaatgagttaagccagtttgagttgcttatattgcctgtcatcaggtagatgttttctgttaggcagggaaatgttttgttatcccaaaaaatgagt

SEQ ID NO: 61719 - DNA, 988 bp, Bovine  19866880398932
  misc_feature (1)..(1): n is a, c, g, or t
natttgctctctgagaataaacagcatggataagtaaacaaaatcttattgttggagtccattttttcattttagcttgttttaaaaggaagaaaattccaatttgagagtttgttactgggacacaaaagaattgggatgaaaacaaagtagaacccttgaatatgtgtctgtgtagcatgaagtgcattgttggcattcactgcaggataattttatctttgttatgaatatccttaggtcttaaaacagtaatggtagcttttatagcatgcttgttaacatgttgtgcttcagtttcacatcattacattagcctttgcttgctgctgttaaagaatttctctctcctgaaaagaaaaactctttggtcttttgatctatagtgaatttgttttttttttaataatttttttttttttggctttgctgggtctttgtttctacacgctggcgcgctctagttttggggagcaggggctactctggttgcagcgctctggcttcttgtggtggtggcttctcttgttgcagagcacgggctctagggtgcacagtcttccgtagttgtggttcccgggctctagggtacaggcccaatccagttgtggctcacaggcttagctgctccatggcgtatgggatcttctgggaccagggattgaacctgtgtcttctgcactggcgggcggattctaccagtgagccaccagagaagcccaatctatagtgaagttttaatttttaatagaataatttcatttactaaacattctgcagagatggtagacaagttgcctttttttgcttagtgcccaaagtgctacttattggttgtattccactcaaagaattttagagtttaaaggctgggatatgaattagttaatggtagaacagtagtatttccaaaagattcatttcatgtgaattatgtttcttaaaagaaataagtagctttaagtgtttagataatgtggaatatcta

SEQ ID NO: 61720 - DNA, 763 bp, Bovine  19866880494448
  misc_feature (1)..(1): n is a, c, g, or t
ntaactgtgtaccatgaaagtatctttatgaattctacattaggtgataaaaatgcccattttaaagaaaataattcaagaactaacctttttgtactcctaaaacagcaggagagttctcctgtaaagttctgtcaggttcctgaggaggtacaaccatggcaagtgtatgcattggcacacgtggaacctaaaaaatcaactcagaaaaaaatgatctcagaccaaagaataaaacaaaggtccatacatgaaacagagatcttgttttagattttcttcatataccacccaatgaaacagagatcttattttagattttcttcatataccaccaaattaacttttttgtttctttaaaagaataagagggaaaggaagatgaaaaagaaggagcagcagcattgtttaccaagcaataatttctgagaatactgatagggcaaattcaggcaatctacacatagtccatgatttaagctaaatggaattaatatcactctcttgttaaggagacagccttgctggttttaattatagctaggaataaaagtaacatgatcaactgaccaatttacccttgttcaaattctatagggtcaaaagaaaaaaatccaacacatttcccaaattagtgtatttttagcagttctcaggatatcgttgtagaaaagaacttaagacatcactgaactttgtatacttattatactctctacatactctctgtatttttaggtagttttaaaaattaatgaatttt

SEQ ID NO: 61721 - DNA, 960 bp, Bovine  19866880521959
  misc_feature (1)..(1): n is a, c, g, or t
nctggagcgtggtctttacatctctaattaccaggcagcctgaaataactgaaagggattttccagtaacacttggaagggtagcacgcagggctcagtggagccgcacagctcctcccggtccagtttatcattcagcagcaaatcacaggtgcctggatcaagccgcaaatgctgtctattccccttaaaaacaactcgggcgccccgggcagccagctctcccatcctgagtcccaggtcttttgtcaggttggccacaaacgtgccactttctgtctcttccagtacagagtaccgaatcgtttctgaacctgcctcccacgaaagaatcaatgtaatgaagatcatcacttgccttttcttctgatgtagtttcctttgcaccatttccattgttatgtctggttccagaagaaaaatctttttccaatcccaatcactacgtccactgttgacccttcaaaatgtctgctccggaatttcaaattcgttcctataacttgtctggcagcgaatgctccctgaacacttctgtcttagcttaacctgtaaatgagctctatatttttctcttgggcttctctgaaatggagtccaccgagtctgcagagcttatatccactcttagcctgcactgccaccatgcgttgaaatgagtaacttcgtgggggtgctgcaggtcaacaccacatccaaaatgtaaacattataaacgttttaaggaaaacgctgagtttctcagactgcagtgagtgaaccacatgcataaagacttatctgggagtcttgttttttttttttttttttctttttcaaaacttgaattttctagccttctggctgtactaactaatctgtaagtcagtctttctctttaagaattctgatacatactaacacatttaagagtcattccctcaggtaatataaacttcctataaccaattttcattcatt

SEQ ID NO: 61722 - DNA, 773 bp, Bovine  19866880582608
  misc_feature (1)..(1): n is a, c, g, or t
ngctcaagtcctctagaacttttctgacatgacacaatactctcaaatagactcctgaggtaatgcatcttgtgacactatctctatagacttttcttaggaacattgttttcctctctttctcgaaagtaatgcttttcctgtctgtcctaccttggggtatagaagttttttcctctctccctttttattttccaacttatcaaatgaggctttagacaataccaaattaaaaactcaagagattcaatgattctcctgttctctcagtttgtggaactataaaatggtcagagggggccagttgcccataatggggaaatttagcaagaggccagcatctgaggctgagaaggcatgtattggcagatggggtaaaacgtgaagagggcagggaaacaagaggaagaagagaaaaacaaaggccatgcaagggcacaatgagagaagtcagaaagggaaatgagacagggatgggcagagctctgaaagtccaagtgcaacgagagtctgcgtgggtgaggagcaccagaggcagaaagggaaggccaaacctgaccaggacctggagataagagacaagtgatccaaggacacacgtccacctgtgaactcatctgcgtttatccacttcaccattaggaaacaatgaggctgcaaggtaactgctgagctacatatggccgggagatgagctcaaagaacgagagagcaattttaggcatggagcaagagaataaaaagaagcctaagaagcggttactgtctccgta

SEQ ID NO: 61723 - DNA, 671 bp, Bovine  19866880649350
  misc_feature (1)..(1): n is a, c, g, or t
ntcataggaagggcagacctaaccaacccatacccaacacttttctttctgcctagggctgtcaacatcctgccgaaccgagtggtaggcagtgtgggccagcatgctgaggagcctgtagagaacctagctctctcccactgcggctgtttcctggccagcagtggccatgaccagcgactcaagttttgggacatggcccagctgcgggctctggtggtggatgactaccgccgacgcaagaaaaagggaggaccactgcgggcactgagcagcaaggcctggagcactgatgacttctttgcaggactgagggaagagggagaggatgccaaaactctggaggaggaggagagtgaggatgacagtgactgaagggatgagctgaacctcaggatgggttctcagtggacaaaagtcttgttttctgggttggatccctagagaggctgggaattgaaattatccttttgtgcagcacaagaagatgctcaggatcagcacactgctgtgaggaagtactggctttgtagcagctgctcactccaccagtgtaagacaaagcccacagttggggcaagacagcacagacacaggtatacaccaaccaggggtttaatataaatacaaccagcatagaagaattcaaaactacacatacaccaaaacca

SEQ ID NO: 61724 - DNA, 1127 bp, Bovine  19866880678735
  misc_feature (1)..(1): n is a, c, g, or t
ntcagctgttccctgttaagcagagcttagcgaacagtaattgaataagaaggcagagcactcagaggagcaggaaacaagtacaattttatgaaaaggattatgcagcacaaggtcaaaccctgccacggtttgttttcctctcccttgtattcctcttcgatcagcagaagaggctgttatcagttgttggcattatgactgggcacatccgtccagggtcaaacatgctgcagtctgcaaagccagcagcagattgcagtgctctgcagtccagccagaccagcagaacttgtgtagtgccctgttataaactagaataccaaactggggatgttgccttaatggggcatttgagggcaaaagcaacgaaagcttttcctgtttcagaacaaactgtccttccataagtgctgccttaggaacatagaacatgtgttttgttttttaatggaagtatagtttatttacaatattgtattagtttcaggtatactgtgattcagttatacatatgtattctctttcagattattttccattttaggttttacaagatattaaatagagttccctgtggtgtatagtgagtccttgttgtttatctattttatatagacacagtagtgtgtatttgttaatacattaacataatacatgttaatacatagacctgtttggagcaagccaaagccaaagctggtcctcacagcatcattaaattctgttttccatgatatttaatctgtgcatggaccctgatgagctagtttaattttcttttgaagtgctgtatatgtggatattatcttagagttgcatatgaaatggcaacttcaatattttcaatagatgcatggagatgtttaagaaccaacttaccgatgaacatcatcactaggagatcattgttttgccatattaacagaaactccctttgtgattttgcagccacgacagcccaaccctgactggcgttactctgcctccctgagagcaggaatgcacaggtatgtctttccctcctccttctgtcagaagttactgtaactgtgtgactcagataaactcttgtcttcataggccggaagcagctgtcaaaactgagatgcctaaatgctttgcca

SEQ ID NO: 61725 - DNA, 687 bp, Bovine  19866880695041
  misc_feature (1)..(1): n is a, c, g, or t
ngtggtggtggtgaaattgaaattctggaggaggtacagttactggtgtcagtatctctggggtatgactatggcctgggtgactcaggtggggtaaagtaaaaattgtgagaggggagagaaggtcatagtattaaatggatcatctccactcttgttgaagtcaccttgagcggtgtagctgtggtggagagggagacggtgagccattgatgaatgaggggccgcacccagactactggtagattgcggcagcaaggaggggagaagaggatggcacactgtgatgccacagacttcaaggaggaaaaaagaaaatggtttggcagtaggcttgatgaatgaatggaaggctggatggatggagatttatgcttttattaggcagctttcattgaaagttaaaatctctgcttgctggattcagttctaccttgttaaggctccctcgttttttaaagattctcttccttgctggctagatctggcttgcttcttgtttttgtgtttttagaacacagctagcccatctgtttacacattaaaaaatttttatttttggctgttctggtgggtctttgttgctgtgctcagactttctttagttgtgataagtggcagctactctctagttgcggtgcgtgggcttctcattgtggtggcttctctcattgcggagcaccggct

SEQ ID NO: 61726 - DNA, 977 bp, Bovine  19866880713467
  misc_feature (1)..(1): n is a, c, g, or t
ntgttggtatattataaatgaagaatgaagaatagagacaaatgaataatgactctggaatttctgctttgagcattggagtgaatggagtatcatcgactgagatgagagatttagaagggaacagaggagaagaatcatgagtttgatttcagattgcttctgtttgagatgcccatgagactgccaagaggagataccagacaggcagttggatacatgagattggagagacctgtggactttaagtttgtatctcatcagcatatttagatggtgtgtatacccatggacaggctgagatcccaaaaggagagagtgaagagaaagaagaagaaaagaagaagaagaaaaagtctagggccaaacccaagcgtattagatgagtatcttgtgaagaaactaacagcccgagagaagggtcaggagaatagttttactgagtgagtgaagtcgctcagttgtgtccgactctttgtaaccccatggactgtagcctaccaggctcctccctccatgggattctccaggcaagaatactggagtgggttgccatttccttctccaggggatcttcccgacccagggatcgaacccaggtctcccgcattgcaggcagacgctttaacctctgagccacaactcattaaacgtaagtctttcaggactgtcctggtgggaaagtggttaggtctctgtgttcacaatgcagggaacacgggttcgaaccctggtcaaggaacggagatcctggatgccatgcagcatggccaataaataaataaatgtttcaaggtttgaaactaatgctgctgagaagttcaataagatgtgactaaaatgtgatcactggctttggaaataatacaattagtgagcttgctgtgagcagtgttagaaaagcagtgctcaaggatgccaaattagaggagattgacaagtgatgggaggtagggagatggagatagcacacgtag

SEQ ID NO: 61727 - DNA, 769 bp, Bovine  19866880776667
  misc_feature (1)..(1): n is a, c, g, or t
ngatcctggaagcatagcttccatcgcctctccctgtggggtcagagtataccaccctccagcacattcatgtattcaccaaacaaaaactccactgagttttagtgtctctaatttttactggggtttcattatgtaggcataattgactaaagcattgcccaaacgattgaagttgtgcgctgtctgccctcccctctcctagtctttgaccatggtcaaagatcatatgatctatgatcatatgatcatacctgtctgagcatcaacatttgctatagcatttatataacaaatacagcaagagtaccagcatgaatataacatttggaggagcaagtgtggggcacaggtcttttggctccagtgtacttcataatacatgtgtctatcaataccataattataattttactaataatgccagtgttagcccatattgaaaaatggcagatataaactgaaaaatagaagtcaagagatactgacacgttactaaagttcctttcagtcattcataattagttcagcccatcatcatggtgtatatccaagacgtccccatgggccagggtcacacaaccatgcagacttccatttgagattgtcaggttccaaaaaaaggagctgtctcagctcgatatgcttcactctttctggcatctggaataactggactaagggctattttggggacgaatacaaggtttattccattgcataatccatgtattcattcctttaccctcagtattacttccccgtctct

SEQ ID NO: 61728 - DNA, 1111 bp, Bovine  19866880795983
  misc_feature (1)..(1): n is a, c, g, or t
nctgcaaaacattaaacctgtaagaaaaattcaaagctgttaattttatgagacttttccaacaccagagcaattctgcttacttcaaaggcagttccttgcccagataagagagatttgcagatgagaaaaaacttaaccacaggaaaggctgagtatgttcactgtgtttcctgagatgccttcctggaacttgtctatgtttgcactgttttatcttcattctatttctccagatacttatctactttgcccttccaatttggatatctttatgataacagtttccagctctttatcttcacctcatgctttctaatttacttcctgcattcgtattctgccactgagcttccctgggctgctcctctgacccaaatgatatccctaaggtgtgtgatctccctttattataccaaatcaaggaaacaaaaatatgtcatgccaaaatagcctttttaatataaaaattgttttgatctaaaggcaattaagaaacagcaaaagctgtggtggtggtttagtcactaagtcgtgttagactcttgtgacttcatgggctgcagtcagggagccttccaggctcctctgtccatgggatttcccaggtaaaaatactgaagtgggttgccattttccttctccaggaaaagcattctgcctttcccttattttcctaaaaacaggacataaatttagaaatatatccctccttctctctctaccaagaaggacaaacattaattatgtggacaatagtagacccttatcagcctggagttggcactagaggaacctatgtgacaaactttaccaacaagccttgatctcccattcgcttcccatttatttgccttcctatagtttgccacctctagagactcaaggtatttgcttttgtcttgtgacttttttaaaatttattgtcctttgttgaaaatgctacataagcctgaattctaagccacctctttgagctactcattcctgagcttcttacattaacatctatctatctatctatatacagatgttgataaacttctgtttgttttctctacacattttaaattcttgggtaagctctgtaacagatagactgtttcctggg

SEQ ID NO: 61729 - DNA, 1559 bp, Bovine  19866880803529
  misc_feature (1)..(1): n is a, c, g, or t
ntggccggaccgaggagaagtccccagcatcttgcgtacctggccacccagcggacactcagtcaggttcaggccaccaccccctccttctgccccctttcccatttgcagacagggcccaaggccaagagccagttctctcccacagaagtccaggtgacactcaccacggaggggaagaagcgactggtctttacgtgcttgagggccatggcaaagaggaaggaagtaaggaagaggaggatggagaagaaggcaatatctgggactgtatgacagccgggcccgcgaggatggcctccccgctgggcacactcaggtgggggcagcaaggatgcattgaccaggcctaggtcctgtgtggagaggtcatccaggttgggattatgggcagtgagataaaggtccactgatgcccaatgagactgaggacaccagataagagatctccagccatagcaaatggttgggcctcagtggcctatgaagggtcagaagagcctggaaccactaactttttgacctccaccctctctttctcaggccctcccaggaacaggccctcaccatgctcaagatgtcatctctgtctttagggtttgtgcttgtccactgagactcatttcctgggaagcagagaattcaagtgagttttcttcccctgggaaccttctccagccttaattagaagcctaatttcacaggtccagctgaaccagagagttctttgttctgactcatctgtctgctgactccaatcactacccagtctgttctcaggacactgcctcttgcccttatcccttcaaattccctccctatctgtatccctggtggctggcacaggaccggccaaagcaagtgcctagtaaatgactgagcacacacatttgtgtgtttccaccagcatcagaattattgttgttcgtgcctggtacagagtctggcactcttgagaggatgcctattccccagtcctggtgttcctggccatgtggaaggaaatgtgctggtgcaatagtccgagctcctctccaccctgtcactcacatggcccgggggaagagtggtgatttatttggttggtgactttgggagaagaagctgggcatgcttggtcctgccccttcctctccctctctagggagtaagcaccctgcatgcattgagctctgctcctctagggtgagacagtccctgtccagcatggccatgactgggtgagtaagtcaatccaattttggtttcatcattaggaagcccacatactcatagatataaccatggtcttctcttagcactggcagaagtaaaagatgaaattaggcctgctctgttgacttatttttcatctgactcagaaccaaagaaaggaagtttgctgctggctactgggtaggtacacagcattttgctgaacttaactaaggggacaacaacccttcctgcatcctcccttattttgccaagctccctatttccctcgggcttcccaggtggctcagtggtaaagaatctgtctgccaatgcaggagatgtgagtttgatccctgggtggg

SEQ ID NO: 61730 - DNA, 1818 bp, Bovine  19866880839317
  misc_feature (1)..(1): n is a, c, g, or t
naattgtgtcagacaaaactaaattatcttaataaattaataaaactttattatctcatatttactaggtagagggccctaggggaataacataacctctcaatttcatctgtaaaaaggaaatgtgtacgctatagagttgttgatgcaagggttaaatcagataatgcatgtgaattacttaacacataacagtatatagaaatatacccaataagtactaattccatcataatcatgagtaacaaaccagttgctggtttttgaggatttgagcatttgaggattccagggaaaagaatggatttatgcatatcatgaggcaaggtgaacagctgccctatccaatgaacctactggaccccagtttcctgaaggatgatatctgtctgtcctcttttcttttcctactaatcatttcctccaagcccccacccccacccagctggttcaggcttcagaagactcttcgggatctttctgcctttcccttggtctccaggcgcagtgtgtggggtgtgcccagtaccttaacacctcgctgttcgctgcagcatccccagccggctgacagatacgatgacttcagccttaagctcgcttaacgagtatcctcattggcttccatccccaagggctttttttttttttttctgaaagggaaatgaaaggtgagtttgctgttgctttggcaacaaatttcaacctctacctaattttccagaatgagaacatatctattaatacattcgatagactggggactggggagttgagttgctcaacgtaatttttcttccaagttcaaaacagctcacccagctcggttagcctttggaggtgctgcggttagaggctagcaaagccgagggcagctgttaccggaacctgttggcagagaagtttaaagtgtacccgcaacaggtggcagctgctgctgagtgcgcttctgagaaaagaatggcgactgcatgcagaaaactcctgcaaagcaggcaagtggaaactcttctccttttcctgtgcttatctgtggggggtgcagcaaccattcgctattcggtggcagaggagatggagagtggttcatttgtagctaatgtggctaaggacctggggctggaggtagggaagctggctgcgcgcggggcgcggcttgtttccgagggcaataaactgcatttccggctccaccgcaaaacaggggatctgttcgtgaaggagaaattggatcgggagtcactctgtggcaaagccgacccatgcgttctgcactttgaagtagtcctggtggagccactgcagtcctttcgcgtggaggtcagggtatttgatatcaatgacaatgccccggttttcctaaacaaggagcctcttttaaggattccggagagcacccccctgggttcacggtttcctctgcagagcgcccaggatctggacgtcggcctcaacggtctccaaaactacaccctaagcgccaatgagtatttccacctgcacacccgcttccgcagcaacgggcccaaatatgccgaactagtgctggataaacccctggatagagaggagcagccggaagtcaacatgacaatcacagctgtggacggagggtctccgcccaagtctggcaccgcccacatccgggtggaggttctggacgtcaatgatcacgtaccccaattctctcgactggtgtaccgcgctcaggtaccggaaaatagcgccaacggttccctggtggctacggtgactgccacagacctggacgagggctccaacaaggagataacttactctttagctcaaaacccagaa

SEQ ID NO: 61731 - DNA, 732 bp, Bovine  19866880866806
  misc_feature (1)..(1): n is a, c, g, or t
ncgccgagtcgcggtctggtagcagagccttagccactcgggttcccctggtcctcaggctcccttcgcaattgcgggtggccaaggggccctctgtccggagaaggaccccagctgaggacaggcacggccgcagacagcacgcggctaacccggagttgcggcggacaggcaggtgaggcgtgctgaggtggaagccagggtaccttgggtggggggggcagtggggtgtcatgggcttgaggtgtgcagtcactgtgggggacgcggggggaggctcacctggccccagggacttgggatgctgaagcctggatcactgacaacccatgggcgggaggctgttcgggggccttgtccaggacgtgcggcggaaggcctcgtggtaccccagcgacttcttggacgccctgcacccccagtgcttctcggccgtgctctacatttacctggccaccatcactaacgccatcacttttgggggtctgctgggagaagccaccgacggtgcgcaggtgggtgggtgggaagcaggcctatcttctgtgttcaaccagccgtgccctatgccctcctctagtgtctatggttgggctgaggaggctcccagggaacttgggtacctgtcctgacaggggccattgttggcttctaagggggtgctggaaagcttcctgggcacggcagtgactggagctgccttctgcctgatggctggccagcccctcacca

SEQ ID NO: 61732 - DNA, 885 bp, Bovine  19866880904643
  misc_feature (1)..(1): n is a, c, g, or t
ncacgaaacgtcctcaggactgaagccttcttggctgagaaggaataaaagtttaaaagtaaattttgccttcaagaagggaatcaggcttcaaggatattcacagacaagaaaaaaagtaagggagataaaaatctattgcaggctaaaagaaaactgaacaaataataaaaatccgccccaattttaatttttcagttttctgtatcaaattttatctagatatctttcaaacaatatttgtaaaccacagctcttcctccaatctttaaaaaattttctctgtaacagcagtaactcatgaccttttcaagtcacaatcaactactgtgttaggatcaatgcattagtgtttatatgagttcctcacacaaaaagcactgtataagccccagtatcttttactatatccagagtgtataatacctctgaaaagctcaaaaagcacagtggcaattttcaactttttccattttacatccagacacattagttacagaagatgagggaagaaatatggggaacctttaaaaattaatactaaaactgttttgggactttatgttcataagtcttgctgcaggcaaaggaagaacaaactatttttatagcctaaagtaagtaaactgaaatatttcccttccactggaagcaagggaaaatctcaattactcaaatctcttttaagaattatccaactcagttataaaaaattaaaaaaaaaaaaaattacacagactgtttcttctctttgcatataacttaagagtttagcaaaaaactaaacatcatctcttaagaacccatacaagaaagcacattaagttagcaacagaatgtttcctctaccaagggcacaaaaacaacaccgttctcacaaaaaca

SEQ ID NO: 61733 - DNA, 1117 bp, Bovine  19866880959008
  misc_feature (1)..(1): n is a, c, g, or t
ncccctctgctatagcaatgttagtctgactcacgttgagcaccggcctcgggagtctcattcaaataggtcttgctgcattttctcacaaggcaaacaccaccctattgttttttatcgaacaccaagtgtgtctttatcttacgtatacagaccacaactggcttctgcaggtaccaggttcctacgttattgattaacagtcctagcagatatattgatgcaaaatgccccaggttgatttcttcctccttggtcaagcttaatttggcgacagtaaaaatagctgggttttcacctgaatgcaccccagtgcagagccctggtacacagtgacctctagggcagggcgggacaggatgaccactctcagtgagcatgctgagtggtgatttcagcaaggcaaacctcacttgtaatgactgtctcctccataggcctctactccctgaagcacaccgccagccatttcccagcaacaaaggtcgtccttgtagatttggaaagaactgtgaggggcgcctgggctctgccgagtaatccccaacagttcctcctgctctttaactgccacaacccagcatccacccagaagtcaaccaggaagggccccgaaaaccaccacccaacctgctgagatgtgcccctcggcaaatgtgaggccagagacgtccctagtggagaaaggcgggcagagggggaacctggcccgtagaaaagcttctttccatggtcaactctactattaatattaatagttctagccagcttgtcattgaagctagatccaaaaagtctcccaacatcgtgaccaatcacctttccagtgaaacaggaagagacaggctaatccttgccatgaaaggctgaggtgggaagctaggtgaggttagccctggtgatggagcaggtacaaagggagccccattgtgtcaagagtgacggaggcagctgactgctccccatctgctgagcggggttcagttgcccaaagtggcgggtttactcacagccctgccggtctggagaacgcaaggcctctcagcaaagtcagaaagcccagccccctcggccgagggccccctcctgttgcccagctgtcgtcctgagtcaggag

SEQ ID NO: 61734 - DNA, 977 bp, Bovine  19866880971139
  misc_feature (1)..(1): n is a, c, g, or t
naaggcatttaaatgagaatttagtatttaaattaggaatttagagtaacgaatgctctactacaagtctagctgacttggagatctctatttatacaggttcaaatattagtttggatcttgtttttttgagttaacatatacagtgtgctcattaatacaggtgtggcctgtccacattaagtattgaacaactcatttcttctggccagcatctattacttcagattaaaggggacctaccatataaagactgatcatagtaagaatttagtatgtgctgtgtgtgcaaagtcactttagtcacatctgactctctgcaatccgatggactgtagccttccacactcctttgtctgtgggattttccaggcaagaataatggagtgggttgccatggcctcctctcggggatcttctcaactcagggatcaaacctgcatctcatgtctcctgtattggcaagacggttctttaccactactgtcacctgggaagtcccaaaaatctagtacaaagaaagtatactgaccaacttcaccttaccatcaagttacaagagcaaggaggcatacaaataacagaaaacaaaatccaaattctaactcatcaaaagaaataattcactaggcagcctgaaaatgaatggaggaactctcaggcacgggagggaggaggctaaggacaaacatttatggttagacaaagaaaagtacagaccatataaagcatacagctgcaaaggctgaggtcaacaaccctctaaagcattcaaaggaagagtctggtgtggttacggacaagtgttccaccctgggaatgtatcctagaagaaaagaataactgaatcaagatgcaaaaagcttaattctggactaactggaatgcaaaacctttttaaaatcttaatcacaaaatgaagacacagaaatgaacagatcaaatcaaaggagtatgtgtgtaaaatatctgtaata

SEQ ID NO: 61735 - DNA, 1016 bp, Bovine  19866880989371
  misc_feature (1)..(1): n is a, c, g, or t
naatctgttactatgtaaaagtagtttagaaggggaaatataatttgtataaataatttaccttgtttcacatttctctgaaatgttcatgttcctgaaaagcctgatgtctttaagggtaggcaccatattttttcatctttgtaatctaatcctaaagcccagaacaaagcttaacaaatagcaggttctagttaaattactgtggaatctgcaataccaatcagaattcttaaacagagtgccaagggttctaatctctgaaagatataattttattatgtaagatgtgagttcatgaaagaggccctaccccaaactaaacattgcttttcctcagtagagactgagaacatgcttttaacagactaacaaggagataatacacagtagtaagtacttttgataatgtatttttatattattcaaaattttgtgggggaaagggtggtaataggtcaaatccatgctcctgatttaagtatagccttaaataataatctcttcaaaccaaaagaaaataaacttttctttgttgtcagtcaagtcccaagcacatcaggtactaaaagatagtacacattctcactattcagagccaaactaactagtaaattaacataattgagaccatttgggcagtaatatctaagatttgtttgtgtaataacacaggtgataacactggcttgggtgtcaagcgaatagtatgttactcaaatactgaattcatacctcttaaacaactgtcagaagataccagatgcaaacactctaattgacatgttttacactttattctagttacctgtttattattctggaaaaagaaattctgtccatattcctcttgaggctatatatacagtccacatcagacgcacttagactacaactattcaaactaaccacctccttcctcctcaagttagtctcctctcaaatatatacccagtttctttctgggaggggatgcataaaaagacactacaacaacttgttcttctgatagcttg

SEQ ID NO: 61736 - DNA, 737 bp, Bovine  19866881007845
  misc_feature (1)..(1): n is a, c, g, or t
ntctctgttgctgctgaggcagaacaagaaccaagtaggactggctattagtatacttgatgccaacaagtatgtaggtaacaagtagggtaggaaaaactttccctctaccctcttatattctgtaccagagatctgcaaattaaactgacaaaaaacaaacttaaaaaaaaaaaaaaggagtccttgtcactgccatgaaaataaggaccaagatattgagaagggaaaatcatcagatggcaaaattatatacacacaatgtaacataacttaattttaatattttaactcataaggcaatgatatattttactgagatataaatgtatgtgtataaatgcattttaaaaacagtagcaaaaaaaggtatgtgtaaaaaaggtaaagtggttacctctaaaaaagggactgaaattgggtatgttatcaaagacaacactgacttcattctgaagttttaattctatacaaaaattaattcctaaataacgcaaaattaaacatgaatttttaaaaattagcactcaccctgccattatttcccctctaacacttttatgcagttggcctaacccagttaaagttcacagagataatagggcaagtggtatgattctctgaccattcttcctgacaagacattcagaattctttcaccatcaccaccaccacttcgctcatttcccagctcattcccatggttctatattaaaacactcactggtggaaggagt

SEQ ID NO: 61737 - DNA, 1079 bp, Bovine  19866881021751
  misc_feature (1)..(1): n is a, c, g, or t
ntgggttgcctttccctctccggggatctgcccaacccagggatcgaacttgggtctctcacattgcaggcagactctttaccatctgagccaccagggaagcccaattattcagtaagtatgaatatttattgtgtctctatgttcaggcaacatgacggtagttttcaaattgtggtaaaatgacacagtatgttactaaatgcttggtaaaatgaaatagggtaaagaggcaatgttacataactggtcaggaaatgcctttttgaggaggtgatattgaagttcagatcttcaagattacctgaattgtaacttgaagagccagctactgaagtctggcagaagtgcagtctaggattggggaacaaatgtaaaagctcaaccgtgttatgcatcttagctgaataacgttaggcatgttccatacaattgttcgttcattgttctaatctctaaaagatgagaaaaaggaatccacccctcatatacttaaggttcaagagatttggacaggaaagcactcaacacaggcaaaaccaatacaatattgtaaagtaattagcccccaattaaataaatttatattaaaaaacaacaacaacacaggacctagcagtaaatggtcaacacagcattattttagggtttactattgcgattcccatatgccacctggacccgcactgaccatagataatttaaaaggacctacgttggggggctggaccagcatctcttctcccctaactgaagcctgttctgaaccacaaaaacgattcctatgcagggcagggcccgcctccacatgttacttggatacaaacactctgtaactctgcgagtgtatatttccttatttgcatcaagatcaacagcaaagatgaagtctgagtcccagtccctgtataggtttctgtgtgaccttgggcggctctttctcttttggagcctttgttcccccagcggggtctctggttcccctgcgtcccgcgctcaccgtagcgggcccagagcttgggctgcacatccgagcactcgcggattaggatgggcaggtcgggattcgctttcttcag

SEQ ID NO: 61738 - DNA, 1438 bp, Bovine  19866881112196
  misc_feature (1)..(1): n is a, c, g, or t
naagcggaggctgcaaggttaaatgacgtgtggctacgtagtaagggagcatttaagtacaggtccacaatcccttatctgaaccttttgggctcaaacacataaaaaaaattttttaagcaaagaatgtgaacataaccacttacgactataagtaaaatgagttcacgttagaatttacctcaaaatgaatctccctcatcccagtttgtagttttcaaagattatggattcttaggaggggctgtgggcttcactgccctgccttggaggacagaatcagccaaagtatgaactacaccctctatatttctggaagggtgtatagtctgctggtagtaaaatcacagattctgttttaccttgggaaagacactgttgacttcctagtagatgctttgtgttatgtccaacagggtgcatatcttttgttatttgcagacacagcattctattaatcttttttttttttttaatcctttcttgtttgttccacaggcattgttctctgttcttggaagaaaaagaatgggctgttcttgggctggttctcttctgtcttcaagttattttttccctatctctaagcctaatgaccattgctatcttattaacaatttttattttttgctctttgagtggagactgagaactggagatcatactagtccctactcctaggtggtcagtggtggtagtcttgggtttctttgtgccttcattgtttttgggtggttaaacttttccatatatttgaaaactccaaatatggtgaggaagcttatatagtaaacacctgatcttctgtgtatcacatatatagctgggtttttggaagtgtgctgagattaggatagatagcgtagtgttaagagttcgtattgctcaggaccaaaagtatttgcaggttggtggtgcacagggccagagataccacagtcctggccagtatttggttgcgctaagtcttagttgcagcatgcaagatcttttagttgtggcatgggaactcccatttgcagcatgtgggatccaggggaccagggatcaaacccagccccccttgcattgggagtgtggagccttagctgctggaccaccagggaagttcctttggccagtatgagagaaactgtatctcacatttttcctgccaggttgcagaggcactgtttgcatcccaactgaaacctcatcaagagaagtcaaattttactatcaagaccccaaaggtaataccctgtaccgcaccctgtccattagagtgccttagagttctgccctctgcttcccttcccaaccacttttaatgtttttatgttttggccatactctgtgtcttacaatgcagaatcttagttccctgactaggggttgaacccatatcctaaacacagagtcctaaccactggacccccagggaattccctacttttaa

SEQ ID NO: 61739 - DNA, 3713 bp, Bovine  19866881126830
  misc_feature (1)..(1): n is a, c, g, or t
ngctggagaaggagcccttggtgaggtttgcctagaatctatgggtctgttcacagctgtagatcctgccctgaagctggaacaaaacatattctcagtagtagttggatggttgttggaagcatctagaagcatggctttccagctcaataagttaagaaataggttgtgcgcctgttcagtcgtgtccgactcttcacgaccttatgagctatagcctgccaggttcctctgtccatggaactgtcccagacaaggatcctggagtgggtacattccctcctccaggggatttttcccatccagggattgaacctgagtctcctatgtctcctgtattgacaggtggattcttttctactgcaccacctgggttctcctaaaagctatgaaatagactttacctaaagataatttccattttttagcatgtatagtcacctctcagtagttccaggaccctctcaccaaaattatgtggatgttcaaatctcttagataaaatgacatagtatttgcatataacctatgcatatcctctgaatactttaaattatctctggattacttgtaatacctaacacattgtaaatgctttataaatgattgccattcaagctttcctttctggaactctctgggattttttttttttctgaatatttttaatttgctgttggttgaatccaaggttgtgaaacctgcatatacagagggccaactgtgtagaaaagtgtgtatgacaaaaaagtacagtttaatgaataattatattcactaatataactgtaacctattcaggtctagaaatagaactttatttttaagcccaaatgagatagtaagaatgctttgtattgtaatttgcttttttcactgtgttggcacttttccattatcagtgcatataattctacctcattcttcttaagggtcaaatagaaattctgtggtttggaaattccgttgcttatttaactgtccccatattggtggacctttaggatgttaactatcatttatgtatgtgtatgtattttatatataatatatgttatatagttattataagcaaatgttataataaatatttgtgtttgtggtggcaaagaatcagcctgccaatgcaggagattcaggttctatccctgggtggagaagatcccctggagaaggaaatggcaacccactccagattcttgcctgggaaatatcatgcacagaggaagagttggacacgacttagtgactaaacaacaaacaaatatatatgtatttgtatgtattttatatataatatgttatatagttgtaaacaaatgttatagtaagtatttgtgtttgtggtataaaattgtgtaagtggtgtgtttttttttggcatactggcactagtctataacctctaggataaatcctaaaggaggaatttctcgttcatagaatagacttctttttattatttgaaagtttcacttaaaaatgagtctttattgaagaatttataaggaaaaagaatgaactctcagtaaaaagaaagggtgtttcctccaaacattagagaggaatgggattctgatgcgtggatggttcagcatacactattttagttgttggtagatattttcagagagcgatttttgttgtttttgcatttgcatttctctttttaaattttattgaggtatagttgatttacaatgctgtgtcaatttctgctgtacagtagagtgactcagtcatacatgtatattctatccatattcttttccctcataacttgtcacaggatattgaatatagttccctgtgctattcagtaggaccttgttgttatccgtcgcatacataaaagtttgcctgtgctaatcccagacttcagtcctttcctcccctactccctctccccagtggcaaccacaagtcagttctctgtatctgcgagtctgtttatgttccgcagatatgttgacttgtgttgtcttctgtattccacatgtaagtgatagcatatggtatttgtctttctctttctgatttgcttcacttagtatggtaatctctaggtccatccatgttatttcattctttttgatggttgagtaattcaggaagcttttttttttttgagggctgtttagtaaaggttatatatcttattccttagagagtgacaggcctaggatccagccagagattctgtatagaaagctttatgcagtgagattttagcagatgatatgttttctgtgttgaggggaacttctctggattctcacagtctccaaggctgcaagtttattgttggagggagatgagattggctatagccatgttttcaaataatattgaactattgtggattattaacgtgtgtatgacttttcagacttcattgttcttcatctaatatatcaggacaaatggagaatgcttatatctttgtgttagtttaattttggagatagtggcttaaagcaattacctgagtggctttagcaagccatgttactaaacagttcgtagatttttttagtttcatgtgtaactcagttatataagcaataaatagtttttatagcctttgtaagaaggggaaacaagacagtctgtgaaattcttcattactctaggacagggcctccgggggtggatgatccactattatttttttgcctcccttgttcattttgaggcccttgttcagtgaaaagcccatttctgagctctgtgtcattgtgcattccactgagaggctactatgctaaagccacaagccaaaatgctgatacaaaaggcatgccctggtttattcattcattgattatgtgaggacagctccaggcccggttaactctctggcaaacgaaagatcatgaatgaagtagggatggttaataatatttgggagattgataccagaatcagtatttagacagtaatgaataaaacagcaggttgtctccttcccgcctgttccccaaagaaaaacaacttaggaagtggtaacatagccaaatgtgttacccattgcgaggaagtcataaaaacaaagatcttgtctaggtcacagtatcaactgtcagagtctcctggtgttgctctgttattgtgaatgtcactgccaccttttagaagggaatcctgggaattccctggtggtccagtggttaatactctgtgctttcactgaggaggccacaggttcaatccctggtccaggaactaagatcccataagccatgcagcatggccaaaaaaaaaaaattcagtagaagtgaacccttgctgttgctgttccccagggccccagtgtgaagtttgcatgtcaggagtaggttcttcctagatgaaggcctgtggctgtggaatgcctgttcttgtggctttggggtttggatttgatgccgttgcttcttttcttggcccacagcagactcacactatgtggcccacttcctctgttggcagggtcattctctacttgtacatgagtttcagtaaacttgagtaactctttgcaataactgccctctgaaccaggcaaagcatctggtctgtttagccaaaccacccacaccatactgttgaaatttggtgaacttccagatttttccatctgatgcagtaaccaacaaaggaaaagataattttatttttattatcagaggtactgaagaggaagagcaagccagctagagtagttcttcctc

SEQ ID NO: 61740 - DNA, 756 bp, Bovine  19866881179399
  misc_feature (1)..(1): n is a, c, g, or t
nttgtctatgtctgtgattctgtttctgtttcatagataggttcatttgtgttattttagattccagttatgagtgatatcatatgttatctttctctttctgacttatttcacttggtatgataatttctagttgtataaagcttcacttttcctattaggatttttgtgaggattatggtgcatgtaaagcatttatcataatacccagtgtgaaggacatactcagtccaggatagctattgacaagctccgacttctagccctctgctggtttttcccattgtggatcttgttggcagtctccttgccagactcatggctgtgcgggtacaagtcagagtcaggctatggatgtgcatacagcactgggctttcctgagaggggggaagctctgacagggtcctgcctggagccgggcacaataggtcagcggctatccccattatctcaggccttctctacgggcaggcgtccttagaaaaagtaggaacagggcttcttttaaggtgtctggatgacagccacatcaactatgtgaccttttcctaggaagcctggtttccatggtgagcaaggcatgttctttctcaagctatggtctgtggtctgtgacttgtggccctctctggaatctggtggcagtggccccagcaactgggtggggacatctgtccagaggcttcccctccaatatctccagggtgtgcaagtgcagagatagcctcccaggctctccagtgtccacaccagcc

SEQ ID NO: 61741 - DNA, 710 bp, Bovine  19866881186405
  misc_feature (1)..(1): n is a, c, g, or t
natggacgtgagtttgactgaactccgggagttggtgatggacagggaggcctggcgtgctgcgattcatggggtcgcaaagagtcggacacgactgagtgactgaactgaaatgaactgaacttaactgggaagccattaaactgggaatcagagctcccagtgctttctaaaagaaggaagcattttacgtaagatctaggcgtagaggactccaaaaaagggcattggcctagtgcaaggcagtcagagagatttaacgcaagcttatttaaccagatcacctgggttgattgtatttcgggagttgaagaaactgcaccttcttgaaccgggtttggacttaacggagaccgcaccagcaaaaacgcttcagaaaacgcaacttctctttcttgctatattgttcctcttgtgggaggctggctctgaagaaattaggtattccatgacagaagaaacagaaagtgggtttttgtggccaacttggcaaaagacctgggtctcagggtgggggaactagccacgcggggtgcccgcatcgattacaaacgaaacaaacagctcttgcagctggatttaaagaccgggaatttgctgctgcataaaaaaccagaccaggaagtgctgtgcggggcgacaaatccttgtatactgcatttccaactattactggaaaacccggtacagattattcaagctgatcttca

SEQ ID NO: 61742 - DNA, 1015 bp, Bovine  19866881194879
  misc_feature (1)..(1): n is a, c, g, or t
ncctgctttcagttcttttgagtaggagttgtaaagcacaggagcaggatgtctttgaaggtcagtttctgatgactcacccttctccactgagagctgggcttatgggccaaaaggaggctttactcgtggcctaattttagactataacgcaaccaccactggtcactcgtaacatcaggcttccttttgatatttgataggatttcacaacatgttaaaattccagttttatgtattagcttttgttgactacacttagctggtgactcccttgtgattgtggcagccccttgtcactcagcggtgggcattgaccctcggcagtgcacttccttacagctggcttgttccaggggtgcaggctcttgctgacttcgcccctcctcacctgagttgagctggtcttctggccttgtccccacccctggctccgtcttgggacccaaaaccctgagcccctgccagctgagaatattgaagtcacttgtcttcactcccagcagctttgggcaggcatggtgttatcccccaggtctactggttctcatcatctgtttttatttgatccggttttcttacacaacatttagcattattcgaattttatgtcattttccccccaggaaaataaaatgcttttctgaaacagcttggcatttggagttgccacaggaagtggtcttccccgcaccagcttagaccagcctgaggcccacagtgttggtgaggtggacacatccagggatgacaggccttcagcggattcacctgtcctgtcgtgggtccctcgacctctagaggagacttctttggccagtgcccgtctgtatttgccagaccagttaggaagtggacatgggagcactgggagaagacctgctccctgcactcgaggacctttatagtctgttaatagctatggcactcagaaaccctgaggataaaccagccatttctgaggcagtcctgttttcttatctgttccagcgcttcaggtaaacagaaagcactg

SEQ ID NO: 61743 - DNA, 1772 bp, Bovine  19866881240912
  misc_feature (1)..(1): n is a, c, g, or t
nttagtctttctttgtggatgaaggtgctgaggctcagaaaaactaagtgcaatatttttactcagtttcctctaaatttcccaaggatatccaaaattggcttgttttaatgcacttcattgccttgtataaagtatttaaagtagcttacaatggaagatatttataagaattatttttaaaatctgtttaaaattcaaagtaaaagatcaagagaagagtgggaacaatttatcaaaaaatcagtaataggttgagtgcaaatcctaatactcatcttcctagaagtaaatccagaaatataaaaaagaataaaaggaaattctctataccaaattttcaagagagaaaaaaaaaaaaaaaaaaaccaactcctctctgctataaactcaaacagttgattactgatcattatgtaagggtttagcaatatactcaagagtatgtttgatagcagttttggaaaaccagctgaaacatatttgttaaaaatactatacttgcatagtcactaagtcaagagcataatgttaaactttatttcctatgtttaattctgaagttacacaagcattaaatgaacatatttttgtctgcaaacattcaaataaacatacagaaaatgtcctacgaaagtccccttttagaagcattctataagaagttagtataatttagtagttaagtttctagagatttgaactgatacagaactgttgcttagagtgtttcaaaaaacaggtggtgagcatgtttctgcaacttttcaaatattaattatcatccctccaggcttttggcaaaaatcagcaaaataatattaataataataataattttaaagtcatattgccaagtttccagctcctttaaatgtgaggtaaactttgcaagattataaagttgagagagataaattgaagcacaaaagagtttctcttccctaattcacactaccctatgtccccacgtccaggcttaggaatttctctagggacactcaatatatttactgatggatccattccacaagcacaaatggaaagcctactgcatactaagtcctgctgtagaaactagggacctagcaagagtgaaacaagataggtgagtccctgacttcaaggtgatcacactgtaacccatttaaaatcacaattgtgttatgaaaagactctggatttggtgtaatattgcctttttcagttttatttgtctaaacaaattgtcttataaaggagaatctcattctattaataactttttaaaaataggcaatataatgctgactgctattagccgtagttaatattcttatgccattcagaatctttgtgccaactttcaatagttttgtcttcctttataagatttcttccatgaaatgtattctttcctttcttcttctttattaagatgacccagttgccttatttttcagcttttccaccattctttgctatcattaatgtgttatatagatttatgggaaagtttattaatgtgttatatagatttatgggaaagtttattttttggtatgtttacaattctaattagtcattcatttgggaaatgtattaacttaaaatggtcatatcttcaaaaggtaaatttatatatgctgagatcttatcagatatggcaggctacagttcatagagctgcaaagagttggacagaactgaagcaacttagcacacatgcaatttgattagttttggttaatattaattatccattaaagctggcagcttcacacctttgtcat

SEQ ID NO: 61744 - DNA, 1192 bp, Bovine  19866881316842
  misc_feature (1)..(1): n is a, c, g, or t
nagtgaagtggctatgggctgaagatataaaaaataaaattaaagaataaagaatctaactccttaaaacatttcctagcattttaattttctttatgaaaactaagacattcctcctctgcacagcgatacctattacatatcagagaagcctcaaaggcactcttacaataaacactggaagtcatacacatgcccaataaaattcctgaattaagtaattttattccacatttaaaagattcagtaaagattaggaagactaaaggctcacagaagaagaaaggaaactgggaaagcataactgggatgagaggaggggaggagaatatgacaagaagaaacagacaacagtaaagaaaaaaaaaatgttgcaatcaagagacagaggactggcctgcctttgaatatcactccagctacatcttagttcttggtcttcatccactgtcaacagccattctggctgcatttctgaactgcgctctcatggaggtgatacattcaccagccatctttaggaaggtaaatgattaattgcactgttttcccactgctgcaaggacaatgaaagggaaagtaaacttgtgcacctcatttcatatctagttgtaattttccacacaacaataaacagaaacatatactttaagtttataaggctggtctcttttttgctttggtgattacctctgtgtgtgtttgagtgtgtgtgtgatgtctgtgcgctttcatcaagacagttactacaaaaagcccaatctccaaatcattatcaaatggacaatactttcaatgtacattagatcttctaatcacacattttaacaatatggaatgcttatggtttttttctgaatatcccttttaattagaatgtttaaattgatctaataaaatcataaagaaaagcaatgtgatttagagttctcatttccaaatatgaaaatcaccaataggaaaattaaatgtctaatcttatatgattatctctaaagcctgcaaagaaattctattttgagatctcctacccaagacatgagacagggtgattttgataccaaaggtctaaaataaaggatcatgacaactttatttctttgcttttgcaaataagaaaaagaagagggaaagcacacttttgtgttttaatgctgtgagtttagttaaagtcacttccaaaacacctcaa

SEQ ID NO: 61745 - DNA, 1621 bp, Bovine  19866881320483
  misc_feature (1)..(1): n is a, c, g, or t
nccgagtccttaagacagccatgtggtatagcccagtctgcatccactgtgtgcacctttgccaccatgtggcccacactcacttaccccgccaccagctggctcacagcacggcccagtcacccagctcaggaggcagcagccaggcatgctgtagttcacattggctacctccacaaacatgttggtcgtggtcgacagggaaggtgagcaccttacagtcaccaccaccacatatttcgacatgctttcacagtccagggctctgtccagcaccaatgaattcttttaggtggacatcagcttgaaggggacatgaggcctcagggtgcatgtcacctacacactgacaccacagtcacagttggacaaggagatgaaggcaatgacagtgcagagtgaagggtcctctaactggtaaaaagtattatcgtttatatccagcactcacaaaaaccttgcagtcatttgatattgaggaccttctttatcaactgcttttacctgaatttcatagggtttcatttcttcatattcagtctaccaaatagcctaattttccctgagctggaatcatttttgaagctttttgtttctttttaagtcaagagggatatcattgccaaaggaaaaggcagtttcaccatttacatgttcatcagcatcacaggtgtttaatatgatcactaatgttccatttgctatagtgtctaaaagtacactgtgtacacggcctgggcaaacaatggagcatcaagcactctgatcagcagctgaactgtaccttctagttctggtttgctcccgtcccagtgcctgtcaatcataaacgaagttctggtgtttcttcttatccagacttcaattcaggttaaagtgacttagttcaccacgtgcctgtacacccaaagagaaataaaccctggagctaagggttagaatagcattgtaccaggaaacgtgaatctagcaatctagattcagaaataaattaacctgtttctcttgctccaaagaccagaggatttttattaaagcatgcacctccacatccacatggaaaacctcaggtggcctgtccacaattacctctaggtggatactacatttggccctctgtccacatagcttctcccaatggatctagatattcacaaacaaaatgccattctgcaaattcatcttcataagttccctgtggaaccagttccccatacaacccagaacaggcacggcaccagctccgccagctccagctccaggtcctgggtgatgctacccacgaaggtgctgtgtttggcttcctcagggaccaagaacgaatctggccactgccagtccctcaggctgtaaggagcagaagtgagagcagcaggcactggtgtccctggccacctctccttgaaaatagcattgaaaaagcattacacctttcctgtcactctcactttactttaaaatcttgcttttttaaagcttcatatttgaaataaattatctttttacagtttttgtcttctctctggtggtgacaaaatggtttccttctttagtttttggtaattagcttactcctggaaggaaagttatgtccaacctagaagcaattcaaaagcagaga

SEQ ID NO: 61746 - DNA, 1198 bp, Bovine  19866881369273
  misc_feature (1)..(1): n is a, c, g, or t
ntatttaccttaggctaaatttctaaaagaggaatgactggagtaaaggtatgctctctttttaatttgtcaaatcatctccattaataattacactaatttataccatgtatcaaaagtcataccaaagtgctaatttctccacatcctagccatcaacagctattatcaaacctttaaatgttttttccccaaacatttaaattttgagtttccctagtctggcaaaggaaatttaaatcactctttcactgtgcatttctttgtttattcatgaagctgtgccttctccatttatttactgaaaatttatatttctttttctgtgaattgcccatgaaattatttttcattctgggcaagttatcttttgtcttattgattttaagcaactttttattcttttttttaacaagttttttttttttttcctaaacaaactaagaattggtatcaaaattttggcatctctaaaatgatttttcccctttcttttatcatcaatgaaatatcttaatgttaagctatctcacacattctaactctacttgattatagtatttattcttttaatataacttctgggttcataaaaacaccctcattttctgaggcacactgagcctcagaaaggtgatcttttaaaaaaaattttccattatattagcacatccaaggaaacttagacatttactctttaagaatttaataaacaaccgataccccagatcttataataaagaaagatttccaatgtcttaataaatttctgcctacactaatggtaaaacagcttaggcaataatatcatgtagaaaactgtgacgtgtttaaaaactaattcttcacttatatggttaaaaatatgttttgtataacaggtcagaataaaaaaaaaactgatggtagtttgataatttatcattttataaaaagagattttgttaagattatagtcctataagtagcaaatgtattctactagattttcaaccagttctaaaaaggaaaattatatttctcactcaccttttccagatcaagttcctttaaaagaatacttgcattcttatttgcttctgcagcctgttggtctttagccttcacaattgtctcaacacattggtgacattttttcaacagttcctataccagaaaggaattatataaatacggaaacacaaaaagaggccaataa

SEQ ID NO: 61747 - DNA, 2357 bp, Bovine  19866881404560
  misc_feature (1)..(1): n is a, c, g, or t
ncctgcagcggccggtccacgatcacctccaggtggatgctgcactccgctctccgcccgcacagctcctcccggtcgatccgagaattcacaaacaaaatgccattctgcagatttacctccagaaggtccccgtggcctttggatgccactcggaacaggcgcggcaccagctcctccagctccagtcccagatcctgggcgatgcggcctacgaaggtgccgtgtttggcctcctcagggactgaatagcggacctggccgctcgcggcctcgcctacagctaagagcagaagcagcggaagcagatcccggacctccatgcccctactcttagaagacaccatcaccaattctcagtgagttgatcaaattagaatatcgtgttgtgcaaaattttaaatgttgttctctaatctatgctcaagtcctgctgcttctcttattgttctcctcgctggagttacaatagggttctgggtatttttcttcttagaggatatactgtggtaagacagcgacatcatgtggccaaaatgtaggctctactgttgattgtgtagatttaaattttaacaattgtccaggctaagtttactgatagctttcatttaggaaaaatacctatcttaaactgaaatatatcacttcccccttttactgtgttaaaatatataacaaaatttaccatatcatccacttttaagtatacagtttagtttgttttagccacaatgttgtgaaatatcttgagaactttaatcttgcaaacatgaatctctatacccattagaaaacaactccccttttccaccatactacatccctctcagaaccattctactttctgtttctacaaatttgactactctaggtacctcacataagtgaaatctcagtttggttgtgactggattatttcactaaggttcatccatgtgtagcatgtgatgaatttccttacttataaagccaaacaatattctgattttttatataccacattttgtttattcattcatccatctgtccatggatatctgggttgcttccaccttttagctattgagaatagtgctgttataagcatgggtatgaaaatatgggcttcccttgtagctcagttggtaaagaatccacctacaatgtagaagacccaggttctattcctgggttgggaagatccctggagaaggaaatggcaacccactccagtattcttgcctggagaatcccatggactgtagcctgccaggctcctctgtccatgggatcgcaagagtcagacacaacttggcgactaaaccaccaccaccatgaaaatatctgtgagaccctgctttcagttctttgggatataacagattttttttttctgtttcttcaagtaaagcacatagaaatcaaaggatattttagtttatattttataaattgaaaatatatttatatatttaatttttgctttgggatttaattttgctttctggactgttcacagatgtttgtaaattaataatttattttcctcatctggataatatattcttaattaagaatatccccttttctgctacatttggatttttattcaagaacagtacaattgatctctttttagtgttgagaatatcttaacttcaataattcttacctgtccccttaatatacaaatgatatgaaaatatgacaaagataacatagggataaaacaaaatgaattgagggtaagtcagtgtcaaaatgcataaaagttatcttcagttactctaagcaggtcacaaccacaaagaaggctgaatgctgaagaactgatgctttcaaactgtggtgctgaaaaagactcttgagagtcctttggacagtaaggagattaaatcagtcagttctaaaggaaatcaaccctgaatatttactggaaggactgatgctgagctgaagctccaatactttggccacctgatgcaaagagcctattcattggaaaagactctgatgctgggaaagattgaggacatgaggagaagagggagacagaggatgagatggttgaatggcatcactgactcaatggacatgagtttgagcaaactgcaggagatggtgaaggacagggaagcctggaatgctgcagttcatggggtagcaaagagttggacacatcttatgactgaaccacaataaggaggtcacaaactttgttttcggcaaagaggaaaacaaaaattaactgcaaaatttatagtatcagtaaaagaaaaaatccttgctaaagaaaaactagcttttcctggtactgaaacccaaggctaatttctcccttgagtccaatatcttaagatattcattcacatcat

SEQ ID NO: 61748 - DNA, 1028 bp, Bovine  19866881407264
  misc_feature (1)..(1): n is a, c, g, or t
ncattccattttgttgctttgccatctttaggacatgaccctttaactcacagtccaagatagatatccagctattacactgctattcaaacttgccaataggagaaagggaaagctgtcttttttttttttaaactacttctgtgaagtattccatagcacttgtgctcatgtctcactggccataacttggttacaagaccatccccggtcacaacagaagttggcaagtataatgtatagcccacatgtcctcatgggcagctaaaaatgagacatctattgataataggagaacacatatttgggtgaaattagtagtctgtcacacccactcagaccacacctgtagcccccactacccactaggaggagacagagtcaaataaattgcctgattggcttggtttttggaggagcatttgattgtaatcctccatattggtggtgtgtttttgtagccaaaaaagttcttgttcccctgaaagcttagcccctatagcaatgaagtaataaattcaatttctggaagaagatcctttgaaccaatgatgttcccctcctgtgttattggcacctgtcatccatccctacttccttttatttacgtaaacaaaaatttagggtctgcaaagcttaaacctccatttcacagactcatttgaattattattctggatgtatactaggatttaccagtgaaatgccttcacatgagctttgaagacaggcaaaagtcatcttcccagtcattgctgctagccaacagatcagaaagatatgagtgcttgcagccaagtcagtgtttctttgcccagccatcagtttcatggggaactggaggccactgtggcagccagacatgttccactgtgtagtcatcaattttggaggtgggagaggagaggcctttgtgggagtaacagtttgaatagtagcaatagcagcacttaggcagtaatggtagtatgccttcaaaaccaggaattcagtgctgactttcgcttctgcttgtccagttcggattt

SEQ ID NO: 61749 - DNA, 1486 bp, Bovine  19866881469933
  misc_feature (1)..(1): n is a, c, g, or t
ntagctcacaaaggaaatatttacacagctggggataggtttcagagaggcagctatccccttgtcagtccatgacaagaagtaactcaaaattaccgaaccaagatagcagatctggtgcaaaacaattactttatgattaaatactgcattttttgcactcaggaacgatggagacaccgctacccaaaatgactcagaaaaggcaagtgaccgctattattattctattattattgtgggaggcgggcggtcagatcattaagtattcagttctagaagagagggacagcggctcatttgtagccaacctagcaaaagatctggggttgggcttaggggagctggtttctcggggcgcccggattcttttcaaagggaataaacagcatttgcagatcgagcagaagagtgggaatttgatactaaaagaaaaactggaccgagaagatttgtgcggtgacacggatccatgtatactgcatttccaggtgttactgaaaaacccggtgcagtttattcaaggtgaattgcagattcaagatgtaaatgaccatgccccagaattcttggaaaatgaaatcctcctgaaaatatcagaaagcagccatccagggtctgcatatcctttgaaaatagctcaagatttagacgttggtagtaatacagtacagaactacacaattagctccaacttccatttccacctttttactcgaaatcacagcgatggcagaaaatacccggagctggtgctggaccaagagctggaccgtgaggagcagcccgagctcagattaaccctcacagcgatggatggtgggtcaccgcccaagaccgggacttcccaggtcctcatcatagtcctggacataaatgacaatgcccctgaatttgctcagcagctctaccaggtgcaggtcccagaaaacagccctataggctcccttgtcatcactgtttctgctagagatttggatgctgggatccatggcgagctctcctactcatttttccaatcctcaaatcaagtcattcaggccttcgaagtaaacacagccacaggggatatacgattaaaaaaaaagttggattttgaggaaattagatcttaccatatggaaattgaggcctcagatggcggcggtctttcaggaaaatgcactgtagccatagaagtaatggatgtaaacgacaacgcccctgaattgaccatatcactactcattaatgatatcccagaaaacacccctgacactgtggtcgctgtttttggaatttcagattcagactctggtaacaatggaaaaatgatgtgttccatccaagaccatctccctttcctactgaagctcacgatagaaaatttttacaccttggtaacagaaggcgcactggacagagaagaaaaagccgagtacaacatcaccatcacgggcactgacatgggaacccccagactgaaaaccgagcacaacataaccgt

SEQ ID NO: 61750 - DNA, 1596 bp, Bovine  19866881767528
  misc_feature (1)..(1): n is a, c, g, or t
nacaggactgagcgacttcctttccttttactttctgcattggagaagggaatggcaacccactccagtggtcttgcctggagaatcccagggaaggggggcctggtgggctgccgtctatggagtcacacagagtcagacacagctgaggtgacttagtagcagcagcagcgagacacaccaaagctggccaatgaagatttccactgtgtctgtaacttccctggtggtccagtggttaagactgcactcccactgcaggggtgtggacattcaattcctggtcagggaactaagatcacacaagcagcagggccaaaaaaaaaaaaatctgttactttcttaataaacacatttaaagaacaagtcagcaaaaaacaaaaaaggacgtgggggggaagctgttctttagaccaacttcttctctggaactagcccttggagttgatcaatgaagtttgcagtctcttccacaaaatatccagttaaatacctgaggaaattcagggagttgaacttgggtaataggaagttaataacaaccaccaagactagagaaaagttatggaaagtacccaggctgaatcactgggataggggcaggggacattgagaatcctggcctgaggaactggggatctccttttctccaacccagacaagcctgggggcatctgagtcatctgagcactgcctgggtcagaggaatagaggccttgcaagatccttcctgttatagcccctttccaggcaacatccttcattgcgaaatttccaggaagagtagcgaatggggtggctgggaggaagaaaagtggggagtgacagggttcaaagaagggggagcagagcgacatcacagggttacataaactctcagaggctgccaaagagtaaagacagataggtttgtggaggctggaagccggcgtgagccactgtaaaggaaagaatccacagtccagccgacaaccagagagagaggcagaggctctgagaatctaccgactatggtgagagtatgttcttggggccgaagcgtgggctatttggggaaccttaggaacaggcttgggccgccctgacctccgctgtctttccaggtgtgcgtgccctacctgctgctgctgctgctgccgtcactgctgcgtgtgtctgcggacacaacagaaccctgcgagctggacgacgacgatttccgttgtgtctgcaacttcacggatccgaagcctgactggtctagcgccgttcagtgtatggttgccgtcgaggtggagatcagtgccggcggccgcagcctggaacagtttctcaagggagccgacaccaacccgaagcagtatgctgacacaatcaaggctctgcgcgttcggcgactcaagctgggcgctgcacaggttcctgctcagcttctggtcgccgttctgcgcgcgctcgggtactctcgtctcaaggaactgacgcttgaggacctggaggtaaccggcccaacgcccccgacgcctctggaagccgctgggcctgcgctcaccaccctcagtctccgtaacgtatcgggacaacaggaggtgccggctcggcgaactgcagcagggc

SEQ ID NO: 61751 - DNA, 985 bp, Bovine  19866880272090
  misc_feature (1)..(1): n is a, c, g, or t
ntttttaaaattttaagttgatcctcttattctttgaattatcagattatataagtactactgtaacagtgattccactttaattttataattcagatttaattcacttcacattaacaataattattttaaacttccgctctctctttttttttttcacctttgaaatcactctctgaatcactgactcaaaactaaagggaataaatgtaattttccaggttaatgattattttaaaaatgttatctttttcaatttgccttagacacaagctggatttcaacagatggaagtcagaattaaagacttggaatctgaactctccaaaatgaaaagtttgcaagaagattctaataaagcagagttggaaaaatataagcaactctacctagtagaatgtgaacttataaagtcattggaagataaactagacaagtaagtcaaaacacagaatcacagaaacgaaatttagttcattgatttgtctctaaagcctaatttttatagagtggggcatgagattcgtaggaagggaaagctaactagctggccactgctaagggggagccctaagaccgactgttagcactgtgtcaaggcttcccacactgtgtacaggcgtgtttatgaaacaggggaaatgaacacatgggttagaggcagggtaagtcacaaagtggctaaaagtaatgtagtgacccgactgaggggtgtggaggatggaaagggcagatcccaccggcagtgcccagtccaggcttccccactatctgaaagcagagcactcctaggaaggctttcaaaagccaaagcagcataaagcaaagaagcagggacctgaggacacattctgctagtcgatacatgaaatgaatatgcacaagtgaagcacaggtgctcccagacggggcttagggctgtggcgacttgatgctgagatgtggggtgggcttccggggaaggaggtcagtggggccagtctcc

SEQ ID NO: 61752 - DNA, 1372 bp, Bovine  19866880353416
  misc_feature (1)..(1): n is a, c, g, or t
ntataaagaactctcaaagctctatagtaaaaaaaaaaaaggacataagtcatgaatttttcactgaaggtaaggatggcaaaaaagcatatgaaaaaatgttcatcatcatcaaccactagggaaatacaaattaaaacacacctatcaaaatagctaaaattaagaagtagtgaaaataccaaatacggatcattggatccataataccaaaccaaaaattggatccaatacaaaaaattgcatcaaaaataccaaactggatcattcagattttgttagtgggaatgtaaaatggtacaactaatctggaaaacagtttggcagtttcttaaaaaaagtaagcacacaactaaccacacgtcctgcaactatactcctaggcatctaccccagagaaatgagaatgatgttcacacaaaaacctgtacaccaatgtgtacagtagctttacttacaaaatccccaaactagagacaacagatgttcttcaacaagtgaacagttaaaagtgtggaacaatcatacatggaataccacttagcaataaaaaaagaacctattggtaaatgcaacaaccttatacagatccagagaactgtgctgagtgaaaaaagccaattccaaaagggtatatactgtatgattctatttatataacatatttgaaatgatgaaataccagaaatggagaacatattagcatttgcctgtgattaaggagaaggtcagaaggagaggcacatagacagctttaaagagcaacatgaaggatccctgtagtgatggaaatattcaacttaactgaattttatcctggttgtgatgctgtactatagttttggaagacgttacaattagaggaaactggtaaaaggtacacgtataggctatttctgtagtatttcttactacagaatgtgaatctacaattatctcaaaatagaaatttgatttaaaaatagcaaacaagcctcaattactacatcacttacaaagttacaacttaaaaagtctaacctcttttttaaaggtatgacagagaaactgtgagatgcattactgtcttcctaataatctgttttgaaaatgctaaataagaagaacattatatagttgagtctggccaacttaatgcatgtaagtatctaaagttctctgaagaaagagaacagaagtatgcatatacatcttgtcctacattttatttatctatttagaacttaaacctaagctactccccaaaaggctaagagatgatcataccttagcaccatataaatctgagttcttcattaaaaactctgctgaagttcgtactgtgactcctgtggtttcacactgcagtacacagttttccaatgtcgtcttg

SEQ ID NO: 61753 - DNA, 4291 bp, Bovine  19866880365010
  misc_feature (1)..(1): n is a, c, g, or t
nacaggagagggaatgagaagagaagatgcaggaggagaggggacagcggtggaggtcctgccaggtccacatggaagggatggatgcacatcagaagcctgctgggccgtggtctgagcatcaggggaaggcaggaagccagcgtgagtgagctggggagatgggctggggaaaacgggcatctgcagggaataaggcaggggtggtggctccagtggggtgggggcaggggggagcccaatagacagcaaagagctgataaaagtggggggaggccaaagggatgtgcacagaaagagggggtcagcctaggaaaccgcctgggagacacggcggatgccccaccagacttggagacctctccacggaagagaaccaccccccagcctcatcccgcctggtcccaaggctggtcctggggatggggtttgactgctctccttttcctgctcccaaggttcctcctcccgtgccagaggaagctgacggaggagggaggaggtcagcaatggagttgggcgggacaccctgtcacccaagccaaagggatatttatagacattcatggcgctgactccaaagcgtcatggtggcagatgggccctgggatgcggcactggggtcttcagcccgccctcccttttgccaagcttcccagggtagcaacttgggtgtctggtggagggaagcaggccctagaaagacacaactccctatgccaggggcctggagacgtgggaaggcctgcgtggggcaaatataaaaaccgctgaagggggcagaatcccagtaatcttagcctcctggcccccacccctccctggtcaggcattaagtgtccctcgccggagaggcggggccctccttgagctcccctcctccaggtcccgtgctctctgctggggcctgagtttcccttacatggtcgggggctcgagcctctggcccccccttcccttctaccgtcgctccttcccctttgagaggcctcaagggcacggagaggtcaagatttaaagctgaccaagcttgggggtgggtggaaggagagggaagccaggcctcaggagggggtggagaacggggcccttggcagggcctgggttccacctgtcgctcgcaagggctggctgagaggagggggaacaaggggtctgcctgcagcttcggggacaggactggctgttcctgctcagactctggtggagaaggatgtgccgtggccacagtgccctggagtgacccccgaggagtctgagaagaagaagccgagactaccagacatcatcctggctacctcctggacacgggatcggggctgagcagcccccaccctccccacacacatcttcttggcctcaaaacccatcctggaccactcgttcccatcactcaccagccacctccacgatgtctccaggaacaatatcccgagctttgatcctttgtactgacttgcggtcagcccggtagaccttccccatctcgggttcatattccttcagagcctcgatggcattctctgcattccgctcctggggggaatagggttgaggagaggagggtcagcagagaaaggaaggtagtggagtgagaagggaccgatcaaggaggatggggtggggtagagatggaggagcaggggccagagtcgtgggggaagttggggcatcacagaggaggcaggttatgtggtcctggctcctggcccaggggagcagacaaacttcacacgatgagtgaggataccgtcacccatagctgagaataggtgagggggtttaaggcctttcctggtggctcagacaataaagaatctgcctgcaatgtgggtttgatccctggttgggaagatcccctggagaagggaatggctacctactctggtattcttgcctggagaattccatggacagaggagcctgaagggctacagtccatagggtcgcaaagagttggacacgactaagcaactaacactgctactactactacaggggttttgggaagagtaaagaaggagaatcaaagaaaatcaggaagcaggggataggaaaagcagagggtgggagaaagcaagaggaagaaggatatcaaatgagcatttactgaaatcttcctacatgccagacacagggctgggtactttcacactcatcatcttgttaaatttcaccacaactcaagggacaggattatgagtcccattttatggatgaggaaattgagactcagagagatgaaggcatctgcccagggttgaacagccagcaagtgaaagtgggaataccaagtctcctgaactgggcaaaaggaccagatactaggcaagcccagggtaagtgatggaggaggaggagacagggagggaggctggcctcaggtccagtgtcaggatgtgaaggaatgggggggtggggtcaaagctaacctgccaaacccccacgatggcattggcaatgaggatcaagaggatgacaaagggttcaacaaaggcggtgacagtctcttcgccttcctcaaaccaggccagcacctggggagcaagggaaggagatcaacagataataaagcccctcaggtggttaaggggagcagacagagatgagaacacgtgcaggagcaaagggggcggggcatcacggaggcactgcagccccacatccctttaagtgcctacacggtccactcctttaactcacacaagcgcagccactgctgttattcagcgagaacaggcgggcacagacatgcacagctcggggattaactgggaatgctttcaggtttccctgaccaagttgctggcttgtaaacgaagctcaggggacacccaggccaactacccccaagccacatccatcccacgggagccaaaacccgatagaaaaaaccctgtggtcctcgcaggcgccctgcccacccacagccctcccccacagcccgaggcagggaagctccaatttcatgagggagcaggaggaggggatagtgttacggggcctcctgtacacaccccaccccagctgttgccactgccaggcaacagccccaggcaaatgtcaaggagcaaatctgagaagggagaagtgaggttctgccagctagtactcaagggcccgcgaggcctctaccacagagaccaggggacaaggagacgcttttgcctccagagtcctgtcttccaggaggactacgatgttaaggaaggaagtccaaaatgcaggcgggactgctaggctggtgtgtgcgcaaggaagctccagggcaggagcagaggcaggcccttgagagggagtgggggcagccctgaggttgagggggaaggggagggtcaggtcaagtggacgaggaagggggtcccgggagttccagcgctgatagggggagcagggaggcgaggcccagggacaggtaaggggtctgggcctttgggagcctttggagtccccctcgcaccagcagctctttcccgcctctaggagggagtctctgtctcgaccaatcagcgtcaggagggaggggcaggagcttctggacgctcggggattggcggagccctgtgtgagccccggggcatgctgggagccgcagtggcctgggaacagcagtagtgtctgagccccggagcccggcgctggggggggtaacccgagccctcggagcccttgaagctccgggggcggcttagcttcagtgttttggctgagaacatccttaaagcttaaaataaaacctgcctgcggggtgtgggggaggacagaggagtatgcaagtcagcgtcatcccactccctcagttctagtctgtaggacaggatgctgaaggcttggaccaaaggagccgctgatttggggttgcccacgagcagattctccagatccccccaatctacagcccaggctagcccctagatgcaccccccctccccccaccaccgcgcaacatacttacaaaggaaatgcaggcggccaggagaaggatccgcaccaggaggtcttcaaactgctctaacaccagctcccacagggacttccctgagggcagaggcaaggggaggggagggaagtgccgggggggggggggggacggcggtgttaaggtctaacggatgaatgcagggactccaggtgcaggctggggtccagcctggagcaggaagggtctaaggtgacgggcaggccatttggtactgagaaaagggctgagggagctggcccgaagtccagaaacaggctcctcaaagtggtgggcagttgttcaaggattggatgcctcaaggagaacgtg

SEQ ID NO: 61754 - DNA, 1445 bp, Bovine  19866880414827
  misc_feature (1)..(1): n is a, c, g, or t
nctcgggggtcgggaacaggttctgtgtgcttgatgacagagacagactcgcctgtggagaagggccggacgggctttcagatgacgtcatatctttcactcagacttcctgcccctaactctctcccttctcagcctaggaaggatcaagcaacaatcctggaggaagtctggactctgaaaagaagcccctggaggtagatgggaaactcattgcccttagagtaaaaggccttgaccccaatccccacctgactatgcacaaactgcctggctttggatgacttaacctcggtttgctctgctgtgaaacggggacaatgatgtgcacatttcagaacacagtcttggtaaaaatcaaataagcggatgtacctgaaagtgcggtctcaattggagagcgctttcgtggaagggagaggcccccaccctggggaccttgtatccctcaccggaagggcaggagctcaggcaatcaccctgagccagcccagctggcctccttggaccacagagcaagctcactggctctctcttctctctcccagggcagaaacggaagcagctgaggtgttaagtggatctgaaccctgtatctgatcctagaacctatgcttcctcacttgagggcttttgaagaggcaagatggttctctgggtgacggtgcccacgtatctgtgcggaagggatgagttatgggcgatctggagatgggcataaacatcccactgtctcccatgaccccctgtgttccaggctcaggctgtgagcaaagctgaccagggcagacatcgctgccacgatggggccaggacaggggccctatggccaggggtcccctttctctctgtccactcagttcctcccacatgaaatcctcctgtgatgcatcccccgccctgccctctggccagtagacctgtcaggatggactggtcgacccggagggtggtagacttgatggtgaggatgcggatatctgccgggaccttgtcccccactgtggagagagaagaggggcatgaagtcagcagagaagggagaaaaccccatctttgtctgaagacccctcctccttcaggtctcagggggtcgtcctgtcatcccagcaaggctctccctctaaccctcactgccactgtctccctgccgaatgttcttctccctattaggcaaccacacggactgtagcccaccaggctctgctgtccatggggattctctaggcaagaatactagagtgggttgctgtgccctcctccagggagtcttcccgactcggggatcaaagccatgactcttgagtctcctgcaggcgggtcctttaccactgagtcaccagggaagccctaaaagtgaggatgctaagtcacttcagtcgtgtccgactctgtgcgaccccataaacagcagtccaccaggctcccccgtccctgggactctc

SEQ ID NO: 61755 - DNA, 1270 bp, Bovine  19866880421575
  misc_feature (1)..(1): n is a, c, g, or t
nagcaagtgtcttttaatttcatggctgtagtcactatctgcagtgattttggagcccccaaaataaagtctgtcactgttttcccatgtatttgccatgaagtgatgggaccagatgccatgatcttcgttttctgaatgttgggctttaagccaacttttcactctcctctttcactttcatcaagaggctctttagttcctcttcactttcttccataagggtggtgtcatctgcatatctgaggttattgatatctctcctggcaatcttgattccagcttgtgcttcttccagtccagcatttctcatgatgtactctgcatataagttaaataagcagggtgacaatttacagccttgagttactcctttcctgatttggaaccagtcactctctgtttaaaaaaataaagaatttacaaatgctgaatagtatttatcacaagtatagagtaattcccaaataagggattgatcaatatttataggttaaataaaatgttgcttttgttcttttacaggtttatgaagttctttttttccattaagtattttttgtttgtttgttgatattttagatgaatagccaatagtttttcctgaagccagggatcatgttctcacatctcttttttttttttttttttcataattattctggtaacttctaagagtaacaaaagctcttcaagatgttcgtattaaatgacattatcttttatggtactactcgattgtgaaattgtatgtattcttttataggtcactattcaggttttgaatcagcttatccaaaagattcgagaagacctcccaaatcttgaatccagtgaagaaacagagcagattaacaaacattttcataacacactggagcacttgcgtttgaggcgggaatcaccagaatctgaagggccaatttatgagggtctcatcctttaaaaaggagtcaggctcccatcctcctttccatgcacatccagtaagggttttattatactaggcttcccttccatagattgtgcctttcagaaatgctgaggtaggtttcccgtttcttacctgtggtgtgttttacccaagcacctccggacactcacctgcaagaccttaataaaattattcacttcataagtgttcaggtctgtctgctcatcctaagtagcatgattgatctgctatttaaaattcctgtgatctgtttaaaagaaacaaacaaacaaaaaagccaaaaaacccccacttatctctgttactaatgaagcg

SEQ ID NO: 61756 - DNA, 911 bp, Bovine  19866880440033
  misc_feature (1)..(1): n is a, c, g, or t
ncttcttttcttgattctctgagtaatccctggtcctacattctacaatacagataccatcggtatctatttgatcctgggtttgagttaggctgtgctcagtccacttgccctcattaccaaacagtattgttttattcttgcagattgatgatcttacagcagagctggaaactgcgtcttcaaaatgtctgcacctggatgcaaaaaatcaagttcttctagaggagttattatctatgaaatgaatgcaaaagaaatgtgaaaaactagagaataaaaagaagttggagcaagaagtagtgaacctcagaagtcatatagaaatgaatatgataaaacacagtgaagtagagcagtataaatgggagattgatgaaagggtgagacaggatctcgtagagaaattaaaggaagtcaacctatttttgcaggttaatttgttcatctgtcatgttcttgaattcacctcattgtaaattatgttttggatctatacagcttctgtgtttcctctacttcccttagagcagttggtttggtggttttctggaaggaagggggcatttgtttctccctttaaatatttctgtttccatcacagttatcaccaaattgacctatcagaatgattctcactggagagtcctttgaattattagaccaattggtataaaacaagactactaggaggaaaagaaaatatcgtggtttagaactggtcccatcttcttgaattatgtttaagttgtcttgttaaatttttaaaattttaagttgatcctcttgttctttgaattatcagattaaataaacaccactataacaataattccactttaattttataattcacatttaattcacttcacattgataataattggtttaaacttctgctctttttggtg

SEQ ID NO: 61757 - DNA, 2692 bp, Bovine  19866880607293
  misc_feature (1)..(1): n is a, c, g, or t
naggaggggacaagggaggaatctctggatagagtgggctgctctggggccatccacagtgccctgaggacagccaaagagggcaagatggtgggatggattcgccgactcaatggacatgagtgtgagcaaactccgggagacagtgagggacagggaagcctggcatgctgcagtccatgggattgccaagagtcagacacgactgagcaattgaacaaaagtgccctcaggacagtcaaggagatgcgcctggggacatgtggaatcaggggaaaggtcagggctggcagtggtgtttgggggatgaccagcacatatgtgatagctacccccaggagggtggaccaaactgaactggggtcttcgcgaacagagcaccatgcttaacagcaggtgggagagggccctgtgaggtccacgtggcagctccattcctcagatcccgaggacactgagacccagaaagatgcagtcactcagcccaggtcatgcagctacagaaagtgtgagctaggatgagcccccattcttcagctccagggccttctcgtttaaccgctgaacgtgatgccttccccacagtgtaagctcactgcagtgcccatcagccagccagggatgggggctgcatagttgcccacagctgcattcagaggggaccgggccagaaggaggaaccttggacatggggtcacctgagctttgctgcttgctgtgtgacctggggcaagtgacttaacctctctgtgcctaggtttcctcctttgtaaaatagaggagtattaatgcccagttgatagggtctttataaaaagtgagttgtaaccgtgaagtgcagaaggcaggacccgcaatgtgtaagtgctctgtgaacacacacgtgtcacacagctctgtacccaggtgggtacagatggctgctcaagctcagagtcggggacacatgccttgcaggccctcacctctgtgtgtctagtgtcttcttattcatctgcttaacaaacgttttcggagcacctgctggcaccaggctcttctgtgagcgctggagatacaacagcaaacaagacacaggttcctgggacttccctggtggggcagtggttgggacttcagctcccagtgcaggggagtgccggttccatccctggtcagggaactgggatggtacatgcctcacagccaaggagcagaagcaaattcatgaaagacttgaaaaaatggtccacaacaaaaaaaatcttaaaaaaaagacagtttcctgtgcttgagggccttctgactgggggcagacagacacgatacgtaagtacacagtgtatcaggaggaaaatgagagggtggaggaagcagcaggcgtggcgtgcctcatggagggctgcaggtggggcagagaggacccagctgacccctgacttgctgcatggccttcccctctctgggcctcagtttcctacctgtgagacgacagtccgcccactggggctcccgtcgagttgtgcgctgtggcccggacaggctgcgcagacaggcccggctgtgtgaggcgcaggggcgcagggagaggggtcctcaccgctctcactgtcgccccactaggcacgaagatggcgctgaagtttgtgaacaagagcaaaaccaagctgaagaacttcctgcgggaggtgagcattaccaacagcctctcctccagccccttcatcatcaaggtcttcgacgtcgtgtttgagaccgaagactgctatgtcttcgcccaggagtacgcgcccgccggggacctattcgacattattcctcctcaggtacctgggtggtggctgagggaggggagaggctcttctgggtccctgagtgtgagagctgaggaggagtcaggcccctcccttaaatcatttattaggcgcctactgtatatcagccattgtttggagggctgcggatacacagtgaacaaaaggtcttgctatgggcctagtgggagaaacagaccctccacagttagccagatgaggcattaagatgatggagaagggaatggcaacccactccagtattcttgcctggaaaatcccagggacagaggagcctggcctgctacagttcacaggttcgcaaagagtcagacacgactgaagtgacttaggcaccgcactgcaatgaggaccagccggtgggcgggatgaagtccagcagccccctcctccactgctgcataggaacaggtggggacccaagaggggaagtggcaggaccaccagccttcccagaggaggtgcacgggacggggagactgcccccggggattcccggcacctggctttgcagtcggccaggatgaaacactgccctgccgctcaccggataagtgacaaggcctctcagagccgccgattaagggagattaggtatacagtagaccatgcgggatagggtccttattagcccagtacttggcccaaagcaggcgctccgtacaggtactgggggaaaagctggggaaggttcgaggggtgtgtgggggccagggagggagccgaggatgcccaagtaggataaggaagggcggttggccccggatctgcccaggaaagggaccccgcaaggagttcgggtagagggacagggcgggggcggggatgggaaggagagggcgggacggggagtgggcggggatgggaaggagggggcg

SEQ ID NO: 61758 - DNA, 2582 bp, Bovine  19866880866191
  misc_feature (1)..(1): n is a, c, g, or t
ntatgcgaagagttgactcttggaaaagaccctgatgctgggagggattgtgggcaggaggagaaggggacgacagaggatgagatggctggatggcatcactgacttgatggacgtgagtctgagtgaactccgggagttggtgatggacagggaggcctggcgtgctgagattcacagggtcgcaaagagtcggacacgactgagcgactgaactgaactgaactgaactaccttttggctactgtgtataattatatggcaaataacagtgtggttataaaaaggctgggttcatgctcagtctctaaatcatgtccaattctttgcaatcccatggactgtagtccccctggctcctctgtccatgggattctccaggcaagaatactggagtgggttactatttccttctccaggggatcttcccaactcagggagcgaacccaaacacgggttctgcattgtgtctcctgcattggcaggtggattctttatcctgagccatctgggaaggcctataaacagatttcaaacgattcaaaaatacttgtatagaattgactacactcagtaatctgtaagccaattagcaaattttttctattttgtaccaactgggtttaaaattaatagaaaagtatatatacaaaatgtagaaaataaagagataaagctataatgaataaatgtacttttacatattacttgtaagacaatgcagctggctattctaaaggaacacctagatgcccttcctgccaagtatggaactgaacaagtcagtttaacatgaacacgatttcactatacacaaattaggtaaccaatgacccctcactcataaaagtcatttacaaatgactctgtacatagcagttatatatatcagagaaaaatggaaacactagagtcaagatcaaattaacatttgtgattaggcctcttttaccccacacattcaagccaaatagccctcacaagtctacagttaaaaggtgcagagaaaacaaaggtcactatgaacatatcacttataaaactagttccaattcaaacaatgtgctttcatttcctcttgcagcaaacaaggataatagaaatacttgtatcattgttatgagtaataaagtgaaatgacaccgataaagcttgaaaattacttagcagttagtaataagctatccacctaagtgttcccatcattattatattccccatagataccagcaattatctacaaccatcctagagacttgttgatctctccactcacatagatgttttcaagatagatgtaatcaaacaatgcaatgttaatcaactataaaatgaaaataacacatctcacaaagatacagaatttcattatgttaatgaaaacactatttttaaaatgacggtaagacacaaaatagcaactgaagtagggagaactaagcacgatgaaaggatgggaacatccaaacatgtattttaacaccagcatctccaatttcatttaccaataaatttccccaggaatcctatgatggcacacaccacgaccgtttacttcccccagctttatctactagcaatacacattcttctccacctagaaaattcctactcactgtcctcagaatctcagttcacatgttacttcctgtaatctttcccatactccccagaaccttctctcctttcgtggccccacagcactgaactgacggactgtcctcagtactcaaactgtactacattaagttccgtaaacatgtcttctgctagactcttaagttctttgaaagcatgggctacgttttcagggtccagcaccgtgcatgacataagacacacaagacgcatgataaattgaactgaatcctagattttagaattgggaagggccaaaaaaagaacatttattttcagacgcaaaaaggagactcaaagaagaatgagtgacttgcccaagtcacagagacggtggttgtgacaagactactactgcagttttctttcccagtcaaattcgtgaggacagtacagggtgtctccctcactgttccaaactggttcctcacgcacagaacggggatatacaagagatcctcaagtagctgcttttctattacaaacactataaatggaaatccataaatgttgagaaacaaacgccagtttaatttttgcaccattcttatatcaattcccaaataagaattcagagaaataagcagaatcacctcgtacagcatcatattatatgcaagcaatatatgtcaaacattttgctttttggcattagtgcatttaaaccgaagcctgtttccaggcttacaggttttgacaagcctgtctacacaaactgaatagtgagataactaaaacggatactgtacaccaacatgcaaaaacattatttatacagtacaggctatgtcaaacgctaataaaatgcaagtgacaacttgcctttggggaaacgagacacaaggattcacactttgaggaagttcaagttcaccagccaacagctacaccacgatttgctgccagcaggagaggcgctaaggagaatgcctacttccagtaag

SEQ ID NO: 61759 - DNA, 1029 bp, Bovine  19866880918132
  misc_feature (1)..(1): n is a, c, g, or t
ntatggattagttgagggaagggaaggagcacttcttaaaagacaggaagtatggccttctgcactcttaatcatttggaacagtggttctcaaagtgtagtccctggaccagcagcatcaatattttcttgtcacttggtagaaatgcacattcttgggccccactctagacctaccgatcagaaacttggggcttgttttcacacgctccaaggtgactgtcatgtacagtaaagtttgagaaccactgatttaaaggaagaggaaccctggtctcacctgcctgcctctgtcttgtcgtagttcatgcttgttccggtaatggaaggctgaaagaagggttggcattttttggaggatttcaagaagttatttcttcctgaaaggattggagcacagtgatgtttggagtcagggggtttgttctgacttgtagaaccctgtcctctctcaaaggatgtgagttcattcccagccccaaatcaatgtgcataagagttagggtcagaatgaagtccaccaggctgaatttattgcttaccgaagtactgggcaaccttctgaaaaagaaagagttttagtgaatgtgttgctcaggaaagcggaggagtacttgcgactgtcccgtgtgaagtgtgttggcctgtctgcacgaaccacagaaaccagcaatgcagtcatgtgcctggaccttgcagcttcctgcatgaagtgccccttggacagggtaagtaggtcccactgaatgtctgaattatctggtgtggcgctgaagtttaatcatgtgttttcatctctggttatactagcccctttcacaactctgttataggattttcatctagaatatgttattctacatgaagtttagaaccattttgaaaagttggagaaaaaaacttttttgcaacgatctctttactacgtactttccctgagcacttctttccttatacaaacccatctatcaaattgccactagcatcatcctcctaaatcacatactttaaaaccactgtattattttt

SEQ ID NO: 61760 - DNA, 1965 bp, Bovine  19866881028719
  misc_feature (1)..(1): n is a, c, g, or t
ngttcacagatgcacggagaaggccacaggcctctcactggcggccaagatcatcaaagtgaagagcgccaaggaccgggtgaggtgtctgccccaggccaacgggtgccctgggccaagctcaggactccttcacttccttctaggcccctctgggtcctgcactgcctcaggcccctccacgctgagcaggaaacctggccacctttccttggctcctactctctagtcagcagtcaccttgcaccctggggaacagggtcctcccagatctccagggttcttttcggggtctcagggatcctatctgggaaatgggtgggtcccttctgttgtaagaagctggtgtgggtggtgagttgaggaaacctggtgatgctgcaggaaatgaggatgcagggtgtgtgtgtgtgtgtgtgtgtgtgtgtgtcttgggagatgcaactgactgctcttcctaacccatttcttggaaactcctctccctgttggcttcacaaggaggatgtcaagaatgagattaacatcatgaaccagctcagccatgtgaacctgatccagctctacgacgcctttgagagcaagaacagctttaccctcgtcatggagtagtgagtgggaggcagggccagggctcagggtggggctaggagccaaggttgcagcaaaactctccctttgccctctctgtgacactcagggaatgtcatcgcttcctctacctgacctccaacataaaacacagaggacaaggccatttgtcagaaaccagtgaccagtgagccttgcttgacctgcagatattattttggcctacacaatttttagtaattttgatttagtgctaacagttggaaactgggaaagttcacattaaaacctaggtgcctgatttttcttgcaaatataaaagatctagtaatgctgggtctgcattctcagttggaaatggtatgatggagcttgtggtaactgacctttgtagacagggcaacccatttcccatttgctacagtccccaccagtttcaactacccgtagtgctgaggccaggggctcaggggacatttattagcgtgcttgtgttgctgttttccttctggtgcaactgaggagagggcaacctttgtcatgtcatgcctctataaaaaatggaaaaacaaaagttagactaaaggctgtgtattccaagaaaacttttgtctcacatctggtctggtttgtccacttagattcttgccatgtaggcactaattggcccctgtaggccaatgagtttataacctgggtctggactattgacagtgagtatccagagtgagcctgggtgatcagtactgcagacaagccccagtctcccatttggcccatcacttcctttttatcacccacactctgagctgggaatagaccagagcaaaggttcccccgcctgccccccccgtaaaaccccagatgggagtggtgccctcgtctcacctggtgatgagtagaccagtcctctgagagccttgctcagtcagtgtctgcctcccctttggccctggcagcgtggatgggggtgagctctttgaccggatcacagaagagaagtaccacctgactgaactggatgtggtcctgttcaccaagcagatctgcgagggtgtgcattacctccatcagcattacgtcctgcacttggacctcaaggtcaggctccgccctgggcatgtggcgggtgggtgcccgtgttcctgagcctctgcggctctctcatctttgagagctctgtcatcacacagtcctggcttcctttcctggctctaccatggcctagttctggagtctagggcaggccaagtctcatagcctcagtttctccatctgtgagatgtggaaaatagctacctcattaagtgttctttaaagatcaaatgaaacaactttttttttcctataaaaaaactcaaaaattagttttaa

SEQ ID NO: 61761 - DNA, 1045 bp, Bovine  19866881158209
  misc_feature (1)..(1): n is a, c, g, or t
nttttgggtggtaaaaatgttttgaaactgagtttccctagggcatacttcttcataagcataaataaatatcaaagaaaaagttcaatatcttttacactgaacactaactcacacaacaaaactaatagtgtaaaatgctgacaaggagcatgtgcatttaaggattctgacttaatgaaattcactattcatcatgggctagttctctgagaccaagcaacggtttgggttttttggctccttatctctggatgcaatagatttaacaattattagaatcaatggatttcactaggttcagaaggccagctttgagataagcagaaatttttattgtgataaaacatacacattagaaacgtgtatgttagaaaatttttattgtggtaaaacatacacaatgtaaaatttccgttttaaccatttttaagagtgcagtttggcagcattaagtacattcacactgttgtacagccactgccaccatccatctccagaactttttcacctttccaaagggaaactctgtgagcaataaacagtaacttcccaccccactcccgccctaggcaactaccactttctttgtctaagagcctgacttctctaggacctcatataaggggaattttacaacatccattcttttgtgtctggtttattgcacttggcataacatcttcaaggttcatccatgttgtagcatatgtcaaaatgtcctttttaaaaactttaattcatttatttatggccgcacttggtcttcactgctttcagtgggctttctctagttgtggcaaacggggctactctctgcttgcggtgcttctctctcactgcggatacgggttctagggctctcggcttagctgcccagtggcatgtggaagatgtggcaatcttcccagaccagggatcgaaccctgtgtcccctgaattggcaggcaaattcttaaccacattcttaaccactagatcaccagggagatccaaaatttccttcttttttgagggtaaataatattccattggggtgtatata

SEQ ID NO: 61762 - DNA, 738 bp, Bovine  19866881262179
  misc_feature (1)..(1): n is a, c, g, or t
natggtaagaatctgcctgcaatgcaggagactcaagttcgtacctgggttgggaagatcccctggagaagggaatggctacccactccaatattcttgcctggaggattctctggacagaggaccctggtggcctacagtccacgaggtcacaaattgtcggacaaaactgagtggctaacactttcacttctaggctttcctaggccctctttctgaaatgtagaggaatcagcctcaaactacaggcagttagttctgatcacttcactgcaatggtcattgagaacatatgttcaaacttcatgctgtcacttcaagtgttcacgtaagtatgaattaaatgctacttttatgccagttgtttttgttctgaggcatttttttaatcaaagtaataggttttgacatgaggcttttttctccctaaataatctatttagaatcaaaatgtaaataaaaaacttagtacacttctttcacaggacatttaaagaagacaaatgctgcttttactaaaagaaaaacagataccttccatttcctctgagccatgtatttctgcagcaatagttgggatttaagatgaactttcgattttgaagctttagcaggcaaattattcagccactcatgtttcaggcactgtgtggcactcattctgcagctgtgaaatcaaacagcaggtgagacttttagctggggttgccttttctggctgtccaaaatctgttcaat

SEQ ID NO: 61763 - DNA, 988 bp, Bovine  19866881330709
  misc_feature (1)..(1): n is a, c, g, or t
nacagcagagtgggagataagcaaaggcaacggcttgtagaaagcctggtcctctgggctccctgaacaacccaggcagtccctagctaaagaacaatgaacttccagacaccactgcccaagtgaaagccagaggtctgtggctcttccgaatctgcactcttgaagagtcttcatcaggatgtcaggagcccctaaggagagtttggggccccaggggctaccggggctgggcaaggcctgcttaaccaccatggacaaaaagctcaacatgctgaatgagaaggttgacaaactgttacatttccaagaagacgtcacggagaaactgcagtgtgtgtaccgaggcatgggccacctggagcaaggcctgcaccggctggaggcttcccgcggtctgggcccggctggggccgaccgctccccaccgtctgatgctcaggctgggtggccggaggtcctggagctggtgcgggccgggaggcaggatgccgcccagcagggcgccaggcttgaagccctcttccggatggtgatggccgtggacaaggccatagctttggtgggggccgtgctccagaactcgaaggtggtggatttcatcatgcaagggagtgtcccctggaggaagggaagcctggccgacgtccctgaggaggttggttcctgcttctgtgccccggtgcccttctggctggaagggaggttcagggccctggtgggttgcccagacaggaagctagtcttcggagagcgggagtgctgttgtctcctctagtgtctcctgcatgacttgttgatgggaaaaaggagagatggaagcttaaaggccataggtggatttccagacagggcaggacgtttgggtttctcccttgtgccctggcaaagaccgtggggccctgggcagtgcagggcgcctaaaagtgggggacaaatgagccaccagggagaggagggcagttacacttatctgacatcccaggga

SEQ ID NO: 61764 - DNA, 878 bp, Bovine  19866881402100
  misc_feature (1)..(1): n is a, c, g, or t
ntaaatgttgggactgtataatgtctttaaacaccaaattaaatgcatagattaaaaatattatctccatgccttctgttcaactaagagctaaacgtctctcatgaataagccagacaagtacttagtagatactcagacttacagaactaatgttaactaaatcaaaatcattaataaagatgtaaaaaagaattcacaaaaatgttttaaattcactattcaaaagtcagaacatctacccttcaatacgggaaactcttacctatcaattaaagcaatgattatgtttttcacatttacattttggtgtaactcagcacaggcccgaagaaaaggattcaaagtttgaaggtggaattcatcagggaaaacctgaaaatcaaatgataatcaattattactaaaatcaactagcaaaaatcaattagtaaaagcattttctactatattctggacttaatatttaaagctcatatttatgggggaaaaaaattcatcttaacattatacaagaaagtgcaaatacaccactttcaagcctctctaaacataaccccagaaagaaatattctgttaaccaaagtacatctacaattaaattaaaactaatgatacctagacaacttggaggttactctttgtatattttgggaggaaaaacccatcaatacaaagaccatgttattatattaataggagaaaaggattcattcaggaaagcttaatctctcttcaatcaagatttttccccccaaaacaaagaaaattaatgaaatacaaaaatgagttcttcaaaaacctggaaatgttctcatctacctgaataatgcactccatgagatattcctgagccaaagcatctctgcaattcacca

SEQ ID NO: 61765 - DNA, 1127 bp, Bovine  19866881607649
  misc_feature (1)..(1): n is a, c, g, or t
ncacatctccctcgcctgggttccctcctttctcagcctcctcctctcgcaggtgggatcgtcggtgggacccgcggcccaccgggaccatgtccgggtccgacaccgcgcccttcctcagccaggcggatgacacggacgacgggccggcgcccggcaccccagggttgccggggtccatggggaacccgaagtccgaggatcccgcggtcccggaccaggaaggactgcagcgcatcacgggcttgtcttcgggccattcggctctcatagtggccgtgctgtgttacatcaatctcctcaactacatggaccgcttcaccgtggctggtactgacttctgggagaaagttagaagaggggaagggagcggggtcctgagtggggctgcctcggacggcccatcctgagtcttctccttcccaggagtccttccggacattgagcagttcttcgacatcggagacggtagctccggcctcatccagaccggtaagtggaggctaggcacacacagcggctcttctttctgtcctgccctccttgaggccacatgctggcctgcccggggcctcatttttgggaggtactgtggccagagctaggggagatggcctcgactctaccctgaagctgtcctgtttgaataggacaccacatttaaagagatttcaagagggagtcagtttagtgtaatggtatttaggccgacatgggtttaaacatcagcttttcactgaatgtgatggtaggtaaggccctcggtttctctaagcctcacattccttgtgggtgagatggaactcataataaccaaactcacctcctagggctgatgtgaggattaaatgaggtaatgcctgtgaagtggattgtgcaatgtcggcaaatggtaggcacccagtaaatagtagcaggaggggaagaggtgagtgttacttgttcagaactttgggatttgtgggagaggcaaagccaagacctactcctctttaccttccttccctccttcattcatttctgagcacctacctgtgccaggctctggagggagtgctgatgacatccaaagagcatggcaagacctcttagtctcattgtcttctatccttttatcagccaaagaa

SEQ ID NO: 61766 - DNA, 2059 bp, Bovine  19866880365829
  misc_feature (1)..(1): n is a, c, g, or t
ntccagcgtttctcatgatgtactctgcatagaagttaaataagcagggtgacaatatacagccttgacgtactccttttcctatttggaaccagtcagttgttccatgtccagttctaactgttgcttcctgacctgcatataggtttctcaagaggcaggtcaggtggtctggtattcccatctctttcagaattttccatggttttttgtgatgcacacagtcaaaggctttggcatagtcaacaaagcagaaatagatgtttttctggaactctcttggtttttccatgatccagcagatgttggcaatttgatttctggttcctctgccttttctaaaaccagcttgaacatctggaagttcatggttcatgtattgctgaagcttggcctggagaattttgagcattactgttccttatctttagccagttataagcctattctctgcagccttgacagtcatactgttgaacctaccatctgctaggaaataaacccccagtcctacaggtattgaaataatacaatcagataaatggaagcagactcctgattcagtgattttaaatgagattgtatatgaaaaataggaagtattttcctgagttctgttaagagatagggaattttttgaacctggagtatctgggataatttagggtttttagataaagagttttttactgagttctaaggtaataacaaaggatatttgtaaagagttttatctttgcatctgttgttgttcagtctctgagtcatgtctgactctgtgaccctatcaactgcaggacaccaggcttcactgtcctttactatcccctggagcttgttcaaactcatgtccattgagtcagtgatgccatccaaccattttgttttctgttgcttccttctcctcctgccctcaatctttcccagcatcagggtcttttccaaggagttggttcttctcatctggtggccagagttttggagcttcagctttaacatcagtccttctaatgagtattcaggattgatttactttaggattgactagttttatctccttgcagtccaagggattctcaagagtcctctccagctccacaattcaaaagcatcaattctatgacactcagccgtctttacagttcagctcacacatgtgtacatgactattggaaaaatcatagctttgactatacggacctttgttggcaaagtgatgtctctgctttttagtatactgtctaggtttgtcatagcttttcttccaaggagcaagcatcttttaattttgtagctgcaatcactgtccactttccagttgcaattttcttgataatattaagtcctttgaatcagaaaattttgtcaggaaaaaaaatttgatagcctcagtcctttagattaacagtttaaatgagttaatagataccttatatttatatttcacaaccatttgaaaacagatggtaaacatgaattttccatcagtgagatttcttgatggtagaaaggattttactggtatggaaataattggttttggtttagggaacactacttcctgacctgatgaattaatcactgatgaaagatagtactacaggatttttatctgaagcttatgttgttcgattatacttggctcctttttatcagggaactcactggctagagtgatattgacagatttgaggttttgtcttaggacaagccactcacaagcaccaggagcccactgaatatgagattacagacttctttgcagccagtaaaatgcaagatgaaatttgggccttgagacagaaaatgaagaaactaaagatgggaaatgagacacagaccaaataagaattgttggtgatctatactaaacttctaagaaataagacactggtgtaaaaactaaattctcacttgtgtggtctgcttggagacatttctacttaacgaaatagtagattgaaatctgtagctctgtttccagttatagattatttttaaattaaatgtgttggcttaaagttcctgtgtcagaattctaattagatattgttgaggg

SEQ ID NO: 61767 - DNA, 1505 bp, Bovine  19866880608700
  misc_feature (1)..(1): n is a, c, g, or t
naaaagaaagaaagttgcacacccactcgtctctttacagcaaagcatgaaaagcattgagcgggtaggattctagctgtctgagaagacagtgtgggaggcaagcggaacagttaaaaatgcttagtcgacccaaacagaaagaccaggtttgaattcaggctctgctacttagcaagagtgtgatcttgagtaaattgttgacctttccgtgccttagtttccttatttgttaaataggattgaaagtattaatgtgacagaactgtgataaagatgaaaccaggcaatgtatgcaaagtgcttgcctgacatagatgagtaggcactcaaaatgataatttcctcctttttgcttctctagtgtaactcattgtttggggatatgggggatcaaaagcagtcagaacccaataaatctttaaagagatgatttaaccgtgtctttttttttttttttttttcacttgagaaaaggagttctggataagttgggtttgattgatgattatttagtgagccagggacagtgccaggacagtgctcataatgtccaggtgtgagcaaggcattttgtaccagtttcatccaacaaagttgggttttagcgttattggacccaatactaaatggaaattgataatgaaaacagaatacaggatgaatttttaaacacaaacattgtaaatgttagtattacccatgcatattagcttgtaaatggtccatttactaacaaacatgtatggctaatactaacacttatgaagttcttttgtcatttatttttaacatttatcacgagttgttctacaggctttacatatattaatttatttctcctggcatcttaataaagtctgtactattattatcccctttaatagatagggaaactgaggcatacagagattaatttttgcaaggctgcagatttagtcagtggtgaagctaatattccgactcaagtgttttgactcaagacatggtctcagtcactgtgttgtacactcttcctgtgaagttactaaatatcataccagtagtcagtatataatgtcctagaggttggatctgcattttattgtagaggcatttcgggaaaaagaaaacaaatggagtaggaatttgatataaaagcattttactactgaggacccaagagagtcactgaggtgtgtgccagctaatttagtgtttcacagctcctaattcatcttctttgccctgaattgtgatattagagctgtaacctgtaaacatttgttttcagttggttcagtgttagcacttgtcaatagaagatgctggaggaacactgtttataaaagggtctcttttcttgtttccagtgcttttcttcttgctcctgtggtgtggtggtcagtgagtggctttctggctagcagtgtcctaaaaaccagtattgcacgccccccagtaatttgggcccaatccctagtgtgtggcttcctagcaagcctcaccagcaacccagttgatgg

SEQ ID NO: 61768 - DNA, 881 bp, Bovine  19866880965381
  misc_feature (1)..(1): n is a, c, g, or t
natctataactgatgctcagtaaatatttttgattttggaataaatacattattttagtttcaccccattctgtggctcttgatgtatcttatgtgattatcaaacccaagttgagaagtttagagaaccttctcaaaacataacctctctgagagagtatcagtgatcattctttttgatgttatttctgcccctaattataaaacaaaagcttatagaagctagcttgtgagtgcactactctttacagtcagtaaaatgtagtgctatccacattaagctgtagacccaaggttttaggcctccacttctctgaagataagaaaaagggaaggtgctgcatttgatagaaaaagctccctcctgtagccctgtggagcgttgtgaggaacttgttgcctaaagcaatgcgctggcaaattctgacaagatatttgaagactatttcaaatcagagataagtattagatgtgaacccagtagctttttctcagacatatcagagtctgataaaaagttttgaaaacttggatgtggataacaatagcagacatgcacaataagtatgagcactcttttgaacaaaagtcagattttaaaacttgagaagaatacatttaaaaaatgtctttggttgccattttaacaatcaaacaatgtttttattatattgttataaaatgaaagtgctgctgttttaatcattaatatttaaactggactcttaattagtttaataaacaatgggtcaccttgcaaaagttatagctgaaagcaattcagtgtacagatattttatatgtagtataattttcttacatgcatagaattcatcttattaggaggtattcttttcctactttcagttcagttcagttca

SEQ ID NO: 61769 - DNA, 2100 bp, Bovine  19866881158809
  misc_feature (1)..(1): n is a, c, g, or t
ntctggattagttctttatattctggttcttaataggtgagataagtaataaaatagaatattgaagtgcatactctgcccaaggtttacattaagaaaaaaacaagaacaaacacggaatgataaaaaagagaatgattaaaaggaatgcataattgtacttaaaagaacagtttagaatacattgagatcttcctcattgagggatattcctagagaaccaggactagagcaacatggaaggggtcatttgagagactaactgaattaactttggtaattataaaacatactcttattaaagttatatgggtaaacagaaacatgaagaagagaattaaaattgcccataatttctcaacctagagaaaactgctaatggtgttgtaattttccttctaatcatttttccctcctgacaaattataagtctcaataaacttttattcagattttcttacatatagaatgtatttttcctattccattaaaaagtattcaaaggaaaacatacatctaccataggttgcttcatttatttggcttatggagcatataattaccaccattacaaataatgataagataaatagtgaaaccatggttcatattttaaaaatcacaaccttacattaaaaattacatttcacatgacaggctaaaacacacatgacacacatatgtatttgtacatagacccataactgaaacaaaagtgtcaaaagtaattttcatccttaatatttgtgatgaattctaatatatcctattctgtcccataccatcccatttaattctgttctatttaaatttttttaaaaagcaattatggtccactaaattggtttaaaattgttattaatagttttgaacccagtgtcaggaaaacgtgatttactgtatccttgttttgcaaactgtattttatttcatattgagttattatattttagaattaatatatgttaaagaagtataaattctgttccattgctgttgatttgtggaaaaggcagtggcaacccacaccagtacgcttgcctggaaaatcccatggacggaggtgcctggtaggctgcaattcatggggtcgctaagagtcagacacgactgagtggcttcaatttcacttttcactatcatgcattgaagaaggaaatggccaacctgctccagtgttcttgcctggagaaccccagggacgggagcctggtgggctgccgtctatggagtcgcacagagtcggacatgactaaagtgacttagcagcaacagcagcagcagcaggacgattatttaaaaatctttaaattttcagatttatctaagctagtcttgcatatttggttttcagggttaacttaatcattctgtcttaggttgtaattttgacagatgtaccctgtgggctcctcacacctcagtactgctctttaggccttgtcccggcacatacttcctaagaatctacagccaagtgcagtttctgcttctaaatcacatagcagctattcaagcactaaatcttggaatcttttcagtacagtaggcctctaaacagatatgactgttgtctttataaatatggaaaacttggagaaagagacatgcacatataaagaatgtcatgtgaaagttgaaattatattgctataaccaaggaactatcaggaactggagaggtctagaacagatccttgccaatggcctcagaaggagcatggctttggtatctccttgatttcagatttccgacctctagaactgtgagacaatacattacttttgttctaagtgacccagtttgtggtacttagaaattatggcagcaatagcaaactaagacactcttcaactgtatccagtaatttgattaattttactctttaagaaaaacatgaaacctttcatggtttatgctgtacattgtgaagaagtgccccgtaaaatgaattttaggtagttgttttgtaattgcaacacaatataaatattaagctactaggagcactggctaatggaatgagtatactctatattattctcattttaagtaatactcattttcttaaattgagttttcttttaattaagggtcaa

SEQ ID NO: 61770 - DNA, 1619 bp, Bovine  19866881167866
  misc_feature (1)..(1): n is a, c, g, or t
nctgacagtatttacccatatttttaatattctaaccctatttgcttactctaagacactatcaagacactatctagtgtctgttttttatgcaaatttatcttcataatgtcatcctattttcgtagcaatgacatttactttctcttgtattcttggtatagtggaagcatcatttttagtcaataatcaatgtttacatcattatgactactgttcaatttaaagccaagcaaagtgttttttatagttactttttcattgacctgtcactatttttttttaatttgcattattttctctaacccaatccttattttttccccctcaagttccatcagatacggtatgttcctatagaaaattttttactccaaagccctatcacattagattcttttcctccttttctcccagaacttttacttcctcttcccacttgagcaggtacctgtcacactctagactagctgccttcttgcacttcattttgctacttgccagaaaactgatttttgactgactcaccaattaagtgagtttggtattaatgtcagatctgactgtgcctgaaataagaattcagtgaaatgagactgtaaagactataagcttaagaaagtaggtcaaagtaatttctcataagaagacagaagacatttaatcactcaatcaccaccaaatacagagcctcacatttttaggaaagtcataatcaacactcacatcaagtccggttctgctcagtgatgcaagttccttgagttaactaaatttgtctctttttaaacagaaatctcagaactcatttggctgtctggatcagccagatgtaaggtgaattctgcagcctggataggaatttcagaataaggactctgaaagacacatcagtgctgtcatttgcacaggttcctctcttgtccttttcactggtctgtccatataccttttgtagttatttacacactgaggcctgatgttaaacaaaacaacatgttcttcaacaggcattgctgttcctactgaacttctcatttgcttgtcaccctggcaatatgacagggtacctgtctttttattacaatattgaccccaatgcaataggaaagaagagtgaaaatgttttatcatactttgctttctttgcttaatatctgttgcttaaaaaataagatacaaaacagatacagaaccattccatcccttaggcacagaggctaccagcttttcaaagatgtacttttccagaaaatattaaagaattggaagtaaaaaaacagacaagatttcctgtctcaaatacagaaagtaaaaagtttaataaatgtttaattaaatatctagaaaatgtaacactagttatattaaatgaattatttaataaattatttttaaatacaaatttcattaaatttgaaatactttgtaaaagttagatgatttcccttcccaagaatttccaaatatgcatactgattccaacaacagtaacaatactaatagtagctacatgttgggagtgacggctttctagctattttgaaaaacttccaacatgagaaagcctgaaaaaactgtgtaaagaatatttgtatactttctacacaaacctccta

SEQ ID NO: 61771 - DNA, 641 bp, Bovine  19866881205448
  misc_feature (1)..(1): n is a, c, g, or t
ntaagaaatgtattgtgatatattagtttgaaaattactatttatatcaggctcttgaatacatgcttcttaagcttcagtaaagtaacttttaatcttgctttttactatgttgaaaaaagttgatgatataaaatcagcatcctttcttctccatcttcagcagtagttatttgccctaaggatgtcagtgagaagctatttctaaacctgtctcagtacctaggaatgagccatttgtatttgttctcatctcgaggttataaacacaggcaagtccacagctctctccggaactgctgacagaaggttctgccaccagggggaactgaagttgtaaggttttacagtgcttcacaggcactgtatattcctgataaaataaaagttacttaatgagactaatgctattgaacttggaaattttcacgcaaagttttctgagtaattaatttactaaatatatctaaaaatttcattagtcatttcattctagagaaaaggatttagtgatccctttattcacatagattcctaattttctgtattgataaaatgtatccatcaaaagatttttagtagaaataattaggaggaatcataaaaaaatagatatctcacaggaattattaaaaattata

SEQ ID NO: 61772 - DNA, 1540 bp, Bovine  19866881313813
  misc_feature (1)..(1): n is a, c, g, or t
ntaagttaaataagcagggtgagaatatgagaggctagatatgttaattagcttgatggttctggttatttttacaatgtatatgatatcaaaacatcaatgatttgtataacttaaatacatacaatttttatttttaaattataccccaataaagctgaggtaaaaaagagaggctgggcttcccaggtgactcagtggtaaagaatccacttgccaatgtaggagactcaggagattcaggttctatttctgggttgggatgatctcctagaagagaaaatggtagtcctccccagtattcttgcctggcaaatcccatggacagaggagcttgggaggctacagtccaaagggttataaaaagtcagacaggatttagtgattgagcatgcacgcaaaatgggaggttgggtgggtggggaatggtgcatggaaacttgccatgtgttgtaagtgtagacaaggacagtgcttgtgagcaatgcttgtgaaaaatggcatttccttatactacttaaagagaagaaataataaataaacaaacacagtcccaataatccaggaataagttctcatcctagaagacagagaaccaagcaatagggtgacattccagcttgctacaagtttgctaaaagctaagaattattttgaaaactatgtatgtctatttgcttttctctttaagaatacaaggaggcttgtatcagcactcaagtgggcagtgagaggcagctataggactcactgttcccatttaataggctaaatcagaccaattaaacaggattgagcaatctttgaggatgagcacatagaacaatacacaaacaacacctaccctaaataaagtaaacagatgcaaacaaattgacttttgaaagaaattctttagcatataagaaagggagaattactctaaaacacttcttgaaatgattttactataataagcagaataatgtattttaaaaatatctagaactgaagcacaggctacttcaaaatatttagcaacacagatgtcttgataacttcaggcggtgttaaggataaagaaactcgtattaaaacccaggtcccaaaatatttaggttacctagaaaccattaaaaaaatataagaaaccaaaaacaaattccaggaaaactttaaaattaaacctttgcagcataaatactaaaagataattgagacatgttcataaggcttatttgttttccttttttccttttctgcaaggtgatagagctgggagcagactgaattattttactttctgatattcaggtattcacaaattctagcactaacactaccatctctgaaaagtttgcccaaacatttatcaggggtgggggaaaattaaaattgagaagtagaaagtagaaatgttcttatggtgagcattcttgtaaatgaatagatgttttggataagtattcttatggtgagcattgttatgagtgaatccaatttatttctacatgttaataagacacaataaaataaatgtcatttaaaaataagatatgta

SEQ ID NO: 61773 - DNA, 1846 bp, Bovine  19866880834256
  misc_feature (1)..(1): n is a, c, g, or t
nctgagagagttaacttacttatgttagcgaaattttaaccccatcctaaatacatctggcccacacttctatgctggtttctccaggtgaatttaaaaaaaaaaagaactgtttatactgtatgtgctgtctgcattgttttctccttctcaatgtaagaaacgatttaaaaggctgtttttgtagggatgcattttaaaaattacctactaatatgatcattaaaattcctaagctctaacagttaaaatttaaaaaaactagaagacgggggggaaggtcaggttgtgttctgtaaaaggaatttatagttctcagtaacaattaacttccacttttaatgtttgtcctttaataaccataaagcaagtatgttgtgtgctcaatacatcatacatagcaaaaatttaaactccatattcaatcttcataaactgttatggtaagcactgttattttcattttacaatgtggaaaactatgcaggggaactgcctaactttctccaagtcttctcaaagtggtagagacaaaattccaattccagtaatatggctcttaaagcctttcatcttaatcactttggtatattgcctacttctaaaggtttcaaaagtaaaaatcagacctccagtcacattcactatatgacttaaatgaaaagtcgagacttaaaattatcacacccaaaaactcatctattttactctaatgtgaaggatggtcttaatgaaggaaagcttgttttatttttcagattatgttcatgcccacacaactgtcacaattaaccagtgacaaaatatttaaaattcaaggtctacaaaaggtattatatactatttacagctgccagtacctgacataataaacactcaaaagatacttgaataaattatttgtaacgcacataaagctgagaaattcagaagcagttgattaaggaactttggaaaacagtacacattaaatatccaataatctttcaaggccctgtaattatatatattagcatattataatatatatactaatacagtatctttaatcaacctacatgtaatgatactagacttgcaattttaaactattccacccagaaactaaaattccagacaacccgttaatatgctatagtaaaattacccaaggtgggggacaagcagcatacctctccgtagattctaaatgttccagtatcttcatctagctcaatagctgtaactccaggaacctttctagcttgctgtatgttactaccatgtgttcctatcgccaggcccatcaaatcttctctcacaacaaattcctcatgaaaagctgctgcaagttgctttgtgcactagtaaaagaggcaaattagtattataaaagataaaaaaaaattttatacacccatgttcatagcattatttacaatagtcaagaggaggaagcaacccaaaggtccactgaatgatgaatggataaacaaaatgtgatatatgcatacaatcagaattattcagccctaaaaaggaaattctgatacatgctacaacatggacaaacattgagaacattatgcttagtgaaataagccagtcacaaaaagataaataccatatgattccacttacaaaaaggttatctaaagtagtcaaatttgtaaaaacaaagtagaatggtgatggcctggagctgggggaaagggaaataggaagtcgtttaaatggacacacagattcaaagatgaaaatgttctgaagattgattgatcaacagtgtgaatatattgctcaatactatgaaatgcacacttagaaaggtcaggaggtaaatgttatgtttttctactacaattta

SEQ ID NO: 61774 - DNA, 1373 bp, Bovine  19866881530202
  misc_feature (1)..(1): n is a, c, g, or t
ntacctagttactaaattatgttttaatttatcctatctcaagcccatactagtaacttagatttctttatttataaagtatggccagaaactggtattcactgctatgccagcttcaaaaacacaaactaaatacaatctcttcatcccaaagatatttctaacactaaagagagagaaaagaagataaaaataaacatttcctcaaaacctattgtgacagtatttaatttcttttaaatttacaactatcgctaaaacatgaactttttttttcccctaagaatgggaactaatccccttaatcagttttctcacatgtctcaataaccactaaatttaaaatactaaataaagatactagaatttatattctttatttgggggaaaacacaagaatttgctttggaaagaatgcaaaattgattagtttaacaaaagggatttatttctggtgcacacaatttctccactgtgaatatacatgtgattctctgtacacaagaaatggaattatgttcaagatagtatagacacagcaaacacgtttcttttaagttactaaaaactgtatctacttaaattaacattctaaaactaagtaagtactattaatttgaatagttagtaggtgtaagggaaaaggcatcacactacaataaacaaaaacataacatgcattcctcttaataggaaaaagacactttcaagtatttttctcatttgtactttttaaactgtgggtactagaacccccacaaacatgaggtgctgaatccagatacagtagcaggcaccatgcaaaagctgtccagttttgccaatcatccaaaatcacaagctacaacatagtccctgggatggcaggtcccaactcaaatgtgcagaatctgccaagtggacaaaataatggtcttttcaacagtattttcatgtaaaaaaattgagacacaacattagttcaattagacaggttacattacggtgtgaaggaagaatgcattttcttaatagtagtcttattagttgagaaaacaatttatgcaatgcacatcttgaatgtatatacacacatgtgtacatgtaagtataatatatttagaaagcagacacatgacatttttttttcatgcttatgacctggtggtgtcaacaggtccactcaagttacctggctgtctatcttctgcctgacccctgaaacgacgcctgcggctacgattgcgtcgctggggttttttttcactatcatctgtaattgcaaagttcaccatgaaactattctgacaaaaacaatgcaaaaaacaaagcaaaaaaaaaaaatttcttgccttcaaagatttaaggggaaagaactttttaattaaacagga

SEQ ID NO: 61775 - DNA, 2540 bp, Bovine  19866880196781
  misc_feature (1)..(1): n is a, c, g, or t
ntttttcctgtggtcatgtatagatgtgagagttggactgtgaagaaggctgagcgccgaagaactgatgcttttgaactatggtgttggagaagactcttgagagtcccttggactgcaaaagagatccaaccagtccattctgaaggagatcagccctgggatttctttggaaggaatgatgctaaagctgaaactccagtactttggccacctcatgcgaagagttgactcattggaaaagactctgatgctgggaaggattgggggcaggaggagaaggggaccatagaggatgagatggctggatggcatcactgactcgatggacgtgagtctgagtgaactccggaagttggtgacggacagggaggcctggggtgctgcgattcatggggtcgcaaagagtcggacacgactgagtgactgatctaatctgatagtattatataatgggggccttccctagtgcatcagcgttaaagaatcctcttgcaatgcaggagattcgggttcaatccctggtttgggaagatcccctggaggagggcacgggaatccactccagtattcttgcctggcgaattccatggaactgaggagcctagtaggctacaggccataggactgcaaagagtcagacacaactaaagcgactgagcacacacccactacataatggagaaatagaacatagtgtttcattcagtaagttgtccatatatttagtttattacgagaagcaaatgtcttaaagctctttttgcagttatatttccctctaaatgttacttgctactctttactgaaaaggtcatagtatagttaaatcttatttgctagcatctgggagtagtgtttctcaaataagaaaagtgtgcatgggaagaaaaaaaaggtaaagaaatcaaccttcatcctccatatgaaggaaaagaaaaaaaacattttataaactcaaaaatttctacagagtccctaaaatggcttccaaagaaacacaagtcctttttcaaaagttagtttgaagataagacacatttctcagaagttgtgaataattaaccactacctaaaggagctatttttccttgaataaaattgtcaaaatctcagctggtttatgtgtaaaatctctgtcgatggcctgtaatcagttgtgtagcctacaacaaggcttttagcaagcacaatttgaacaagaagtagaaatgttaaaaaatgaaatgcagaagttctttatattagaaccaaaggggaaaagaaagcttctagggaaaagaaaaaaagacacagttgcagaaaataagaatggcaacaaataaattttcttaaaagtgttaaaaacagattttctaccttgacattgatactaaattctaaaacacttcctagttcttaaggtaaatgccatcaagcctcactcagttttctgtacagaataagagacgagtggagagaaaagactgaggtgaagttcaattgaataaggagccttatacagttttgtttttcatttaccatgttatatatggtgttctttgggaatttacattttcacactacattatgtttaatacaagtatgtttctccctgggttttctggattgatgtgcttgaagaaagcagtgagaacccaattgtgttaaataaatacgtttcatatatgtctatggatctgagtaggaaaacaaagtgactcggctagcacaaaagagatcatatttagttactagtctgtagctcaacatgtccaattaaagggattatcattcaagcaaagcagctagcatttgtttaaccagcattaagggagctcctgttccacacgatgttctggaacattgtgtccctcagaggaaaacaacatcgaatttcacagccatagctgccttttgaattttacagttaacaagctaatgcatgtcccgtctcttggaagttattctagaagttaccggcttttcttccctacattttaaaaaaaattcgtgcagagtattttctggtacccagttgcctaagtatgctgtgttacattcgtatagtttagcatgggattcggttggtgttagttagtcctaaaaatataaaataccaaaaattgccaaactatatatagtgatagtgatagtgagtgatagttgctcagtcgtgtccaactctgcaaatccacagactgtagcctgccaggctgctctgcccatggaattcttcaggccagaatattgaagtaggtagccattcccttctccaagggatcttcctgacccagggatcaaacccaggtctcccgcatttcaggcaaattcttactgtcagtagcaattttaaggaaaaaatgacaaaatgaggaaaccataatatgcactgagttaaatactctgcctttcatacatttcaacttttatctatcattacttaatttaggtcagataatctcctaatgaggtgcaaaatgaaaatttaccccaaatctttaactaggcttcaacaattctgtgctctagtctttcacctcagcacctcacctctcagt

SEQ ID NO: 61776 - DNA, 1291 bp, Bovine  19866880368001
  misc_feature (1)..(1): n is a, c, g, or t
naattctaaattatagctgaaagttatgatgactaatgagagtgtatatagatagcagaaaaaatataatgatgatatttattgagccttgctatgtgtcaggcactttcacagtacattaaacccactttattgctagatatacataatgctacttatctgcatcaagattgttgtctcatgttataaagagaaactcagtaccttaagtttctctatagaggatgctgtacctcttgagtgcataccaaattgttactctactctggtactcttgacataaaaggtttgttcagtgcaccccttaaaatgagaataattccctctaactacatttgcttaacattagacccaaaggagtgtttccttatgcctctgacagaatttttagggaaggcagcttcttctatttctatttgcagctcctctgctcaaaaatcagatatacagccatggatcttagtcactagtgattcaacaaaggtcaccatgttgcacttaaactttcctactttcattcattcagggttgtatctttccaaggagattaccaaacttttacctagaaagacctgtggtagagttccacacttacctgaactagtgattacagcagtgcttattgagagctagcttttcaacaggtagaaatttgcaccatttggatttatattgagatcttttattctgacctaagcacctgaattgtcaactatgctagaaaaggattctctggcctaattctgaatttaaatgtagaatttgccttttcccacatctcttatgtgttccctttcggttcttaattttcctgctgatcacttgttattcccttcatgatgcttgatttttcccccctcagatgttaggtaagaggcacgaatattatctgtatctcagcttgaagtttagtattagtggttttctttgcaagtgtgccctttgatattgacatgtcactgcggggatgacattaatgataaaccccaatttattactattttaagtcattttattcatttactacagtctgaagagctaaaaggcacttttacacaatgacaactagtaatttatcttcactgcagcccctaaagagacacatcaatatcaaagttccagggctggttgagagagtagctgtctcacacactacagaggagcctccagagacacttgggcagtttgttggttagcaaacaatgaaaaagatgttacctgaatagaggagaaggttggcagggggagaagttaggatgtgaagtaatttatttggtacaaaatgtgaata

SEQ ID NO: 61777 - DNA, 1339 bp, Bovine  19866880446215
  misc_feature (1)..(1): n is a, c, g, or t
natctaacattctgcgtgcacataccctccctctgtgcccacatgatgccacacagtgagtgctgactggacatctcttcataaacctatatgaagttatgatgttccaaaacattaaaccaaaagcaatattactgcatttggtcacagatgttatatgacccccttcagcctaacacagcaaacactgtctttgctccttgtaaacccctactgtaattaaaattattcctgagatagagcccaccactcttactctggaaacagcgcaatagattaaacaggatgataatgtagaattattttaaccaaccctagatataattttatgatttctcctccaaaaaataactttattccaactaaaatatagtaaattgatgactcaaaatcccataaagaagttcaaacaaagacttttattcctggttaacaaacatagatagactgtacagataactataatatagacagagcagtgttttaagaaatacactactcctcagtactctgacaaacacattgtttcatagggagaaacaattaacaattctagaaaatgattgtacccacatccatttgtatctgaaccaacatctagacttgtcaggtaatatcaggatactcgtttcatgcttgcatcacagaatagcaagagggtttttgactgggtaagataatacctagagtttaattctggtgtatcagaagataaagcactaaattgtccaaaagattataaaatttatgttttcgtaccatgtagacattaaccatatagacattagaccagataatagaatatgtacaatcttgagaacaaaaatataaaaccgagtcactcatttatgcttgttgaagatttttctcaacagagcacataaaaatgactgaggttgcttatagtatgcagacaaaaagatatatagcccagtaataaagtcaggaaatatgttctctattaacagattcactcctcaatccataaattttatgcaagattaaataatctttatttaatgacatgacagaatttattaaaaataaaatacttacaaatcttcacctgttttccttaaaacatatctccacattttcttaggtgagattagtaccagcaataaatgcccctttaatggctctttcatatatgttctaagcttggtctactgataaataaatgttataaaaatcaagttaaattataagaactatagagtatcacacttggattcttttaacattttgaagcctgcatctaacagactataggcattttaacagtctatagctatttttaaaaagtagcttttgaagggttttgttaaatatatctttc

SEQ ID NO: 61778 - DNA, 977 bp, Bovine  19866880697749
  misc_feature (1)..(1): n is a, c, g, or t
nattgacattttgaactagatgattctaattttctggtaggctatcctatgccttataagcatactactaaatgctgcatgcttagagaatcagtggtttacatgtatgttccttaaagacagaagaatggaaattcacatgtatggaaatgattttgtatgtaacattagcaggattcaacaaatgaataaatatatataatgattatactcttatctccgatatatttccagagaaatttttaatactcttgctgttgttgtagcttttcttgtaaatgagacagcacctccactatgcctagaacacagattctatgggatctttcacaaagattatttatgcagtaaatattttgtattgctgctgtattctctaaagctatatactgaaatatttcttcaggtgttccaaaagtcatcttatgttccccatttccataggaaagaaaagacaacacaaataacatcatatttcataactttatatagtttctgacccagtaatggaggttatcattcttttcaatgccaaacataccacctaattttttctatcattggcaaacaaaagcagtttgtaatcaaagtgcatgtaatcaaataaataaaacaatttaagtatatttcaaaattcatgtaaatataatattgcttaatgtttattaagagcatatttcttaacaatttatttaaatcttaagagcatataatggttcaaaattagtcagtaatctgaaattttattttcttaatggcttcttcttgactgatactaattggataatttcttataatctggacatattcaaaaaaagttgaagtagcttgatacacatcctctaagattaaaacttactgattgaagaaatcatatataagtggggagaaagggtattttgaggattttcaagagaaagccaaagaaagtagtagaacaaatagagaagagaagaaatagccaccggataaatgtg

SEQ ID NO: 61779 - DNA, 1731 bp, Bovine  19866880766018
  misc_feature (1)..(1): n is a, c, g, or t
ntacagcaagtaaataagaagaaaaaagaaacagcagaaaattggaagtttgcatgagggagttcatgcattgaactgacaagaaaaggactttaaatagttatttaactaagtacttaagatggtaccagaacagtttggttttgaggattactcattcagcaagagagtgctccagttccaacattctaaaagttgcgagaattaacatttagcagagatctgcaagttggcatggttaatctcacaaaattacagaaaaatacataaaacagtaggatagagtcagagtcagaccccaaacagacatctacggttgttaaaaggctgaaaatctgtagcagcagatgtatttgtatatttgtcctgtattttattttactacatatggttccatattaccactgaacatgattattgtagttctgctcatcttgttagagttaaggcaataatcccatttataaacattttttcgcctaggtgttccatttaactttatacaatttcctatgactttaattttgtcaaaatgttaggctactgaaagcataaaatatcacagtagaagattttcattttatttcttctgatagactcagcatcagagtttatgaaatcatgtgtatctccatttctcaacagtttcattgaaacgtttttagggcaggtagaatcttacctacagacacacaggtggctacatcccctagaaatgttgatctctccaagctctgatttcagattcttttctcccacaccccctcaccccttgcccttggactctatctgtaactttcagagaaaaagacactttgaaaacataagaactaacagtcgccaaacagtggatctggcttcaggaagcaatagttttcacgttcagaggctgtacaaccttctttccacttgagcagaataggtagtaaggggttgaaaaaacaatgtattgattgtttatttttttacatttttattgatttttattcctgtatgatgaaaaggatagtactcaaaaaggcattggattctggaagtattcatcttacttgatagattttagttgagaaacttctttagagaggctatttattttagccatattcctttggtctgttataactcaaaaacatcactattcatttgtaatatgttagagtcattgaagacatcaaccttggacatgaactttctgtgtgcctcctcttccatcagtaaatgaatagatttgtgcagaactggaacagatcaaacaatatttttagctttttactacatcctcatagttaagtaaaactacccaaaactttgtaaattttgccttatgtgaatcatgctaggcattttaatgaagtcatttcatcttgttgaagataagagattgagtcttaacctctcattctctaaactggtgtgaattgccgagatttaagtaaatagttcacatcttcattctttatactgcttcttttctcttaccctgtccactatctttgtgattgaaaagcccacgctaagaaaatccacttgaaatcaaacaattctttcacatttcttcacagagatatatttttaactaacttcaatgatgtttagtcactaagtcacgtctgattcttttgtgaccccatgaaccatagcctgccaggccccttatgtccatgggatttcccagggaagaatactagattgggttgccatttccttctccagggggtaccttcagtaagt

SEQ ID NO: 61780 - DNA, 1147 bp, Bovine  19866880971134
  misc_feature (1)..(1): n is a, c, g, or t
nttgcctcttgatggaatacacaagatgtgcttaattcccccagcaaggagttgttagggtaagtttgagatgttgccagccagggaaggtcattagagacagctcccgaggtttttgttgggggctggccacagaggcatcttctgcctggcgccatgtaccaaaattccagactcccagaaggaaagcaagtgttcaccgtaaaccatagtgtttgtacaaacagtttagatcttgtgtgccactcttatcagttctgggaatgatggggacactctcaaaatccaggcaaggaccagccctataagcagacctttgaaagaatagcagtggggcctggtgtgttaactcttttttgtacacacttcatattttctttttgcagcagcctatatgtttattattctttgttcctaaagtatgataaaaaaatattggccaatttatggtaaacttacggagtgtttaatgtggccacagggaaaggtcagtttttgaaatttaaaaaacattcaaatttgcttctggcctctgctttaatttagtagtccgtgattgtgatttttttccacctcgtgttttcagtgctcttggtataaaacctaaaatcctctctctgcatacctttcttgctttccctcagggtcttctaacctgccttgtctgccttcatcttttcttgtgtatgcattctcagtcgctaagttgtgtccgactttttgcaacctcgtgccaggctcctctccatggaatttcccaggcaagaatactggagtgcgttgctatttccttctccattggatcctttcttgcctagtactaaagtcacacttgtcttttagatctcaagatgtgtcagtttacagtttttgtaacagtaaaactcctcaattatttttagttttttcattgaactaagttattatactgcctgtgatcaaactttactgtctgctgtatattatatatacataatatatgaggcttttcagtgtagtggtaaagaatctgcccaccagtacaggaggcacaagtgatatgggtttgatcccttggtcaggaagatcccctggaataggaaatggcagtatttccaagaataactccagtattcttgccggaaagaggagccttgggagtacagtt

SEQ ID NO: 61781 - DNA, 1357 bp, Bovine  19866880991916
  misc_feature (1)..(1): n is a, c, g, or t
ngatctgtgcagttcaaacacctattatacaagagtcaattgtatattgtggaacttacattgtagttatccttgaaaaacatggcatgtttaactttttcaaatgctagcatttaattgaataggatatatgcacattgcttttgaaatttatatctatttaaaaggtacttaaaaatattaatttccactgggtgttttaaatacttctttggatctttatttactatttcctactcaataaatagatttttcaatcacgagggattgagtactattattaaacaaaattggagactactctaatgatgttataaggaatgaatatgcatcatctgtagtattaagtagaacaccttaaaacaattaatgtgcaaaaccttttagagttgtagtccttgatatagcaaatatgtaataattttgctccctttctcagactgaaaattaagtaaattctagggtcttgaaatgattgtcatgactatttcttagtttcttataaaatacctaattgattttctaacataataaatgcttttatctttagaaaaaaagtgaagacaaacctttaaaattaagtataaaaataaaaaagcaatttaggtatgacaaaagcagtatcaataaaagaagaaaaatgtgttcagctttattgttgagttttgtggaatttgaattcatttttgaattacagcatatttagtactccaccaaatggatcattttcaatacagtcataatgaatattaccatgtactgtatagcaagggaatagagctgagtttgccaaaatttcattcttggaagtgctgccaatgcaaaaatagtttccctcccctggtacaatatttaagaggctttaaaatttttcagagaattatttgaagttactttatagaagaagaaatcagttgtgagtttgaaactgcaccgcattgcttgttcccatctaaaaactctttctgctcccccggctgttctttactttgctaggtcattttatattgtaaaggaactattttgtgaccatctgccacttacatctttggccccaatctcctcttctctgatcactattgattttccaaatggacccaaccataaactaaatgcagcaatcattacattttggttagaaagtgactttgctactgtaagttgtatctggattgctaaagcatcagtcaaaaacaaccaaaaaaatgaaagcatttcccagaggcatgggttttttaattgctacaattaaacctaccattaagtcatattatcatcattagctcatattttctattttttaaaataaattagccacacaaattcccacatttaagtcctaagcaaatacttaaca

SEQ ID NO: 61782 - DNA, 1583 bp, Bovine  19866880993834
  misc_feature (1)..(1): n is a, c, g, or t
natgagcaaaaaaaaaaaaaaaacagagactttattttgcaaacaaaggtccatatagtcaaagctatggtttttctagtagtcatgtatgaatgtgagagttggactataaagaaggctgaggctgaagaattaatacttttgaactgtggtgttgaagaaaactcttgagattcccttggactgcaaggagatccaaccagtccatcccaaaagaaatcagtcctgaatattcactgcaaggactgatgctgaagctgaagctccaatattttgaccacctgatgcgaagaactgactcactggaaaaaatcctgatgctggaacagattgaaggcaggaggaaaaggggatgatagaggatgagatggttggatggcatcactgacttgatggacatgagtttgagtaagctctgggaattggtgatggacagggaagcctgacatgctacagtccaaggcatcacaaagagtcacacaggactgaatgactgaactgaactgaaataaactgaatactgttgaaagtttcaaaacattacctagcaactaagcaatagagaattgagctgataaaaggcaaaggttttcatcatgcattcttgtttgtctcactgacataagagaaaattggtacactattcatttcataacagcaactgaggtacattttttgactctttggttgcaaaatagtatatcaaatgagtttatataagcattagtctggtgttcatgtgtgtgtgtgtatttttttaagttgggcaaaataatatttattttttcaatgttctgagaagttagagttagtcatatagtaggttcacttgcttaatacttattgaatataataaagataagaaaattataatttaaataaagaatataattagtgtattgagtatatatgctttcttctaagcagataaataattatatatatctgctcagagggaaacatagataaattaaatgtaaacacacctcacacttggattgatactaaacatgtgcttgagattatatataagaagaaaagtatgggtaaagatatattgttcggtttgctttatttccttggtcattttttcatatcctgcaggtgtaattttctttcaaatcatattttacactattaaaaattcatttacatgcatttattttattaattatcattattataaaacgctgcagctcaatacttctccagtccacatggatatgaactggattttttagaccatgttctttgaaaacctgataaaaataataacctcttgttttctctctatatttgctttcaaggtgtgtttgccattatgatttacccaattaacatttcatactgatttctcagacattcagagcagagaattacagggctaagttccttgaaagtcaaagaaaaactgagtcactggggattgcaagaacttttatttgatttttctctaaatgtttaaataggttttaaagaaagcattgataaactaacaggtataaaatgtaaaccctttaatatggttgatggagagcaaagtcggcaaataaaacttgcagcatatagaacgccttaagcaa

SEQ ID NO: 61783 - DNA, 1233 bp, Bovine  19866881034204
  misc_feature (1)..(1): n is a, c, g, or t
ntgctatctaggttggtcatagcttttctcccaaagagcaagagtcttttaatttcatggctgcagtcaccatctgcagtgattttgaagaccaaaaaaataaagtctcctactgtttccattgtttcctcatccatttgccatgaagtggtgtgactggatgccatgatcttagttttctgaatgttgagtttaaaccaacttttacactctcctctctcattttcatcaagaggctcttaatttcttctttgctttctgccatgagggtggtgtcatctgcatatctgaggttattgatgtttctcctggcagtcttgattccagcttgtgcttcactcagcctggcatttctcatgatgtagtctgcatataagttaaataagcagagtggcaatatacagccttgatgtacttcttttccaatttggaaccagtctgttgttccatgtccagttctaactgttgcttcttgacctgcatacacatttctcaggaggcaggtgaagtgatctggtatttccatctcttgaagaattttccgcagtttttgtgattcacacaaaggctttggtgtagtcaataaaacacatagatgtttttctggaactctcttgctttttcaataacccaatggatggtggcaatttgatctctggttcctctgccttttctaaatccagcttgaacatctggaagttcatggttcaagtactattgaagcctgacttggagaattttgagcactactttgttagcatatgagatgagtgcaattgtgcagctgtttgaacattctttggcattgtctttctttgttatatatccaaataaaaatatctttttcctaaaccaagtttctttgtcctgtgctttaatttctcttcacacaacctggcccaagccttttcagaattcttagcattccctgttctcccttggaagatgggaggttgtgggagaaatgtttctaattctccagggaagaagtctctctgtgtcctgtatctactccctccaacctcatgcccttgagaatcacagattttatcaatatgtttcacacatgcatcactattaatcatctttcgcaagtgtctttttgactttatcatgcccctattttaggggcttgcaatcacttttatctgtcatttgagtcaaattaaaatggataatcatttagatttttaaagagtaatttctcaaatgcacaatatactagttatttca

SEQ ID NO: 61784 - DNA, 1768 bp, Bovine  19866881043114
  misc_feature (1)..(1): n is a, c, g, or t
ntggagaatccaaaagggcagaggggcctggtagtctacattccacagggtccccaaagagtcagacaggaatgaagtgacttagcaagcatgcacctactatgaagtttctgtcataaaattacaaatcatcagtttaactgcaaatgaaaaagaaaaacaaaagtattttatcagattatcttgtaaatacagaccatttttattgaaattaaatattttgcattattcatatttatttaaatgtccacacataatatatatccctgtttcatgattatgagaattcataattatatttgtattattgaccatatatcagggctctaaaccaagagtttgggggatgtgtagagttcaatcagatacgaatctagcaagaggattatgatttattaaagaagataagctaggtatgaacctaaatgactatattctacaataggaaatgatgcagtatgattggtagagataaaatggttgtaggatgaggaaatatgagcacatctctaaggtataaaatgcaaactgtcttaagtcccctaaatatttcaaaatagttgtaacagtatttcccctttgagacaataaaaagtgcttcaagtgcttcatgtgcttctatattatatgcacataggaaaccttttactatttcctagatgatatttgtgttataatctagtttacaattcttttgatatgtttggaaataactgggaaaaataattggcaaaatatatttctctctataacagtggcataaaatatgtatgctaatcaccaacagatttaagaaactactccagaaaagaatttgaaacacaaatctctcatgcagctggctgttatattgtgtcatctccctattgaagaaccatcataggtaaatgaagaaaaatttttttatattttagattagccacaagagggaactcacagagacctgttaatgctagcgaaatatattaacaatgataaaaaaaaaaaatgttagtctgcagagttcaaacaaagttcattctctcttactaggttttagtgctgtgatacttgaagatttgatgaaaacaattattttcctatagttcctgaacttgtttcacaaatttaaaagggttttttattgccctattataagatttaattatttgattaattatctctttttaagggagcctcagacggtaaagaatctccctacagtgcaagagacacaggagccatgggttcaatcccttggtcaggaagctgtcctggagaagggaaaagcaactaaatccattattcttacctggagaattccatggacagggagatctgacaggcttatagtccatggggttgcaaagagtaggatatgactgagtgactaacatgaggcaagtattagagatccttaataaacatagttttgaactgactaagctgctttcactgcagtttcactttaggatcttggaagtcatttagtcttttttcacattattctatctatttcttaaataacgacacaaattaattaatattcacacctttgtttcaaaaagtgcttcaatgtcagtgatataaatccagaagtaaatagtagtaattgtactatagtattggcatttttaagtttcaaccatatttggccctaagaagatcttaaatcttattctctctctaaaaaaaaaaaaagaagaagaaatccagagtggaaataagttaaactacaaaactagcacatttttttgtagcattaacctaatcagataataacctattt

SEQ ID NO: 61785 - DNA, 917 bp, Bovine  19866881108030
  misc_feature (1)..(1): n is a, c, g, or t
ntgaaaagtgaagtgccaaagactgagcttcatctttgtgtgttaaataatgtgttctattctgcaaaagatttctctttttctatgccaagtaactaaaaaacaattatttcaaaatcatgatacaaggaaactattttagtatagtgttaattgaagctcaatactacttttagttataaaataacacttcatacctgtgcagtattttacactttcacacattatcctcatatttgatttgagtatctttaaatggagtatagctttttaacaaagacaacagtgattctttttttttctatggctgaacatgtcatgagataaaaataaaacttgacatgaagatcagatgtaatccagcaggatatggagtttaaaacatatctttttttctttttttccattgaaagtcaaatctgccacagatatcataacacccaaaggataatgctagaaatgctatgcagaattaaaaattatgtgtatattttgctgggtctcatgttcatgtatagttgcctcatcacattttaaaataggcaaaattccattttgacagatggaccaaagtagtaaatgccaactttcagtgtgtcagaatcatgtacaaaagccttgcttagaaggccaagagaatgaaaatgttccaaaattcatctactttgatattaaaataaaaaactgctacttcagtttaggtgtaatgcatttgggatttaccagttaaccacaccttcaacattatggaaagtatagataacaaaataacaaaaattgcattgatttgatgaatacggggatggcttaggatgcttcagaaagtaaagtgcattacaaaagaaagtactagaatcaaattgaaagggatgctgagaaaggaataaaagcattaaaggaattgttagaatccttga

SEQ ID NO: 61786 - DNA, 867 bp, Bovine  19866881120269
  misc_feature (1)..(1): n is a, c, g, or t
natttaaacctgtttgagaagctgttaagaaaataactgagtgggaaaataaatgaagcttgagacagcaaattactgaagaagaaagtaatgtgtatttcttcaacaaacgagataaatatctgtcatctctactaaagaggtgttctgaaagaaaaaaaaaaaaaaaaactgaattataattgaagtaattcactctcagaagttgtaaacaggtaattcctgtctgtacctatagcagcagggaacaactctccagacactcagattttacagtacagggaatataaatatattattattatacttttgttattgctatcatcattactataatttcaagggatgtggggattggcagaaatgaacagtttgaatttcctgagttctctctgagtaaattaaatttaaattcagcagaaggcactcagtagtcctaggtgttttgacaccttatcttttccctgtttattccattcttagacaaattaatttgtattagtatgaaagcaaagtattctacttccatagtgtcttccagcatgtggattaaagagaagtcaaattattggttacaattgaagtgcaagtgaggctgacatggcttcttggaaatttttacttcatttaatatttcagtagcagtcccacctccaagagtgatccctaagtacttgaaggtcaggtttgcatgccttagcaccaattccaagcttggagcttctcagtttctgttcttgtacttgttctgctttcagttcagtttagtcactcagtcgtatccgactctttgtgaccccatggatcgcagcacccaggcctccctgtccatcaccaactcccggagttcactcatactcacatcca

SEQ ID NO: 61787 - DNA, 2415 bp, Bovine  19866881233529
  misc_feature (1)..(1): n is a, c, g, or t
nagctggctgttgctggttgtataaaatccacttttatagcacatcacaatcgatccagaaatgatttgttgtgcacaataagagaagatgacacttaaaatgatttttaaaaaatttttggtcatctcatgaaacacccacttattgagttttttcacctttccagtttgcttcaaatgcagcacgaccatataaaggttgacattgagttcttcagcaacttcttgcgtagttgtaagaggatcagctttgatgatgcctctcaggtggtcattgtcaacttccaattgccagccaatgtgcttctcatcttcaagactcttgtctcctttgcaaaacttcttgaaccaccattgcatatgttattgacactgtggtttctttctgctgttttatgacccattttgtactcagataagaaaattgctcaaatttgctttttgtctaacatcatttccatagtctaaaataaatataaaataaacataaagcaataatcattggtgcctcctaggtggcgctagtggtaaagaaactgcctaccaatgcaggcggtataagagatgtgggtttgatccctgggttaggaagattcccctggggtaggaaatggcaagccattccagtattcttgcctggagaattccatggatagaggagcctagtgggctactgtccatagggtggcaaagagtcagatacaactgaagcaacttagcacgcacacaatgtcattagccaaaaacataaagcgagaaatgtgcattaaaatgatgtataacataaccacagttatttaagaatatattccaatatcaaatgtcaaacttcaacagtgcaaaaactgcaatcacttttgcaccaacctaatatttatatcccacttggcattgagaattacatgaaaaattttgcaagtttcatgaggaaaactgatatcattttaatgttcctatctttgtattaatgaggttgaacttttcatttaatgtctattatccatttgtgtttcctcttgagtgttctctgttcatgttttttgctcatttagctatttgatgcatttgcattttaaaagaggaagtcgttaacgcaaataaatcactaattagtgaacctatgtaggaaatactttctaagcagggggatcttttttgctcttgtctacttttaaaaaatatatatttgatttaaaaaatgtattgagcatctacctagtataaggaactgtgcactctgggaaataaattggaaaacaaaagtttctgattttcaaggaagagactatcgtatggctcaaggttatatgacagtgtcttttgcttctaaaagctcactgatttctcattaagaaattataaaaatgaattgaaatgtgttagagaaattatgagtaataacaaatataagagaataattactcataattctttcactttaatgcattactttaatacttcttagagctttctattttcctcacattttgatacagatgtactctctacgtggtactttgcattttgctcttttctacttcacattagagtttaacctagtcttttgttagtatatgtcattattctaatgactggctgctgctgctaagtcgcttcagttgtgtctgactctgtgcaaccccatagacagcagcccaccaggctctgctgtccctgggattctccaggcaagaacacctggagtgggttgccatttccttctccaatgcatcaaagggaaaagtgaaagggaagtcgctcactcgtgtctgactcttagcgatcccatggactgcagcctaccaggctcctccatctacagaattttccaggcaagagtactggagtgggttgccattgccttctcctctaatgactggatccctctataatttatttaattacactcatatttgagggcatttccatttttccagtataatttctttagatccagtttttatttcttagcaacttaatttttctcacttaacaatgtatggtgggcatattactgaactattcacatttaaaatataaaattctagacaaaactatttaggaagatttaaagattgacaaagaatgattttggggtaagtcatgccactttttgtaggtgataattctttggatagtttccctgtgtattccagatcacaccaccacaactgctacttgcactgtgttgctgtggagagagctgtagactcagtgataagagacctggttcaaacttccctgagtgatcttggctaaattatacttttagagtctctgtttttctgtatataatgtatatcttctaaagcttgccctgtacaatattgttatgaggattgaataaaatcgctaagtgcctactgtaagaatgagctccaaattagtccaagttaatgttagagtcctccctcc

SEQ ID NO: 61788 - DNA, 1000 bp, Bovine  19866881241126
  misc_feature (1)..(1): n is a, c, g, or t
ncagttctaactgttgcttcctgacctgcatataggtttctcaagaggcaggtcaggtggtctggtattcccatctctttcagaattttccacagtttcttgtgatccacacagtcaaaagctttggcatagtcaataaagcagaaatagatgtttttctggaattctcttgctttttccatgatccagcggatgttggcaatttgatctctggttcttctgccttttctaaaaccagcttgaacatcaggaagttcacagttcatgtattgctgaagcctggcttggagaattttgaacattactagcatgtgagatgagtgcaattgtgcggtagttttagcattctttggtattacctttctttgggattgaaatgaaaactgaccttttccagtcctgtggccactgctgagttttaccaaattttctggcatatggagtgcagcactttcacagcatcatctttcgggatttgaaatagctcaactggaattctgtcacctccactagctttgtttgtagtgatgcttcctaaggcccacttgacttcacagtccaggatgtctggcactaggtaagtgatcacaccatcataattatctgggtaataaactataatggaaaagaatatagaaaagaatatatatatatatatatatatacatatagggagagagagagagaattgtatcactgtactacacaccagaaactattaatagctcaacattgtaaatcaagtatactttaataaataaagataacaaaaggggtggggaggaggcagggggtcttcatcctcacagcttcagtaaaagcaattcctctggccttaatttcagggtatcttgggctgtgttagagctagtttactgaacactgcctacagctttttaaattcttagatctgtagattttttgttccataatgggaaaaccaaagaaaaccactaagtggaaaattaattttcggaatatagcagcaggactctcgaag

SEQ ID NO: 61789 - DNA, 924 bp, Bovine  19866881260154
  misc_feature (1)..(1): n is a, c, g, or t
natttctttgcagaacctggaaaaccagggttttccacagtctagcctccccctgtatagtgactgttaattccaagacacatgattgttagtcagtatctctctatgcagaaagacatcctacaagaaatggagtatcaatatcagaaatcttaattatgaacaatggacatatatgtccacaagaaaagtacttacttggggctcccaggtcccattcaggaacatatttcctgagaatctccagaaaagagtagtatttttcccaaaaaattaggttatagaattcatttcctccctggtttctctctatttcaattacactgaattatttggctatacaaaataaaaggagggaaggagtaatcagtaagcaaatcatcttatggtctggggatggagagaagtaaataaggcatgaatatgccatttaaaaactcataatttatttcacagattcatgtagaaacaattaaccgcaataaaggcaaaaatatgctggaaaaagttgcaaaagtgctcttggaaaatagaaggaaaaaataataccattttggggagtatgagacaacacagtatcacatataacaaaaaagttgcactctcttttctctcccttgtcatttccccagcgatatttaccatggaacagcgtaccttcacatcaggcctttctgaagcaggtggaaattaaatgtagacttaagaacaaatacttgatgaaagtacaatttatcttatttcatagagagtcttacaatcatgtgcaaataaactacttattattaaacattaactttttttattgtagattattcctcatcatagatcataacttttttctaccataggtggtagacagatagataaataaagatagatatttaaaatgagattcgaaactccactaagacttgtgtagtt

SEQ ID NO: 61790 - DNA, 1165 bp, Bovine  19866881388514
  misc_feature (1)..(1): n is a, c, g, or t
ncttataatttatgctaatttaacaacccctgaagtctctgattaacacagcagggcatgctgattttaataatttttattccaaaaactagtcatcatttgctgcatgctcagctataatgacattttctaaaggacttcctaaagcttctcaagagagaaattaattttggaaatctccaaagtgaaattttctgggcttgaagaaatgctacctaaagaatggtcattttttaaaaaatagcagtcactgatactctgcccagtggataaatgctagagcaaattccaataatcccttcctcttcctttgtataatctcctcctcttgagtacagatggaacctgtgatttgtttctaacaattgaatatgacagagttgaatggggtggcattcccttgatttgctcacagtatgtgagatgtagtcttagaaggagagagtcttttgatggtcttgatgaaactcactactgtgatgtgagctgcctatggtgagggttgcagagcaggaaagtgagagcagcctctaggagtgaagaacccggcatacagccacagggaaagtgagttctacaaacagcctcttgagtttggaagatgactgtgagctccatgaaaatcctacccttcctgacattttgatgacagccttgaacaggggacccagataagctgtgtccagactcctgacccgttgaaactgtgaagtgaaaatgtctgttattttcaagtgctaaatgtgtggtgatttgttacacagtaattgaaccccaatatactttgtctcatgtattgttgggtatagaagagggtggtaaaatatgcttgttcagtataatgactaagttggaactgcttattgatgtataacacacatacatcaaatcacactaatcataatagtacaactacttgaagttttataaatgaaataaactgctataaccagcatccagtagaagactagaagattatcaccaccccagattttctttccatgtcccttttcagtcactattttccattccccctgcaagggtaaccatttttattttattgtgatttccagcgccattgattggtttcacctattttggagcttatggagatgaaagtatactgtatgtatgctctgtcacaacatatcagcttctttttttt

SEQ ID NO: 61791 - DNA, 774 bp, Bovine  19866881403843
  misc_feature (1)..(1): n is a, c, g, or t
nctctttcctaagcctgccttatctctgggaagtaaatttcttgcccctgctctgttataatttatcttaaattctttaattctttttcagctggtctccttaatcctcttaattacagcttcttcaaagctcatccttatgtactctacttgcactattatcagatcatttcattatcaattatctgtaaaattagttcttaaattattcttggtttttaataacttattgttctcacccatcaacctttccaattctaaggtagtatttttagatacatttcttattctctttctcagagccattaatcaaagaccacactgattttttttttttcttacaaataatgtgaagtgccctgcctcttctcagagtgcaagactaaaaacagtgtttctcaaagttagtgggcctgggaatcacatgagatgtttgtcatagatgtaaatttccacttctgtttctataaattctaactggaaagcctatggtgggactcaagaatctgtaactttttttctgaaacctatgtttttttcttaactttttcgtagtttcattgagatataactacatataacaagaaatttatattttaaataaggatcttacatgattctgatatgggacatatatgaacaattcttaagaaatccaaaaggaaaggaagatggtttccattgaggagtccttaagtcccacgttctgacagactctacaatattatcccggaagcatttcagtgtttcagtcaatagttaaagaatctagag

SEQ ID NO: 61792 - DNA, 1474 bp, Bovine  19866881424551
  misc_feature (1)..(1): n is a, c, g, or t
ngtttaagttctaagtttatctggttctgagatatttgatatattctaaatttctaactccccaatccctgcttccaaagaaccctagagtgattaaaatgcttcccactgtttaaatgaacagtagcaaacaccgaaaaaagaaattatatttgggatgtttaaatagtcataagagtcatcttttgccaaatggtgattctcaaactttagtaagcgttaggatctctcagaaagcttgttagaatactgatatcttctgctaacccccattccttcaagagaccatggaaatgtgttttagccattatctggaattgggaaacctattttttctcagctacacttggagaaacagtgtcctaaaatgtgtggctgcttctcaatgaacttcatctgttaaaatggggggacagagtatcttagcatcaatgagcttgtctaaatggatttcgaacacagtggcatgctagttcttcattggacagattctcataattgagcagcttgggtggggagctgatataactattctgaatgtgattgatgctccagctgataaagctgaactctactcactaaagtgctacgctctgggaggttcattatgctggaggctgggactgttgcccaaaactctgtgactataatgaagataggcatgggtctttcatgatgtccaccccctaccccaaatgttgaaaagtagctagcattgagtatttttatacatagcaaaagtaagacagagtcagaaatttctattctcttatatctcagtgacaatattctaatataatttcctgtctaatgttctattaaagtgattgatttcaaattaaacctttggagtagtagctgattatgtgaaagtgtgacagttgaccaggatgccattttttaacagtttgccttctgactgaattaacaacagtcccattccatgcagtattatgtgtgtatctttaccccagtttgcatacctaaaaaatgttatttaatgaataaactggctcatgacagttgttgcttgattacctttttctaaatcttacttgtaaataaggctcagctatgcagcaaccaaaaagttgttatccattaccttgctgaattttggctgattcaagttaattcttcttaaaagaagaattttcttttggaaaatcactcattatgtctattcactttgtatatattggtcaggcttttaaaaccacgtcctccagaaaggagacaaaagaaaatcaaacaggtaaatctaacatgctaaattttgcaggggaaaaacatcattatatgcatacctgatgcatttcataacctgagtgacattctttagacttaccagcacactggcaagctccagaaaccagctgatccaggctatcagaataccaaaacacctgaatgcggtgtctaaaattagactattgaaattctccctggatgtcactttcctttattacaagca

SEQ ID NO: 61793 - DNA, 758 bp, Bovine  19866881425652
  misc_feature (1)..(1): n is a, c, g, or t
ncaaatgaatattttgtatttttgtttaagttaaaaattaaggattaattcagatgcatttagaatacaattagttttcatcagtattttttatacttttaaagtaaataaaatgcatattattcttaatttaaattgatgtccagtatgttacatctggaatagtatgtagatgatctttgtgtccctccagggagctggagagttagttaaaacatctttgatgatgcatattgattttatttgaaggtttgagttaaatacattaagtaagtagagctaaaaatatacattcatttcattaaatatataatggtgatattagttttaagattccattatttaatagaattttaaaagcatttttttatcctttcactacagatatacataatttactgaccttgatattatgcaaacttgattgaaaactataagaaataaattactagtttttaaggtcataaatgtgcagcttttacatgtgacagatagaacactaatattcagatataatcttgttttcctctaaagattatggtttttataggtcaaatataattacaaatgtcttatattagaactgtaaaatttttgaagaagcaactttttatatgcttggcattagtaagaaaattttgaaagaagcttttctgtaatcttggaatcagttctgatccagccaggatgactatggatgccaataccataggagccctagggacacattctactgggtgcttgctggcattcactgg

SEQ ID NO: 61794 - DNA, 694 bp, Bovine  19866881546009
  misc_feature (1)..(1): n is a, c, g, or t
nacatcatattcattgttttacttgcaggttcacacagtgttttttattagaaggtgcttaataaatgctcattaaacaaaaggaaaataaacagagtgtgtacctttcaaacatgtccacatacaagcatatacttggaatacttatttgaggcatcacattctttttttgacatacacttcaatcagatccaatgtactttttcagaaaacagacaaaattctaattcctcaccagagagcagctgatgggagaagtgggaagaatcaatcatcaatctctttcattcactctctctctctctcctacaaactacagcattattgttaatgatgttttgtgcatataaaaggtactttgggaagaaacagatcttcctgatgttgaatataaattaattgtaaaacatgatctgcttctttttttccaagcggatacaatatacgcatgattctgaagctctaaaaggctattctgaaactatctgcagacaaggttgctatggaaaccatcttttttggaatagtacaataaatagtcatctaaaagaacactgaacacagtgcaccttgctctagtaattataggtggtctagaattgaaatatctatatgttttgccttcaggagtgccaccagagcatttctattaccacagcagaatatttttgtaaagaagtgaggtgcaaaatgt

SEQ ID NO: 61795 - DNA, 1221 bp, Bovine  19866881679347
  misc_feature (1)..(1): n is a, c, g, or t
nttttttaatgtcagagctgaggcactagcagttctctagaatttacagatttaagtgttaagagtgttgacattttccaagaacatgccactatttttattcattcagagtaattatgggttcttataaaaattcacacacattacttgcttgaaaaagtaaacaatcttctcttatttcttatcttattgtcaataataataggtttttcctggtaatgttgcttttacaaaagatatattcatattttagaattcatttgtattaatgaaattaatcagttctatttcatatgttagaaatcaaactaataaaataaagcatccacataggcagaaagctgctatttattttaatttttaccatgaatctactgtcctcagaactgagagtaactgcaactgaggcaataagattcttgtgaaggatttgagggttaagactaactctgagggtctctgaatcagactttaccaggcattggaaaaacttatacaaaggacctacataatagatttgaaattttaaaaaattccaatagcgaacaaaagaaatagtattacatgagggcaatgctagtagaaacaagactggttaggaagcccttgcttttatataggggaagaagggtgtcagcatgaagtagatattaatgatgtcaatgaatgtttctaagaggctgactttaaagatatggtgaaaaataaatgggagaagatggaggatggcatcgaaggattttagttggttcattcagggaggaatattgttcatgtgactgaaatatagcagttagagaattatgtttgtgttttatctaaggcctggggggaaaacccagtttattcttttgaatttagacagaggcatgggatgttgatcttgacttgagaaatctagaaaacaagcaaaggcttggctgtttctatagcagacataggtgcaagtgagcacctgctctgcttcttagagactgtgaggtgaaggaatggtgagtgccgttgggaggagctgtggaccaccaagagagagtcatagagaaggaggagccttgggacacccaacagtaaaacctgtagtgtggatagagaggaagaagggcattgaagtagctccaggataaaggacaaaaattgccaacaaaatccttctggtcaagggtaacaatgctggtgatcagattgagaggagatcagggttctcaaatcctaatccctttt

SEQ ID NO: 61796 - DNA, 822 bp, Bovine  19866881947138
  misc_feature (1)..(1): n is a, c, g, or t
ntttgaaaacaacacaaagttgaaaggcagagctaactctgttggatgacagaattaagacttcaaaatgctcttgacaaggctgaacactaagatgaaatgcatacaatgaaattaatagacatgctatgaataaaaaagcagactaatgaacaaacaaacaccctgcatgtgtacaagatggcgtgagatcagacttgatagcattattaatggggggaaaaaaacctagaagctttagttgaacattagtcaacattttcatacagctgcaaaaaaaaagtcttaggttgtgtaatacagtaatagtaaaatcaggatagatcatgcctatgtagagaaaaatattcatgcctgggtgtcacactgaagagcaatattaaattttctaagtattcatgaaaggttgacaaataggaaatgcactcttcatatcatataagaatagctgagaaattgcttgctgtggaaagggaactacagtaaattaatatatattttcaactactttagaggactactactcataagaatacttcatcattttaaaacttatattaactgtatgatctcagaaaaggtctttggccctctgtgcctcaattttttaatatctagcaatatcaattctgtagaattattacaagaaatagcaaggattcatgtaaagtatatggtacattacctggaattctgcctgcatcctataaacagtgaatgtttttttctctactgctgtaaaggtagactagagtaaatagatgaagccagcagagtcatgcccgccccccaccccccaccacacacacacaaggcccttaa

SEQ ID NO: 61797 - DNA, 980 bp, Bovine  19866881947370
  misc_feature (1)..(1): n is a, c, g, or t
naaactgtacttagtgttaagtgaacagacataagtagttaaaaaataacattttacatatgaaaaagccatggcaaaggctattttgcactataatagaatggaattggagagcatttgccttgcattttcaatcctccttgtatatataagctgtactctggcttcactccaggatcctatcttgactacagtctgtcttcaaaatggagtcattatgactttcagtgcttttaccagtctattttttctgttttcactcaaatgaaagcagctatctacttcctctactgctacccctggactttacacagatcaatacacatctttctaaccataaacttagagtatttcaacctcagctgagccttcagaactgtttggaatcatttttcttttccctttccaatcccatttgaattttcataatatttatacaaaaacctttattttgaatcctaatgtactttcaataccatcacatcaatagatccttaattcacagagaaagccaagattatcaggtgaaatatcctatgactttgtattccctcttctctattgtgaggttcatccttctcttctgacctggatgctgaggtgctttctcttatctacaaaggtagctgctccacccatgccttagggacaatcttctgctaggtcattaaagcctagatagtcttttcagggatcacgtctcctaagcctacatgcatgcatgctaagttgcttcagtcatgcccgactctttgagaccctgtggactgcagcttgccaggctcctctgtccatatgattctccaggcaagaatactggagtgcgttgtcaagtcttcctccaagcaacctttctgatccagggattgaacctacctctcttgcggtccctgcattgcaggtggattctttacggctgagccactggggaagccccctgagcttacgaggaagctcagatattctcatccttcatctac

SEQ ID NO: 61798 - DNA, 2493 bp, Bovine  19866880347780
  misc_feature (1)..(1): n is a, c, g, or t
ncagtgaagctttgtgacttccccctggctgtgttatcagcatctctctgtgcattggtcagcaggatggagatattttctgaacccattcggccagcatatacagtctatctgagtaccaattacctcaagcctcactcataatagaagtcccttgatactagagaaaaatgtttttctgcattttatgcttccttattatccttggtttttgcttatttgttcttttttaacttgagaaatttcaatagcttctttgctttaaaaaagtgttttattcacacagaagggtattattcatagaaagagctatatagaattccattatgttatagttcatcggttagtgtaggcaatttctttgtgttctgatctcggtgtctccttgctttcctggaagggcatgtggtccaggatcacctggtggccagcctccaatgtggctcccaatgagtcttcattgggactcctggtatttatgacttcatgtggtccccttccacactgattaacatcaaatatcatgaaaatgatggagtgtagtttctgggattatgtcacaaagggtagtatggcttctaccttgctttcttggaaatcatttacttcggcaaatgccagtcatgtcatgaagacacttaatcagccctgttgagaagtccacacagtgagaaagtaaggcttcctgccaatagctagcaccaagcatgggagacagccatcctggaattggattccccagctctagtcaaaccttcagatgcctgctgtcccatttgacaaacccatgagagccagaaccatacagctgagccacttttgacttcctgatctttcacaataactgtgtgagacaataagtgtttctaacccatagaaaccctgttagatgatttttaattgttgcttcaagcctctaagcttccgggtaattttcttggggtaaaagggagagcttctgttcttagctccagctgttttacacctcaagtgtctacattaaaaaatcttgggacctccctggctggcagtccagtggttatgactgaagttccactgcaagggaaactggtttgatccctggttgggggactaagatcccacatgccatgtggcacggccaaaataataataatagtaaataaatctctccactatgaggacaaatttacttcccaaagcctttctgctttacgtgtgaaaatattcttcctattaccatgcttttgaccattacaaagcatataatgttagttgaatgacagaggatgagatggttggattgcatcgccgactcgatggacatgagtttgagcaagctccaggagttggtgatggacagggaagcctggtgtgctgcagtctatggggtcgcaaagagtcagacacgactgagcgactaaactgaactaccctgaactgaatgttaactgacagtaattggtacccatgcccctcacttttcttagtaagttctactcttaactctgtaaggcctgaggaagtaatcaatgtggaggaaatttaatttcagcctgctgcaaaggaaaagaaagacacagaatatattgctgtaaagttgattttttttttttttcttagaagaaaataaatttcctctagagaccatttttggtcttttctactatgacattaagccattggtaccatgtattttatattatcttcacaaatttttactctaatcaacagattgagagctaagagtcctgggttcagattttaattttgctactttgtagtctgtgatagaacaaagtaatttttctagtccttagtttgactgtctgtgaaatgaaaccagtaaaatccatttattcattcagcccatatctacatgtttctttgtttgtttttggccatgtgttgcagggcttgcaggatctgtttctggaccagagatggaacccatatccccagcaagggaagggcagagtcctaatcactggactgccagggaattcccagtctgcatgtttatttagtatcttctatatgccagtccctgcacttaaggtgaacaagactggcatgacttttgctgtcatggacttcacatcttacatataacttcacatgacttcatttttctaataagttctggctgggaaaggctctacaaaaggagtcaattcaacacatattttttaacatctatgacattaactctgaggtgctgattctgtagaaccataattaaatgaccccagattaataactatagattgtatgtagctccttatactttgtaaggcactttctaattatcatatgtgagcctctcaaacactgtgattgctcagttattaacctggactatccactcaccctcctctaactttgcctttgttatatattagatttctctattcttacatgcatttccccagggcatttattccacctgtaattaaacagtgaactagggaattcaagtttgcttcccattctagattggaccataatctgact

SEQ ID NO: 61799 - DNA, 1322 bp, Bovine  19866880362189
  misc_feature (1)..(1): n is a, c, g, or t
nccaggtacataatccccattgttcagaggtcttgctctcatggcagactctctcagtcaaagaaatgttgccagtgattagaaaaaaaaaaatcaaaccccaaatttaaaattttcatgtggagtatttttaatattaaccacaaattaacttagcagataattaattcctttgaaaattagctgtattcaacttaatttaaaaaaaatattagaaaatgtgaaacatgggagacgtttgccttaatatcttgtatctcttactattttccctgtcccaattacagaatcataatgagtggatttgtccaaatggaaaatgtgtctgtataataataaaattatatttctctttccttcttgaatagctggcttctttgtttagaaaactgtagtatttactcacttgcattttgtgtttttgctcaagtgtcaatttccctgtaaagtctaactctattgaaatatatttgcctgtggccatgccatctttaaattttccttaatttgcatgcacttcatatctcaatgcaaagcctaaaatgtctgacacaaagtctatacataacaatacttttgattgacaggagggtttattatgcattgatatgacatcatatttatgtataacaatgactttttgactgacaactaagcaatgatagaattctggacaccttctatacatcattttttataagacaaactaaaatatccagataattggctgaatttttcaattttccccaattgcttagcgttgagtatgggaagacacagtgagacagtgcctcattctttgccttttccagtggtgaaagatactttgtcccaacagaacatcacatggttccactcctttttttccttttaatgattttgtgtgttaaaagttggcaactctgatattaaatgaattgatttttaaaaataggcatgctcacaactgatctgtggaatattttcaagaacctgctggtaagaagagaaaatcttaatgagattctgcattttggtctcatgagaaagctcattcaggaggcatggtgtccagtagtacacaccaatgccaatcaattaacacgtcttgctagacatctaccacccggtcagcagtcaacacaagaaggacttagggagagccaccaggcaatatataacaaactgttaaataatgcagtagtcagtaagaatccagaaaaaggtaaagccagagtggactgggaaatatggtggtctgcactgtaagaaactctgtgccatctggacttctgtgctaaccagctggatgacctcaggcaagttgttaactgcttcgtgtt

SEQ ID NO: 61800 - DNA, 1301 bp, Bovine  19866881050508
  misc_feature (1)..(1): n is a, c, g, or t
ntttgtattaaacaggcattgttttcattcttggcaccttatttttcatgtacataaagagaacgcaaggctacagcagggcgagacaaagatcaatgctgaatgtattacttggcactggtcagacgcagtttaataagaaaaaaattgatccattaagctaaacctaatttttggccgaaaatggctgaaacctcttctttatattgctagcttcataaagacctataatatttggaagaaacaactcaaggctgagtttaataagattaaatgtattgcaaatatacttaacaagaatctatcaagttgttaatgattgctattaatatcaaacaatttttgtatagaatttttttattagagcaattgtaaaatacagccataagaaatgcaatataaaaaggttttcaggtaatttgtaacagctacaattgcagaactcaaatcttaacctacaacaatatagtaatttattttatcaatcagtttctaacacaagtacaattaaatttgtaaagtatttaagtgctggtcttagccctgtgtagtcaagttccaagggacattgacggtaggcagtagcgcccttacatgtcaggagattataaagtagaggatttgttcttataatacttaaaattattttgaaaatgcaatgctaatttcaaagaaattattttaattcagcctcatctcagatgattaaaaaagcagaagttttcatctcaaatgtcactgaatcatggaactttaaagatagtagggaattcattgacttgtctggttcaatctgcccatctacagatatagaaactatagctacagacggattctgtaaaataatctgccaagtgtgcatacactggaggaatactgaatgtttttattcacaagataaaaatttcagctaatgaaaactgagacaacagaaggtgaaatagacacttgtggccataatcacgatacagcaactgaaaacacatggacaataaaatacctttttacctaaataataaagactttcatttgaatactctaatgctatactttatttatatgtatattcactattacatcacaataaatccagaaacacacacacacactcacctatacacattttgctcagaacttgatcagtacttaaaatggatccatgaaaattagaaaaaattaaagatcatgatttatgtaagcaattatacgaataacattttttaagactatacctaaaaattggggaaggaaaatcatgttctgtctcgttcaaaaaaaaaaaatcccctacagcctgggca

SEQ ID NO: 61801 - DNA, 1320 bp, Bovine  19866881369471
  misc_feature (1)..(1): n is a, c, g, or t
ntattgagcaaattactatggcaagtaatttgattgcatgctcctcattgtcagtaacactaataatactccctactaccatgattattgtgaggaccaaatgaagtgtgttcagaaccatgcttgatatagatagcagtgccaggtatcaaatgttgttgccaaagaagaggatcagtaactgagtctgattgtttcctgagaagaggagctggcaagagaagctgaaaaagagtggaaagagaggaagtatgaaatgtaggaaatgatagcatcacaaaatctaaaccaataaagaaaatatcagagggaatagtcatacatttcaaatgctgcagagaaagacatacctaagatttaattacatctagattctatttactctactggactttaatagtctttactcccgcagcaggcacttataagctcactttgttacgttgacttgcttttgtacaagccctcagtcatactcatttacataacgtctgcgcaccattttcttctacgtatggtctcctcaaccagactctaaactcttcaaagctagatttgtattttttgccctaaataataaacttcttattttctactttcctacatctttttgaacacacacagagcacccccaccaacacacacacacacacacaaactaggtaaacaaggacatcagtaaggacccagcctacaaaagtcaataaggacagaggtacaaatgttacatttgtaacagaatttttaaaagacactttatgtaattttgaacataaattgtcctttgaaaattttgttaccaatgctttatccaagagcatacaaatttacatgcttctaagaagagctttgttttgattaattctaaattatattcttgccacaggaaatgataaaacattatctctttggaatgtaataagagctgctcttaatttaccaacagggtatcttacagatgttaccttaaaggaagtttttaaaaaataattttcattgtttacttctattaattaattcagtaagtaaactatttccgattgtttatttttttctgttttattcaattacttcagtaatttctacccagataagtagaaataagtgaatctcttatcttgaaatagatcatttttatggttgcagagattatcaaagttttataaaagtttggcttttagcccaccatatctataatggagcattttcctttttaaatcccaaaaggcaacatttaaattttatatgatgaagtaaatcatccccattacaacacctcctttgtttccttaaagaaacccagaaacaaactttcatagt

SEQ ID NO: 61802 - DNA, 892 bp, Bovine  19866881533593
  misc_feature (1)..(1): n is a, c, g, or t
nctacttgggaaggaaatggcagcccactcctgtattcttgcctagaaagttccatggacagaggagcctggtgggttacagtccacggggtcacaaagaggcgacatgactgagcaactcagcacaagtgcagtattgtctactagtctctatcttatcaatactttgcatcaggagaccagagaaaaggaaggaagtttttgtaagtattctttagtgatctctttacaatttgtgactttggataagctcattgggtaggctgtctttagaccacagatttatatttataagttcagtcataatctcaaatatgtatcatgccagagtttttgatttttaaaaagaattctctctgctatttgtttttacatctgcattcctaaccttagagcacagcccaccatccgaccattctctcacctgaagagccagcagttgtcctaagcccctcaccttccttcattctgtctgttccatcaagaccacaatggcctatttgctaaatatattttgaacttgctgcttatttccgtgcccaccatcattttctatagtcggtccctcattatttcctaactttttcctgttaagcctatgaaatgatcctcctgcctacttctgtcactccatcgttggcactgttattggggcatggttctaaaaatcagctcaagattatgcctgatctgtactaaaaattccctttccttttgctttctctgccataatgctaagggttccctagctcccttatttttgtcagggtgtcccaatattaagtgctcaataaatatttgtgaaatgattagatggatgaacccctgtctcaaagcattaatctataattcaggctgatattttccaactagatttatcataagttgaact

SEQ ID NO: 61803 - DNA, 745 bp, Bovine  19866881698115
  misc_feature (1)..(1): n is a, c, g, or t
nagatcttaaagttttccgcctaaccccatctgatacttaaattacttctataacattcttgccaagccattttcataggtatacctcaattgtactgagtccaagacttctctccaatacactgaacaatgcttcctcgacccctcaacctcagagtacttactgctcaaaacactgaagaaacaagttttaaaggttacctgaggtaaccttggcacttgggcttttgtttctgactccctcagagtttatggaaagtaagacttgggtacccaaatcaatagttgaaatttgaaatggcctaagaagtagtggtgtgctgaaatagactacgacccacagttctggtttggctgttaagtggcactctgagttaagtgacatccctttggtatcttgaaatcagtcttgatgggaatatttacaccacagaaattggcaagtggtttaaattgtcatcctaaaatgttcataattgaatatgaaagaagacaacaggtgaaatgcattccagaccctatctgaaagaagcgaaatatgataagagattttggcttcttaaaagaattatggtagtgtagataactgtgaaaaaatgaaatatagaatctttaactagagtattataaccttaactatcaaaacagtttattcttttgagatcagttctttaaattttggggggaaacttgaaactttacttatgtgacttgtagaaaaccactatttcttgcaaatattcta

SEQ ID NO: 61804 - DNA, 940 bp, Bovine  19866881920154
  misc_feature (1)..(1): n is a, c, g, or t
ngcttgacacctattttcattcctattctgctctgtgactaaatcttagtttttgaaatgtcaatggatcaaaaggaactgaggagacagttggcaagatgtagggctatgcctgccaaataataaagtaagttttgctttattaaagatgcagtaggttatacagaaagttgctttggtaattaataagcaaaaatagatataatttagttgaatctaataagtgagacagttaccttgtgtttgctacttttaaggggaaggagagaaaaagagaagtataccttattccagatgggcctctgagagggtataaccaaaattatgaaacaaatattcattcacctgactcatatttgtatagaaaagataaaattgccacaataacacaagtttttgtgcgtttttttttaacagcataattttctttctcaggtgataaagcagttcactgaactacaaattacaatgtccattagcaacctgttagccatgtgatatctgagattcagacatatgcaagacttggttccgttgccctggtccccagccaagcctgtggcaaagttacttaaataccaccaactctagtcttgctctgacaggcctggctgtgatttccccccaaataggacacagactaagatatattaactgaggttctggaaaacagaagaggaaaaaagggcacactactaaatatgcactaaacattaaaaaagaaaaaagttttatggaaggaaaaattgagattaatttgagacgtaggatttgttttttctctctacaaaggaaataagtcattttcatgccaatgatgctcgaaggattcctgcaaaggaaaccatcttcgctaggaaaatagactccctgtgttgtgggtgacattgccctctacttcttcccctatttgttgcctttgttttcctcccctgtcatt

SEQ ID NO: 61805 - DNA, 1357 bp, Bovine  19866880368800
  misc_feature (1)..(1): n is a, c, g, or t
nacctcatgcaaagagttgactcattggaaaagactgatgctgggagggattgggggcaggaggagaaggggaggacagagggtgagatggctggatgggatcaccgactcgatggatgtgagtctgagtgaactctgggagttggtaatggacagggaggcttggtgtgcggcagttcatggggtcacaaagagctggacacgactgagtgactgaactgaactgaactaaaggatagggagataggacaggaaattaatcaaaaaattaaaaagataataatcttgcagcattcttcaatataaataacctggtattagttccaagcccttaaaaaacaaggttcttaaaattaatcttacttccctacccttaagatattatctaatgagcacatggataaagaacacagatttgagtcatttaacctaggactttaaggtttttgcttcatttcttcatttgctcattcagtaaatgttgacaaattccatatctgaacaggcactgtgctagttgatagataggaaaggataaaatcatgaccacaaatgacacagagcctgtcctcagctacattataatttagtagggaaaacacattatggtaaatacccagttgttttttttttttttaatttgtttgttgttttaaagaaagtggtaagtataatacgggtgattggagagagtgttttacaagtctaggaagaggagaaatccaatttattctgtgttcactgaacacctattctgtgtcaaacacagtgccagcggctgtagatgcaaagataaataaaacatgattcttttcttataagagttcttagtttatcaggattacctcctcctggggtgcagagagtgtcaggaaaggatttctggaagaagtgacattttaagttgcatcttaaaatgtaggtaaattttgacaaggggaagaaggatagagctttccagggagaggcaaaagcaagaacatagcagtgtctgtgatccctttttctggtattatttttattcttctgaaagcttggtatgagaatgacaggaggcataactttgtgatatatgctttacaacaccttgtttttatttatttatttattttttttaaattttattttgtttttaaactttacaaaattgtattagttttgccaaatattgaaatgaatctgccacaggtatacacgtgttctgcatcctgaaccttttaaagcacaaaagataagtgtttttagaaaactatattcttttgaaaacatttttgagtatttttattaatattagcaccatttatattattggcactgttgatcaaattgctcttactttatttctgtatcttggaaa

SEQ ID NO: 61806 - DNA, 1786 bp, Bovine  19866880721453
  misc_feature (1)..(1): n is a, c, g, or t
ncaggttgtgatgctgttatataaacttttatgtaatgaaaagttgaattttaatttgagtaaaaaaatagatcatataatacacatatctttgcagttcctccttgctaactatttcactgataacagaaaagaaccttgaagaacatttattcattcacatttcttgtttataatttggttagtcagcatttcttcaggaacatttctctcctccagggaaacaaatgagagtagttgggaggatatggcagcactgggtccccaaatcacagctgtattcttttgctgtttgagttactacattcttagaaaacatgttggaatcccaagatagaaccaattaaaagaacatatgatttagctattggacagagaaaatttagataaaatgtttgtcaggatataatactgccaaaaataaatgtaacctggtggggcatagaagggaggtaggatttctagaaaacatgccaaaagaatctccctatataatcttagaaaagaataagcccttgtttttccaagtttcttctatctgggatgatggatgtcctctgactgcacttttaaatatactatgttctcagccaatccagatacagttagaaaataagtgggcaactccagattcagtgactaatagggcaatgaattcattgtatctctcttatcttatagggcaatgaattcactgcatttctctttcttatcttatggtattttacataccctgaaatttagtttctgttatgtatgatctgaatatttgtgtctcaccaaatactaattcatatgctgaaattctcatgctcaatatgaagggatacatttagaatgtatttaatatcctttcaaaagaggcttgagagagctcctttgccccttacattcttcatgtgagaatacaaggaaaagtctgctactgggaagaaggacctcacctaaccatgctggcaccctgacctcaaacatccaacttccagaactgtgagacataaattgctatagtttacaagatacccagtctgggacattttgttatagcatcctgaagggactaactaagacagttcctgcagactgcaactcactggttaaacccacttactcttagcaacaacacagtttacccatccagtcactttctaatctcctaacctgagtattaaatcttgctccctgtacctctagtccctggcatccttctaataaagaaaaagactcagaaaaagaagtgtttgttttttgtttatttgtttgtttgttttttacctgaatgttacctgttctttgaagcacaagctggaatcaagattgctgggagaaatatcaataatctcaaatgagaagatgacaccaccccttatggcagaaagcgaagaattaaagagcttcttgatgaaagtgaaagaggagagtgaaaaatttggtttacagctcaacattcagagaactaagatcatggcatctggtcccattacttcatggaaaatagatgggggaaaccatggaaacattgagagactttatttttttggtctccaaaatcactgcagagggtgactgcagccatgaaattaaaagacacttgctctttggaagaaaagctatgaccaacctagacagcatattaaaaagcagagatgttactttaccaacaaaggtctgtctagtcaaagttatagtttttccagtagtcacgtatggatgtgaaagttggaccataaagaaagctgatggagtctttagggttttctatgtagaggatcatgtcatctgcaaa

SEQ ID NO: 61807 - DNA, 1439 bp, Bovine  19866880794471
  misc_feature (1)..(1): n is a, c, g, or t
ngttattataaaatattgtgcagagttccctgtgctatacagtaggtctttgttgcttatctattttatatatagaagtttgtatatgttattcccaaatcctaatttatccctccctcccctttcccctttggtaaccacaagtttgttttctgtttgtgggtctatttctgttttgtatataagctcacttttatcatttttcttagattcttaaccacatattttcagtaggtagcatgctgatctaagttaaggattgcaaattatagctcagaggccaaatgtttccaccaaaccaacagagagcatcgtgtgaaatgctactgtcacacccaaagcagttttcagcacttgtgtgggcacagtctgaattgaaacaccaaactgtcattgtactcaaataattttattgcataactcacttgaaatagattagttttatgggtcattctgataggctacaaaatgacgaatgattcggcatcaaaatctcaacgttctcacatgaatgacttcttaacagctgaaggtgatagttgtatgagtttgatagtgaatcctattttaattatattaaaaggagcaatgcaaaagcatgtaatgatgattttaaaaatgttagccaggcaatagatataaaacaattagaggcccatctgacttgacatttcactttaagtatatctcttcttagcatactaagtagaaaataaaagtagttattaaaattatttgtggtttcaaaatggcacacagctgaaatgtgaaatgtacatgtttggttctttatgagagaatcctcaatctgagcctaaaagcacctcaagtggcaaaccttcctgctttatgttagccttatgggagctcttttttgtctttcctttcatcttcatccttcctatatattaagcgacaatacctattctttttcactcattgaaatgcaccatcttgttttccaaacaatccttaactgagcatcactttggaatttctcagacctgtatttgtttccagcatggtgactttggggaagttatttaaccttatccaacaagccaaggagtctacaaattcaacttctttcaaatttgaaaaataatagttactattccataaggttgtggtcggggggcgggggggcggggagattctatttgctaaatgtatatccctgatatacagcccacccctacaaatatcattagtcaaatcaaccttcacattccctctcgttctcctctcctacacctgctggttttgcacagttgtagcatcttactagccatctgggcttccctgtggctcagtggtaaaattcccaactgccaatgcaggagacataagagactctggtttgatccctagggtgagaagatcccctagagaaggaaatggcaacccactccagtattcctgcctggcaaatcctatgg

SEQ ID NO: 61808 - DNA, 1257 bp, Bovine  19866880852488
  misc_feature (1)..(1): n is a, c, g, or t
nagtgtttctttttgattgtatgatttgcattctgttgtgtctcccctattttatactgattttaatttactttgctcttaatttatttcacacaaccaatccagtttaattgcagttctgaaagatgcttccttttaatgattttctttgcatattttactcctttcaattacagttacctgaggaatcatactagaacaaggacgattatagcccttggttgagatgatgttcaatttcaacagtggaagaaatgtgcagagttccttcttgtttttaagctgatagtattttgagagcaaaagaaatattagccaagacaagcaatgaaaattttatataatttaagagcacaatgccttctctacagaattactatggtttgcagcaaattccacatcaaatatgaaatataaaagtagagccgtctattattttgtactaatatacccacactgcttccaaatagaatatatattaattcagacatctgacattgcttgacatcaacacagcatgacctagcttctgagttccttgcttctgtttcttttaaccaaaataaaaatatattttctatattttctcagatgttaataacagggaatttgagagcaaaagatgcccttacttccaagtggttaattagcttacacagatgactagtgggcccagttactattttgcaacactttaatcataatgcttaaaagctaaacatattttctacagttgttgtttctatattacctacaagttttctacatatttaagaagagaattttcagattttaaccaactcaaggaaatagacaataagatcatatatgatacaaagataacatctttcaaaaccatgatttcatttgcttcatttagaaattctctcagcgcaggtaaaaaatatctgtcatgcctatgtatattttaagtgtcccataaaaatacatcatttgaaaatgccttccaaaacttaactattggaaaaattttagatatataccttactgtgtatagtaagataggtaatttctagtacaattgagactaaaatatttataagtatagaaggagttaagagtccttaatacagaaaaccttacttcatttttttaattaatttattttttatcgaaggataattgcatcacagaattttgctgttttctgtcaaacctcaacatgaatcagccataggtatatatatacactcctttttgaaactccattcacatctccctccccatcctacccct

SEQ ID NO: 61809 - DNA, 1769 bp, Bovine  19866880892021
  misc_feature (1)..(1): n is a, c, g, or t
nttcctcggatgatgaaatatatagccattggatcaaggtttctttaagaaattttaccccagattctcaaaatggtattaccactccttcataacaaagtcaggtatgtttcaaatgatctaaaatgataagttcaggtttgttttctgtgtattggtgtataaatcagatgttgtttttaaattatgctacagagttcaagaatattggagaaagtcatttgaggagaaaccgctttggcctttgattctctgcctaaacctgtgaatatgcacacacacacatactcacacaaaactgtgctgtgaaatttaggaatttgtgcaagtattcatccttgcaagcaacattgtgaagacaaaatttaccaagaaaaaaataaaaaaagatttaagaaaagattgatatctttccataaggaatcgagttccagtttccattatagttactatacttttaaccccatgtacaataccatttccagctgaaccattatataaactcggctggagtgtacaagaataactaacaactataatgaagatattgaatcataaagtaaaagctatctcatgttatttggactcattttaggaaggaaaggaaatgtatagtggatttaacaatgctttcacctcagtgcctcaagtgagtctgttattaatgaagaattttgtattgccaagattttactttatattttacttaataacttaattcatatctagtcactgtataccaaatcattagcttcagattggttcctgtccttatcatagctgggagtagaatcttccctgaaaccttttagcattgtacatacatctccttaatggcatatgctgatttaatcctgaagttttaataacttgtgtaattacttaaaactctcagatatttaaagatgtttctgttttttatatgtatatttaaagagtactttgttaatacattatgcacattttgttgaagaaaaatatttattaaatactttttactctcgagtcattataataaaatattttgatatttgatagctttatgttgagtcataaattctttatgtataatatataggaaatgcatattaaattcatagacttgaaagtttccaaattttgcccaattacagtagcctatatatttagtcctattttaatctaatcaatattttcctttttcacaattatagatgaatctgagtgatgatgttataaatttagactcagaattctaccaaaaattggaactttcagcatgcattggaattaagtttttatcttaacaaatatttaacaccacagaattaattttagtagactgagacatttgctcagttttaatgtctcagtggagttaaatctctaaatcaattactaataattgagatacaaatgttctacttaaaatgcagtaatcaaagtgctctttcaattcctcaaggattcaattttagtgatgttatttcaagacatttgatattagtcattatttcttttcatatttacagtcttttcccactggacattcactctgtggaattcttaaaataattgaaaattataaacccagagtaatgacatttaccatttttcatttctatagattttcagtgtggtggagctagacagtttttcctgtaattcttcatgcttaaggatactgaccaaaagttagagttccttgagagattagtgggagcactatgcctagatgaatttcacgagtaaaagagtacaacctttagacatttattttccagaaatag

SEQ ID NO: 61810 - DNA, 1113 bp, Bovine  19866881129785
  misc_feature (1)..(1): n is a, c, g, or t
nttgacattattttaatttagttagtctttaattatattttctaccataatacccctattatgatgacttggaacacagccctgtgcctctggtatttatggttcccatttagctctgcctctcccagagagtcccagtttcaaatattctgccctattgtcctcataaatgcactcacacttatcaaaccatctgtcctaaatttcagtttctaaaataatgctttggcactcttggttggaatttgaaatgcctttttctcatggaaataatattataaatgctggtaaggttcccaggcaagccccaaagctcatttaacccatagttgaatgtaacacagataatattaatgaattatttctcaattaatccaccagcctatacggatttcaaggtggacaggagttagacagcatctcaatattctgggctccaggaggtgataggctaacaacaaaggaggatcaagtactcatgaaaagcaagtcctgctggaggaaaaacacataactgatgttttgtatatgtgagttagacttttcagattataaacaaaaaagatatatctggttccactcaaataatgaaagttcattatatggattgtcagggaagtatggaaagaaagaatggatcagagagagaatcatcagagagctgaagtcataaaaaaatctgaagtgaacctgaggatagaacaatcagcacagttgagtctccagactgagcagcagctgtagagagctggttggctttatgccctcggcagcagtgctctacttatggtgactcagctattctctacattgcctcttgaaacttctcatcattactagactcatgctattttgcattaacaatgctcaagtgaaagaatgttattgttttagacagtctacatctaatgcactgaattccccttcaggccggctgtccactcaaaacactacagctttggggaattccaccaatccttaatatagtcagtggtagtgagggtactaaattagggtggccatttgtcccagacagtcctgttgatacctattttcctggtatcattagtaggatccctttcattctcaaaagtgttctgtttttattacaat

SEQ ID NO: 61811 - DNA, 1361 bp, Bovine  19866881336113
  misc_feature (1)..(1): n is a, c, g, or t
natctccagtaaatgaatacttaaaagctgaacataaaaaattaaaagtaaccatattttcacttattgagttcatctttgaatgtgacagagcaaggctgtccatcagggagacactgactctcaggtaagtgttcactccctgcttcattttctttggaatctattttcagatttttctaactcacccagcttataagggcaaactgaagtgtcagattattgccaagatcttttctggaagaaattgtttaggaagagaaatcccaaaagaggttggaaaattgcctggtgatcagaaagaagactattccagtggtaacatgaaagaataaaattgaatcttgagacgtgcaattttctataaggttgtaagttgtttcttaaagcatatctccctcttgacatttgaaatgtttagctggaactaaaattctggtagtagtaaataactctgaacctcagagtataagagaagattacatttgtagactgctttttagcaaattcacagaaatagcaggagctctggagagttagtgtatatgtagcagcattagctacttatttgtcagcattgtcccctcctcagtatgtgtagtcaaggttgttccgtaatttttcaagaaagatccagcagacaaacatagttaaacataaatgtctaaagatctgaacttgaaacatcaggcaagctttgtcactgaaagtgtcataagagttatgtagttctatgaaaggcggtcagtaaaacagttaaggccaggtcgttaaaataactatcacataaatgatgctgcacaaactcattacctcattcccttgtccttttctgtgtcaacacatttaagaactactggccttgtagaaacagttttaggagggcataagtaacttaacttagaaatagttgcctttgtgaatactcatctaaaaggagtccagtgacatatgtatgaacttgacaatggataagaaaaggaaaacagtgttgacagaggttgtctcttgttattgaaatcaaatacttttttctgcttcttaatttttttttattctctctgtatttcccagattaattatgtattattttctgataataaattattgataatgaatttctgataataaattgttgttagaacccccagcagaagtatgtcattatcttgtcattgacttttaaagacactaatctactaaacatttattagatattcaatatattccttggtccagaaagagtactatactgaaaaatgcaagattgattgggtacagcgtcatcttttgggtaatttacccctctgggaatgtaacagagtataaacaaacatgcacacagagctaaaggttccgat

SEQ ID NO: 61812 - DNA, 853 bp, Bovine  19866881425555
  misc_feature (1)..(1): n is a, c, g, or t
ntagatgtggcatgttttattcacttccaggactaacccaggaaaacaaatgtagttttaagccaggtaaatttaggccagttataaaatctaacatttttgcttcttgttgtattacccgtataatggcatttcactgctttacttgaaatatgagaataaggagaaaatatgaaaataaggatgagttgtgttttatttctatgcttatggcatagttctaaaaccctcaaaaaataatcagtgaaattgtttccatgaacaattatggaaaaagctattgaagcttaatgcctctcagtgaagcttccagaatgatgttaatttatggtaagatacatttctgatgagaattattataaaggaagaaaaaaattcatgtgagaattctagaagccctgaaggtctagaagagcattcatttgaaaacttttttctcctttttcttcctccttcaaaattttgaatggaaaatacataaggagtctcatttttacatattgtgtttgagatgagttttctcagataaagcccaactcttttaaactgcaggctcccctttaactatcacagcacagatgacacttgctacttttcttccaattccagcaaatggagagaatctaagttttcagttcagtgcttcaaaatttctatatcctggtacaatattttaattttcaaggactggctatactattggatggtgtttaaaagattttttcctacaagtagcatatttccagtagcaactattttcttcttgagaaaccacattaacgtttattcacaaatgatttaaagtttgaaacttacagtactgtatatccaatgacctatcttcatgtgaaag

SEQ ID NO: 61813 - DNA, 1505 bp, Bovine  19866881655357
  misc_feature (1)..(1): n is a, c, g, or t
ngtaaatgggtgcagccaatgtggaaaacattatggaagtctctcaaaaattaaaaatagaactacttatatgaaccaaaaattccatttctgtgtgtttgtccaaagaaaataaaaatactcaaaaagatatatgcacctgcatgtttgatacagcattatttataatggctaagatatggaaaaaacctaagtgtctgttgatggaagagcagataaaaagttgtagtatttataaaatggaatattatttagccataaaaatagtgaaattttgccatttgtgacaaacatgaatggactttgagaacattatgctaagtgaagcgagttagataagtcggatgggaaaagaaatatcttatgattcatatatgtggagtctaaaagaaaaatagaaaaaaatatatcaagtttaaagatacagagaatgaattgaaggttatcagagatgcaagtggaggagtgagaaaaaaatgagtgaagggatgaaaggtaaaaaagaaaacatagcattaaaaagcaaaacactaacacaaattttgtaaacctcaaacaaccaaacggatattactaaatccattcacaaaaagtccttaattttatgtctttctaacaagtttgattagctggtttcctaacccataataaattactagttaaaaaacattaggtttaaatcttatgttttgattttatagtagcacctttgaatatgtggtcccctgtctttattgctgtaatctattttgatattgaagcatatttaaatatggtggtggtgtatctcactatgtatagtgagtacaatttgtagtattctaaatttctaatagaacatttaaaattataatagaacatctaaaattctaatagaacatttcttaatgttctttattcactagattttatttatatgttttgatgtttgaggttttgaaagataaatagagttgtggttggaatttgacagtgtataaggctgtaatctagagaatttaaccagaaacaaaaatactaataaattataaactagaatagaaagagtatggtcagcacattttttggatttgcttttgttcaccattcattttggcagactcataagtgatatatgtaacctcaaaacctcaaaaaccacatactcaaatttaatttgtaatgacagtcagtagaaaaattaaacttatcccaagtttaatttcttacctccagaaaatcagcacctctcctatttccccttaggacactaatgaaatagggcacataaggtattttgtgaactggtaaactttaacatctatccggttattttcttttttgagtcacttccaaacatgtgtctctctagcttcttctgtatactgtagtttgtttcaggtggtcttatatttgtttctgcaacaggaatttaaagaaaggaactcaggttaataaagggtaagatcatgccaaatcaatcattcagacattccactagtcatttcatcatcaattatttaatt

SEQ ID NO: 61814 - DNA, 4048 bp, Bovine  19866880341845
  misc_feature (1)..(1): n is a, c, g, or t
ntgattgttctgtgagagacatctacaaactgtgactttttctccactaacaactgacatagactctatgtaagcaaggcttccctggtagctcagatggtaaagcgtctgcctgcaatgcaggagacctgggttcgatccctgggtcgggaagatcccctggagaaggaaatggcaacccactccagtattcttgcctggagaattccatggacagaagagctgggtagtccatgggatcgcaaaaagtcggacacgactgacttcacctcacttcatatgtaagcaaagttagttcttctgtcgtctgttcccatagccctgttaggacgcttttcttgtgttgtatcttgtttcaactctgactctcaaactatccaatgtaacaaacacttatccagtgcctctgtttggcagggactgtgggctgccacagagacttaaggaactctgatgtgtctccgaacctcccgcttggccagcacagtgcagcttgggaagtattagttttgagtactgtttttttttttttttttggcttccctcatgactcagatagtaaagaatctgcctgcaatgcaggagacccgggtttgctctctgggtcaggaagatcccctggaaaagggaatggctatccactctagtactcttgcctggagaattccatggacagaggagcctggcgggctgcagtccatggggtcacacaagaggtggacatgtctgagcaaccaacactttcacttttttcactgtgtttttgggcaagatgattctccgtgtgaagtgtgcaagtctagatacctaggtttctgttatgtgtgttgttcttacatatgtgaccaacaggtcttgtcccctttcacccccttttgtggttgatggttgtataagtcagggtaattgaccctagcagctataacaaacaatcccacaggtctcagtaatatagtacaaaataaaagtttattcctcactcacactgatttgaagtgaatgttcctggtcaagcagctcttctgggcagctgtctactaagacagtgatttgagattcaagtttcttctttcctgcactctaccttgtcatctcgatcagatcctctgcatgcagtcagatgacaacgagagagatgaaaatccacctatctggaactttatcagctcagccagaggtgacacacaacacttctgctcaagatcttttgatgaagactagttacatggttcctgccacatgcactaggagcagagacttgcgggatctggctggaccactgcttgccagcagttactcgtcatcttggaaggagcatgaatttttggctagtcatccctgccaaaacagcactttaggataattaggcatgaaagttatttttccttataaaaattaaaaaaataaaataaattttaaaaaaataatgaaaagtaaaaaaaagaatgattgtttggcttacaagggttttattctgcaaaatccagaagccaacctgttactaagaagatatattcacaaaaaatgtttaagcaatttttaatcccaagatcctctgtaaccctctcaagatctccatagctgcttgtctaggtcaccaccatatgggagctggaaccagaggttacaaatagagaaggaggagaagtgagagatcgaggatgagatggttggatgtcatcaccaactcagtggatatgagtttgagcaaactcagagagatagtgaacagggaagtctggcgtgctgcagtccatggggttgcaaagagtcagacatgacttactgactgaacaaacaaacctttcaaggctgaaagagagcttgatggaaagacaaaaaaacgttttgtgttatcctctgggaggaagattacctttttttctggtcaaggtcctctttcttttcacatttctaggcataacagagcataaggacaggtcacagataaaagtgtgctccctgtaccagaaattctgagctgagaaagacaggtgactatataagacgtttggtactaaaggaagaagcagtttgaagaatcagctagagatgaagatgaaggcctgccctcctctggttctttccctagcccaggaagaactggatttgaggcctctggtgtctaccatactttctttaaagcatgagacaaacatcagaggagttctggtctgagatgtaggtgaggcataacctacaggtaacgacttgtcaatgatatatgttaaattgagtggcaatcagactgcagagaagagtgtaattaaaacttagagatagttctaagacctgtgcaaagacccgaagcagtctgttttggataaaaatgaataataatatttcactcttccatcaaaacatggatgtaaatattcctcaagtctcaaatcctacccaaccagcccctttgtgtagacctaggggagagagggaaggagaagggtgaggttgaaggctgtctggtaagttttatgggataaaccagctaactagtgagaaatgggcctcctagaggtgagggggatcccgcagcacagtatgcaccctccaccttccctggagctaccaagacagagaaaaagagggaggggccagaatagatatttatcaatatctttatttatttgatataaataaatatcaatcaataaatatcaagatatttatcaatatcacagcatcatcaccctcattgctgaaccctggaccactgacttatgggttttgagattctccttgaataagtacaaggctgatccgagataccaggtggggattagcctgtaagtaggagctggaaagctgtagctacaaggggtttaaaagaggagtttagtaggcattacgttaccatcatcagagaatgcaggaacctggcgtggttagtgatgtttgaactaaggttattaaactgtcttctaggccagtgctacaaacttagtgcacgtaagaatcgtcctgggagtggggaagagagtgtactaaagtgcaaagtccctgggtgctaactagaaaagaggcctgggagagaagcagaagtctgcatttttaatgagcagaaccaggtaattctcatatagatgctagaggcatagcggaaaatagctgttgagtcagaggctacagtggatttgacagaaataaaaatgatttgtatcaccatccaggaaaaagtaaaatttttttatttctaaacggaaaacattacttgatataatcttatcatagagctttcaaattttgaatatgtgtatttcattttttggcagtgcacattttacattttaaagcacatctattttttactttttcgggctgattttgcgtcttgagaaatctgaatatcaatttatttttttaggtgcagttgtgttgagtcactgcagatgaacgtttccaacatgacaggggaatcatgggtctttattgaaacaggtggtagaagaacaaccactgatcctataaatgcaaatagtcacgacaagattgttctgtttaactaaaacatgtatatgaattcaaaggtagtagtgattctcattaaattggcctacaatcaactttttagaaactcgtttttaatttgaaatatttctttatgcagggagaatagcacaaaatacttcaaatattagtgtttgtaggactaataaaattctaaacagaataaaatagggacttccttagcagtccagtgttcaggactccagtcttgcaatgcagagggcatgggtttgatccctggtcaagaaactaagatcccatatgcttcagggcatggccatttaaaaaagaagaagaagaaaataacaaaagactctgtgagttgaaagcgatcttgaaagtaaactatcccaggctctcatttgatgcttatcagactgtggacatggaagtaatgcaggccttgggaacgtaagacctgagtttgaaagacccgagctttgccaccggggcagtagttgtgtaaccttagacacgtgacttaagatttctgggccacagtttccccatctgtaaaatggcacattggccactgcaatct

SEQ ID NO: 61815 - DNA, 3150 bp, Bovine  19866880369022
  misc_feature (1)..(1): n is a, c, g, or t
ncagcagaaagtgaagaggaactaaagtagcctcttgatgaaagagaaagaggagagtgaaaagctggcttaaaactcaacattcaaagaacgaagatcatggcatctggtcccatcacttcatggcaaatagatggggaaacaatggaaacagtgacagactttacttttttgggctccaaaatcactgcagatggtaactgcagccatgaaagaaaagctctaccaacctagacagcatattaaaaagcagacactactttgcctacaaaggtccttacagtcaaagctatggtttttcctgtggtcatgtattggatgtgagatttgcactataaagaaaactgagccccaaagaactgatgcttttgaactgtggtgttggagaagactcttgagagtcccttggactgcagggagatcaaaccagccaaacctaaagaaaatcagtcttgaatattcattggaaggactgatgatgaagctgaaactccaatagtttgcccacctgatgtgaagaactgactcacttgaaaaagacccctgatgctgggtaagattgaaggcagaaggagaaggggacgacaggatgagatggttggatggcatcaccgacatgatggacatgggtttgagtaagctccgggagttcatgatggacagggaagcctggggtggcaaagagtcggacatgactgatgactgaactgaactgaactactaccttcatccattttttgattcaatttattcaggctctttgagagactcacacacctgtctctatgcctagaaagtcagtctgatgaccagagtcgtgggagggaggaaccttgacattcacagccattctgtcctcttgtgccagtccaccttatcatctcccaaggagactttcgagttgactctgtcaaaagaaaatgctccaataggaaatgaatgcgtggaaatatcccttacaagacttcgactttttaaataaattttgtatgtcattcaagagctaatggaataacaacaaagtataccaatcagctaagtccaaacttcagactaaacatactatgtcaactgctgtttgcatgggactgaggaacatcactctttaactggagagctgagaaaggtaacagttcccacagacatctgattcagaagagacggtgctctcccttttaatttcattatgtatataatatgtatgctaagtcacttcagtcgtgtccgactctgtgcgaccccatagacggcatcccaccaggctcctccatccctgggattctccaggcaagaacactggagtgggttgccatttccttcttcaattcatgaaagtgaaaagtgaaagtgaagtcgctcagtcgtgtccgactctttcacgaccccatggactgtagcctaccaggctcctccaatccatgggattttccaggcaatagtactggagtggggtgccatttccttctccagggatcttcccaacccagggatcgaacccagggtctcccgcattgcaggcagatgctttaccatcagccaccagggaagataaagtgaaagtaaaagtcacatccgactctttgcaaccccatggactatcactctagtccatggaattctccaggttagaatactggagtgggtagccgttcccttttccaggggatcttcccaacccagggattgaacccaggtcttctgcattgcagtcagattctttaccacaagggaagctaatggatatgctaatggaacgccttaactatttgattatttggaaactaattggaagcagtatgtatgttctaaagtacattaaaaggatattgagaaacatgaacttttgaccattaagggactgttttcatctataaaataatgagggttagtctaaatgagcttaagctctgacatcgagagtctctgattatccagcgtgtgtttctctgggccacttaccttttgttcacctattatagcaactttatttgttggcagtacttctggaggctacaggcaatcattactaatgtcatagttacctcaaagtcccaaagctgcttactcgcattggaatacaacgtctgttgctgctgctgctgctaagtcgcttcagtcgtgtccgactctgtgcgaccccatagatggcagcccaataggctcctctgttcctgggatcctccaggcaagaatactggagtgggttgccatttccttctccaatgcatgaaagtaaaaagtgaaagtgaagttgctcagtcgtgtccgactcttagcgaccccatggactgcagcctaccaggctcctccatccatggattttccaggcaagagtactagagtggtgtgccattgccttctccaaatacaatgtctagtactgccaaaactcacatctgccaaagcctatgcgttagctgcctccatggccagagaaaaaaatgaactctgtctccctctgttttccaaatctggtgcaagtgagtattattggtagagcctaaattatatatagaccctggtagcaaaaaagtttgagtaatatagttgggtaaaaaggctttcatcctttgttatacagggaagagcgaaaagggagcaggaagagactgttgccagtggagaattccacacagctggcaaagtgggctttatgaaaaataggttaaatcattggcctaaataagttttttgtcttatcttttgacatattttttcatgttattctttcctgttcattagataaataagcagagagttaactttgtaagggtgcttggtgttctttaatcttacagaaattttagtggaagataaagaattttgctttaatttcatggcttttgaacatttggagatttgtagtttaaaatcttatctctttctctgctatgttgggtacatatatttttagtagggagcttagataatggtaaaaaaatgggagtcttagctattacagaaaaaaggaatgacaagcgataaatctatgtttgttaaaggttaaatgaagttcttggttggttaaggggaagaagaatcattctgctgccttctgctgttgttgataccaaagcatataaagaaattcatcctggttttggtttttagtatacaaaacctgtatctactctggcttagtcttctttg

SEQ ID NO: 61816 - DNA, 1464 bp, Bovine  19866880371191
  misc_feature (1)..(1): n is a, c, g, or t
nactgaactgaactgaaagttagtttaaatagggaacaatccaggaattgggagcagtatagaaaatgtagcaaatgcttcactattcccttgataattccttatttttccaaatcatatattgaatgttaaaaaataataaatattctgcttaagaagagacaattttgcaatagattgtgccactttgttacaaaaaaagaagggaagactttttcactgtggatctaagaaccatattggactttttaggactcctcttacactgggctcatgtatttttattagaaacaaagcagacctaataaggacggagggttaactcttgcaccaagtgggatatactctggactgtcaggcatacattaaaaatctgtgttccatactttcatctgcactggcggatataaagcaaaactaatggacctctttaccccacaggaaaaaagtcaagatatataaacttatgattgaatcatccctttgttcttgtctccatccttcaacagctctgtcttctgcactagcaccagtgacctattaaaataaaatacatatccaatcctgtttctcacttccttaaaactcttcagtggctccccactgccattgggataaattccaagctctttgtgaaccaccccttctcatctcttcagactcataaccccactttccacttcaccatggaacttcaacaaccccttgcacagactgttgcctcaggacttcatgcattgcctaatgcttatccctctctagtatttcccctacctctgacctggctgaagactccttcagagttcaccttcagtggcatttccttcagacagccttcttcaccctctcctcacccccccaccccccgccccccaggccagggaagacactccttctctttgttctctttacgccataggcaaacccacacagcacctatgctgcctgtatctgtttacattgctgcctcccttaaatgccttgatccggggccaggtcttactcatctctttttccagcacccagcacagtacccaacacagaacagctgttaagtaaatatttatgtaactgaatcatattgatcatatgaacaaactcccactgggagaacatctgccttgcttgccttatatatctcagaaaagcccttgtttattacactctattaattgagagctgctgtactacatattaaattggatattttagtcctgctttaaaaataaaggttaaattgagtatattcacagctctgttaagattacatagtgcctattagtgcagaaacataggtggtgactacattttacagttgcttgggatgtgtgatgcccggctgcagtccagcatagctttctgtgtttggtggtattttgatgagatgagctaatagcataaaagtagcaagtcactgttggtctgtggaagaggctgagtggcaagccgtctctgctttgatat

SEQ ID NO: 61817 - DNA, 3469 bp, Bovine  19866880373339
  misc_feature (1)..(1): n is a, c, g, or t
ncattttttttttgtattttgctagagaaagcatttagattaaacattattgagctcaaaactatatattgtcttcacatacagtatggtttaattgcaatgacaacagattgaggggaacctgaactttggtttcagctttaccacttattcaggcttccctggtggctcagatggtaaagaatctgcctgcaatgaaggagacctgggtacgatccctgggttgggaagaccccctggaggagggcatggcaacccactccagtattcttgcttgaaaaatcccccatggacagaggtgcctggcaggctacatacagtccatggggtcgcaaagagtcggacacaactgagagactaagcacagcactaccatttattatgtgaccataaagaagtcacttaatcctgtgtaaaaacagtggactagaacagacaagagacagcaaatatatgcctaatgtgcctttaacaatttaacaaggctactcaatggtggccctgattcccacagatcctggaatgatcctcaggatcctttccaacgcagaattcaaggcagatactaccagtcattaggactgacacaagctggaatcgttgtgaaagtctaggtccagacaatctacaatatgtggagacaacatgtgaaagtgttgtaagaatggggaccccttccaggccctgagagtgggttcttgtcttgtctaacactcagaaataaatgtctgaggaggcacacatgctgataaagcaagagactttattcagaaggggtaagggaacccacggagaactgctctgcttcatggctcacagtctccagttttatggtgataggattcatttctggttgtctttggccaatcattctgactcagcgtccttcctggtggtgcgtgcattgctcaaccaagacggatgccagtgagaaggattctgggaggtggtaggacacctgcttctccttttgacctttcctgaactctttaggttagtggtggtttgttagttccatgttccttactaatacctcctgtagtaaaataacccactcaaatggttactgtggtggctggccagggtgagaggtttcagtgtatttccccaaacagaagtgctttgtaaactcttctatgttgtacaaatttaaggtgctattattgttatcactgttcattacttttgttacagaaaatttgtgaagattttgttcaggatataggaggtgctgacaagtttgtatgttgccaacaaggcctatagctattgtcctaatgatatacaccaaatgctcttggcatttttaaagtgagagtagacaatgaaagcggtttcaaaatgcagagcaaggatcaccttggactgcctggggaactactggggagacatactgacttgggtttgcagactggcttcatcattcaaggtgtaaatactggttttgccattgaacatctctgagcctcagtttcctcatctacgatgtgggctccatcaatctcctctcaaggttgtggaaaatttaaatgagtttaacacgtatgaaataaaaagtaaaaaccatgattcataagttgtactctgtaaatgttagttcctaagggtggaaaactggtttataatgagtactttgggacttttgactcactttctattttagcaaaagttttgtaatctttaagagtcagaaaacattttcagtcagaaacattattattttagggcaagatgtactcccttggatcaccatcttcctttgaaacaaaggtaagagctggaatataagccctccctctttaagattttcctcctttaccaatgagatgttacaatttcttttttacataaaacaattagaaatgttcgaggaattataactcaatagctactaatgctttgtggatgacattcaataaggggaaaatgtgatgactcaaaataacatacttctaactctgtgctaagatttgaagcatgcttgatgatgtacatgagaataatgcaaagccctctgggaatgtatatgtgacacttttcagaatgatctgtgtcagagttccaagcaccccatatagaaggcttctaatgctcaaaatccaggtaagtctcctatttccaccagaaagattagatttcttttgaaactgtaacctaagcacctttcttttgcctccaccactatgcctcttccttccacctgacgctttgccaagttcattgtcaggacatattccccctcctatttggagtgcaaagacatttaattatcctagaaggaaaatctgagagtacaagctgtacacagcaggttaagattgttaatatataacttagctaaaaatctgtttatttagagtagcttgtttcacaattcttgcttttgtggtagcccatttgggagcaaaacttaccttctccaaaagcaatggtctgctgtagatcaacactgatgaagagtcttaaggtccagaagtatctgttcaatttgtggggtttcctaaggattaagggaaaacattcttgagcattttgttgagtacattttaaaaaatgcctctaaatggatataatcaatccctgaattctaagcctgtggtaagcaatctttttgtggaagaaccaatataagtgaaaatgaaagtcactctccagtgtctgattctgcaacaccatacagtccatagaattctgcaggtcagaatactggagtgggtagccgttcccttctccaggggaagaaccattataaaaacataaaaagtttacagcccccacttcttattttttctacatgaaaatgtcttttttcctctttcctcaaaaaaatggtataaactcagaaaaaattaggaccactttgtagtcaatagctatgaatatctagacccattaaagaagcagccaagtagggatctttttcagtctttttattaaattaaataaaagtgcaaggcatgcggctttaagttagaaagagctcatcacttttctaagggtatatagttttttcttttaatgttgtctcttctaaattattatggtgggccaataacatgattgtatacctgagagtcataggagaatcacttttaaaatgatttcaactgaattcaatatgaagactagtttaaaaatatatttaaatgtgtgtgtatatacatacacacatatacatatatatgcatatacacactaatgtaaacacattgatctatatgtatgtgttgtgtaaatatgtatataagaagcttacctctgaaagttgggataattctaaaataatttttatacatagggaaatagtcatttccaattagtcccttctacttagaaagacttatggaagcaggagtggtaaaagaaaaacagaaactttaaatcctcactactctttgttgctaaaatgtgagacacagaatagatggcttttgttttatcagagcttgtaagtgtatctttggatgtg

SEQ ID NO: 61818 - DNA, 1011 bp, Bovine  19866880521267
  misc_feature (1)..(1): n is a, c, g, or t
ntgattttcttctagatgatgaaggtcctgtacctgttttggtttggccctctttgcctttctttctatatgttggctggatatttagtccttcacactgaaatttcacctgtggataagacaagcatcaattccctgtaaatataaaacagaggaatacctaacctgtggccagtgtactttctggaatattcctgaagctctcatcttttcattgactatatagcaaagagaagctcctgatcctgcttattttccttttatggggctctcatagggcatccttattaaatcttataacagtgaataatatcataaaatgtaaccaatttcacttctagttcaaatttcatgtttttagggggtaacttcatcatggtagtaatctagtgatattctcatgggaaaattttgttaattcacagcatttgagaatgaagaacacagaatcgtatttagattagcttgtattttaatgaagggaaaatagggcatctggttctcgaagaatttatagctactttaattgcaaattatgtagaatgatttagcatccctttgttcctgcttaacagttatcgtatccaaaatatttattgagtgccagctaagtgcaaagcattgttaaaagtgctgtgggagttttaaagctactagtagtcttaatagtagcataaaaaacatttaatcatttaacccatttattgagccctttaaatgagcctaggcactcttctaatccctttagatatattatcttgtttgatctttagaagacttgcctacttactgcccatactttatttttttacctctctctcatcttaaactgatttccagccccatctttctgccagaatgctgctgctgctgctgctaaatcacttcagtcatgtctgactctgtgcaaccccatagacggcagcccaccaggctcccccgtccctgggattctccaggcaagaacactggagtgggctgccatttccttctccaatgcgtgaaagtgaa

SEQ ID NO: 61819 - DNA, 1243 bp, Bovine  19866880654827
  misc_feature (1)..(1): n is a, c, g, or t
ncagctgtcagtcaggacctcagctaggaacctacacgtagctttcccttggaactgcctgggcttccctccagcagggttgttggatttctaagcgcgggtagccctagaactcggtggaagtttttaatgaccaggcctcagaagtcacacagtctgcccagtttcaaggaataggagcagaggcctcattctctcatggcaggtgcaacaaagtcacgttataggaacagcatgttggatgagagacaatgtggcaactgtctctgggaaataaagtctgcttcaaggatggaataatccatgaccaaaagacatcagcaattggcattagtacttctctcatatatttgaattctcctttgacaacggtgggattgccctttcacaccctcccaaagtcagttaaggcctgatgacgtgctttggtccatgaaatatggatggaagtgcaggaagcacttacagtcaatcctcatgattcctagattccatacttgcaaattcacctacttgctgatatatctttgtaaccctcgcatcaatacatcactttctggctcatgggtggacgtgtatatgcgtagagtggtggaaaaaaccaagccaccaaagacacattcccagataaagtcgaacaaggctaagctctgttttctacttacaggtctcatacattgtccttctcatagtttatttagtggcacatttttcacatttttgtgctttttgttggtgattttgctcttttaaatgcctctcaggcatagtgctgaagtgctataagtgctcctaagagaaaagaaggatgggatgtgccttttggagaagacacagaaacttcaagaatgcataagttacagtgctgttttttgtgagttcagtgttaataaattaacagcatatattagggacttccctggcagtcctgtggttaagactccatactcccaatgcaggggcacgggctcaatgactggttgggaaactaagatcccacacactgcacagtgtggcaaaatagattaataaaagcagagtttgtcagaatggattttaaaaaggctacatattgatgaaaatataaccagaggttcagaggaacctaagtctgtatttcctgtagtaccaatggctcagtattcactagctcaatgtccatggtgagtgtatagaacatacatagctgccatgaataatgagagatggctcaaattcctgctgcaggattctcctgtgcttg

SEQ ID NO: 61820 - DNA, 1354 bp, Bovine  19866880674144
  misc_feature (1)..(1): n is a, c, g, or t
nggagaaattatcaaactagattttttaaaagggaagactcaactatatgctgtttgtaagaaatgacattttaaacgtaaagacacagacagatgcaaaataaagggtgaagtgtattttctgtgcaaacactaagcattagaatgctgatgtggctatgttaatcaaacaaagtagatagggaatattacagaagacacagaaattttgtgttgagagaaggagcattaaatcaagttctaacaattctaaatgcataggctccaaataacaaagtttcaaaaacatagtgcagaaaaatgacagaaccaaagggaaaacaaatctacaacataactggagattttaacatctttctcacttctatgtaaatgtctcactttttttttctgatcataacctcgtgctaagtccacagagctaaaaatgttgacgttcacagccaaattttcataagtcccgctatttattggtgtaaatcttgaataggtaaatggcatgttgaggttctgtttgcctgctgtctctgtaagtcactcagctttctttaaagcctacccactcatttctgagtctatgaaaagaagtctgacttttttcagacttctgtgcttatttcatatgtgccaaagtagcaaaatcatttaaaattcatcagctatttaatctgtttattttaacatttatattatccactagctgtagtttaattttggctttatttgctacttcataagcataacagtaagtataatattttattatttaagtatctttttcttttcattttatgtgtgctctttttacttttgtttaatgcatttttgagcacttactatatttaagacctacattagtttttcataaaataagacccttgacttgttacagagccaggaatttgaaaccctctgttcatccctgcatattggttccatctaccaccaaacaaaatcgttccctcttctcttcccttaaccctttgtatattcttgtgttttagcattatactgtattgtcttcccagttacactacaagcttcttgatggcagaaatcaaattctgtagcacctgtacatgtagtaggcacattctatgaaagtttgagtgctgaaggaagaatggatggatatagtaacgaacaaatgctagtaatcttgtgattaaagttagttaagtctctgacaaggtaatagtaaagtcaattcctaatgtgctcttgaactctgatagtcttataaaacttttttgaagatcagtttacaaagctgccagggtatataagaagacatagtgcaaagcagatgctaagtgggagagaagtttctaccataatctgtgtagatcactaa

SEQ ID NO: 61821 - DNA, 685 bp, Bovine  19866880756719
  misc_feature (1)..(1): n is a, c, g, or t
ntcctttcacatttataatcttagttccgtacataagaataaagtatccctagttttactttacacatggaaatattgaggcacagagaggttaagtagcttgtctaaggacacaaaaatggtatgcagtagaaatagcaataattgaggtgttctaatttaatacgatttttttatttctttacattctggtgctgcattttagatatatatgcagaatatttaaatatcaaaattactctgtttctccaaagccaagtatgttttgttgccaaatctgctggccagttttgctggagttattatataacaattaaaatattttgtttgttaataacctgactgtagcttaagtgctttattaggttacactttcataatagtaaagaataacttaatggtctgaaagattacagtatcacttcagatttgaaaccaagggaatataataagtagactttgagagtttctggtttctttttaaaacagttgaggggaaaaaaaaaatctttgctgtgtcttgaaatggaagtactttagccaaaatagacaatattttaatgattggtacgctagaacttctcatagagaagaatggtttttgtgtctgtgtaaatgcattttataatgcattctgtatagggcatgccagattcttgagatgagaaactttgatctcaagctc

SEQ ID NO: 61822 - DNA, 1149 bp, Bovine  19866880774909
  misc_feature (1)..(1): n is a, c, g, or t
ngtgggttgtggagacagtggagaactcactggctggaagtgaaagtgtgagtcgcttagtcgtgtctgactctgcaaccctatggactgtggtcaaccaggctcctttctccatgggattctccaggcaaggatactggagtgggtagccattcccttctccaggggatcttccccaacccagggatcaaactcaggtctcctgcattacaggcagactctatactatctgagcctccagggaagcccctctcctactggctaggaagtcaccaagggaagagtttccagccaggcaatcaccatccctggggacatacaaggagtgtggacctacctgcggcctgtattccacccgtctgtggagagatagtggtgggcagctggctaagtttctggaggaactgtccctgtcacctgagtggtagaggtatggggaccctggggagtacactcctgtggcagtggggagatggggtgctaggctcagggtctgtggacccatgagcaaggtcaaggctgcccagagccagtgtggaagtggaccctttgctcagactctggggcattctgcagaaattgagcaagacccacagcttcagaactgatttctccacgcggtaagaaatgaatcttctactctggggtctgcttgctcccactgtgacagtgaaagggacgaaaagaaaaacattctttcctcccaccccaacctctgtggctcaagaactgtcttcttgcttagcttcctcctggccaaggttcgtgagattttgccctggggtccatgtgactggctatttccttgttattactctggggttttttttcacccaataagaattccttgctatatcacggcctgatacacttactacaggatataactgaggaaactttctttaccagctgagctaccagggaagcccaagaatactggagagggtagcctatcccttctccaggggatcttcccgacccaggaatcaaaccagggtctcctgcattgcaggcagattctttaccatatggacatataaatacatccataaatgtatagttactttgcaaagagtcagacatgactgaacgactaacactgggggaaaggtatgtttatttaaagacttcattaaaaaaaaaatttta

SEQ ID NO: 61823 - DNA, 1961 bp, Bovine  19866880868751
  misc_feature (1)..(1): n is a, c, g, or t
nagcgatttacctagtcagattccaaaacatccaaacatttttagatttcttcatatttaaaaaaaaaaatttcagctttatcgacataagtaatacaaaaaaaagatatttaaagtgcacattgtgatgacttgttttgtatatacatatagtgaaaggattttctcattctagttaattaacacattcatcatctcacagactttctgattttaattattttcaatagtgctgcaaagaatggcagtttaaaaaatattttggcatttttccaaaggccattttcccagaagtgaaattatgatggcatagacatacatatttctcaacttttaatagtagttccacattttttcccagaacaattgttttagtttacacttcattcagaaatctatgagaatccatttaatcacattctttttcctaatcttaatagacaagaaatggggtcttattattttaatttgcatttctttgattttcagtgtgtctgaacattactctggttgtggcttataaacaggttggaaggagtaagactgggagcagaaagttgagttaggctcttgcagtagtcatgatggcaggtgaagatgacttgggaccaaggtaagggttaatggtagtgaggtttggatatttagcaaagagaactggaaaaactagatgtggattatgaaagagagtaaggaaacccaatgatatctagatttctggcttgggaggtgctatttcttgaggtagaaaataagatgagaagaattttagctggaatggagtagggagatataagtttgggtgtggatattttgagtttgaggtgcctgtgggacacagtgatggagtggtcagaatccgttggatatctggaaggagaggtatgggttagaactagagacatggcctcaagctgaactgtgctttaggaaattaactggaagccatagaagtgtttcctttatttactgaggccttggggcctcatctcgatgagatgaaaattatctttttgtcactggcctatttggaacctcctctgtccatgggattttccaggaaagaatactggagtagttgccatttccttatctaggggatcttcccaacccagggatcaaacccctgcctcctgtgtctcctgcactgcaggtgaattctttacctactaagtcatcagggaagccctagaacctcatttatacttcttcaaatgtccttatctaattttgatttgctactgagcagggcagcttcagccctccccaggagcagtttccagcaattcttagcatgtttggcttaagacagagttgctaccctcctgaatctttacccttgctggggaccctgcacttgatacagctaaaggacaaagcaggcctgaggtttaggttctaaccgtgtgagtagcagtgataaccactagggttctcggccttccccaatcaatagaaattgactagaggccagacaatggcaccccactccagtactcttgcctggaaaatcccatggacggaggagcctggtgggctgcagtccatggggtcgctaagagttggacacgactgagcccttctctttcacttttcactttcatgcactggagaaggaaatggcaacccactccagtgttctcgcctggagaatcccagggatgggggagcctggtgggctccagtccatggggtctcgaagagtcggacacgactgagtgacttcactttcacttttcactttcatgcactggagaaggaaaaggcaacccactccagtgttctcgcatggagaattccagggatgggggagcctggtgggctgccgtctatggggtcgtacagagtcagacacgactgaagcgacttagcagcagcagcagcagagggcagacaagaaattcaggcaaggctttattgggtctcctacagcagcagggggaagcaggaacaaacaacag

SEQ ID NO: 61824 - DNA, 1546 bp, Bovine  19866880948983
  misc_feature (1)..(1): n is a, c, g, or t
nactaccctattatttagagactgagaaatatttggatggtggtaatgtgctgctctggaaaaagcagtcgccactgggacttttatcacataattagagggtatgctaaatgtgctcgtgaacagaagctgctgtgcactgctgccttctgttaatgtggaccaggggtcctgaatgttttccctgagtatgtcctccaacagcatctttgcccccttctctcatgtgatgctgcctctggccagcagaaattctgggaagtcctagacataactccagtgccacatggccttgcatgcgtactcagtcatgtccgactctttgtgaccccatggactgtagcccaccaggctcctctattcatgggattatcccagcaagaatcctggagtacatttgccatttcctcctccaggggatcttccccacccagggatggaacccgcatctcctgcaactcctacattggcaggtggattcttttaccatggagccacctgggaaatccaccatatggccttagggactgtaataaaatgaccatctaccaactgggcacctgtgcttttcaagcttgattctggccagccaccttgcatgtaaatcttctgaaaggaggagcaagctggaaagctggacagtggtaggaattgggaagatccctagttaggatgaggaagaagcagagctgttcagctgcttcttggttgactcatttgttcatttatctgtccattccatcgctcagattcctcatattaagagtggtaatactgtgtactctacagggctgtggtaaggattgaatgagttcttgcagataaagtgttaagcaaactatctgacatggagcaaatgctcattaaatggtagttcttgtttttactgtcattttctaatgacttcattcactaatgccatatcctgttcaaagccttggtgaacagaggaaggagatccagccttggcctctgcagctggcagggattcaggagatcagaggtgctctttcgcctccagcaggtgtgcctttctcattgtgagcccagtgatgctactgctgtcccttaacacagcctgctcgcttgccggggcacccccagcttgcctatccaaatctcatctttcttccaggaccaagctgggacccatcttcttcctgattaatgctggcttacaggcgtcacatcttttgagaatccggcagcatttatatacccaatttaactttggatcacatccctccttgtatttttatggttgctttatgcagccttgagagaagatacatgtcttactcaaccttgattcttgaatggttataacagtgcctgacacatgcatatgctcaataaatattgaattggatgaattctaattcaacttaaccaacatttattgagcatgtacttctgggtttctcagcctcatcactggtatcattttggaccagatgattcattgttgtggggccattccgtgcactgtagaatgtttaggagcttcctgggcctttatccactgtatgccaatagcacccgccag

SEQ ID NO: 61825 - DNA, 690 bp, Bovine  19866880992419
  misc_feature (1)..(1): n is a, c, g, or t
nggtggagctgatgttaaagtgagggctctgaggtggagacaacatgacttttaattgtatttcttcagaaacaacttttgagtggagtgtgccctgaagtgcagacactcagagatgtgtcatgtaaatctttggggcccaccagttgtggggccccagcttgaccttcctgggccggtgactggcccctatgctgaacccacggctgtttgctcgtctcactgtgagctgtctcgccttactgagcagcacgcaaaagccgttctgtttcccctgccgctgtctgtctatctcctcatgactctgaatcagctgtcatgggagttgactgtgactgagaaccaaaattaatccactttctctggaaattagttctttcaggcccatgtctgtcacattgctgtgctttctgaggccagtatctttccgtgaagtccttgctttccatgagcgcatttttgcagggctccatggagtgcctgttccactctgtaattgactgggtatatttatgccacttgtaattacctcgaggttgtcgtctgctgaggctgtggcggcggctcctctgggggccctccctgggcattcatacccaagcctccctgcctgtgggatgggaggtcagtgttatctggatggtagggcggggggcgatgtacccagatggttccctgacacaacttcct

SEQ ID NO: 61826 - DNA, 1117 bp, Bovine  19866881005511
  misc_feature (1)..(1): n is a, c, g, or t
ntaacctagcaaactccagagaatggtcatatcctagagctgaaaaaggctgccttgccaacatgctggttatttgctctgcttcatccctggctaccttcacgtctctaaaaccccagtgtgctttccaaaggtcatgaaatgtgagcacttgcttcctggtgacctgtgcgggccattggaaggggtttttcttaaaccttctccctcttggattagacctggtttataaactgtacatcccagcatgtgtgattcctgcattacaaggtgcgggcagaactagtgttcttgcttagaaggctagaaggtcccgtcagcatgtgggctaggcctggtgggcaggcaccagcgtggccatggaagagcagatggttccagtgatgggagctcctgccacgtgtgggctggccctcctggccacctgcaagtaatgctcccccaacaaggttcttatacagaatcttctgaaagtagacttttccctagtgaaggaagaggagcctacaaagtcaagagacatctgaactcacctagcagttgtgagagaattgtgagagaagtgggagtcttccagccccttctaactgctagagtggtgagtgggaagggacagtctcttacatgtatataatcattctgtgaagcagatagggtggcttcattatgtattcaaatgcagagagctcttcataaaacatgctactgtgtccttttactgtgagtggaaatacagccttcacattaaagaggagtaaaggataaatcaaaatgttattcagccctgaatgtgccaatccataactcttactcaacaatttccttgcagcagaaaccatcactccagctcggaccaaagatgatttggcccagttcttctctgttgctatggggacagagagatgatgatgttagcccttttgacgctaacttacctacattaagagtcaattcccttcatgtcttcatgtttctgttattgataaagtagcccagccttttctgaactactgtttggtttctgtcttatttcccctttggtgcaatgaattccatattcagaataaaacatttcttggagcacttggtatatgccaagcactgggggaggggctct

SEQ ID NO: 61827 - DNA, 1461 bp, Bovine  19866881056750
  misc_feature (1)..(1): n is a, c, g, or t
ntgtatccaaattaaacagagggtgaattttctaaaggaaaacggacaccatatcatgggtcacaaaactgtccacaaacatttactcagtgccttaaattgtaaggaattacataagaaaatgaggtttctccctttatgcagctgacaggagtgtttcaaaagcaacaaaatcacatttaaaatattggtaaaacatcaaacaagtgcatttcctcagaaaagcctttcttcttactaccaaaactcaagttgcatcctcaaatcacatcagttattttccttcatagcacttaccacaacatataattaaacactggcttatttacttgtttatgaatatatgcctcccctaccagaccatcaactccataaactcaaagaatatgtctgtttcattcaccactacatatctggaattagcaacatctctttccagcagacaatgaaaaatacagaacatggttaagaaggctgtccttcatacttgctagttatgtcatcaggtaattctttgccctatgaaagttccatcattcttgactccaacttgagaaagtgtcatcctagaatacttccagaaatggtagcaacaaagaatttctaatatcctcaaacacaaaaataatcctactctgaaacatagctgaagtcacttcttttcaaccctcaagtttatattctgaattcataaccatcaacaatgactcctttaaaggtgaccagatgaaatttatcccctgggaaatttaggggcttacagaagtttaagctgtacatggtcacgttcctaccttttcccaagttcagctcctcctgggctttcgatagtttgctagaatgatttcaggaaatctgactataattgttcagattccataataattgttcataattccaaaacaattccatagttgttcaaagactaatggtattagtttttctttaccctggatttacctagtctttgcctgaaaatgctgcccacatatgtgagaggtttttttcatcagatcataaaaagagttacatttcattgatcttcaacagcccctaacagatcattaaatggatatgacaaaattactcattttgcttcaaactggatttctagactaccaaactgatatctgattatgtaatttcaattagcctgaaaaactgagaacaagtgcacttcaatatgagtggcaacaaagggacccacgagaacactgggttggggttaaaattaaaattcatcctgaaagctgaatgaactagacacaggagctgatctgttgccctaagacacagttttgagttttagcctgggacgtgggcccaactctagggatgaccaatgttattgcttcaaataataaaattgctggcaccaagtactagaaaactgtttcatggtgtcacaatctgcagtttgagacccataagaaccgaaccaatgttcaaaggcacttcctt

SEQ ID NO: 61828 - DNA, 2600 bp, Bovine  19866881132587
  misc_feature (1)..(1): n is a, c, g, or t
ntggctgcccactccaatattcttgcctggagaattccatggggtcacaaggagttggacatgactgagcgactaacattttcacttcactttgctgcaactaaagatcacttgtgccacaacgaagacccagtgcagccaaataaataaataaaaatatttttttaaaaatagatccaccctggattattctactcacttcccagtgataggcattggtgggaagtgagattgacatcgggttctgtatccctggaagtcacgtccttccctgggtgaatagacagaagagtatgattcatcaaccaccttctgtgtcactgtcttaccgtgtcacagtcaagaggagaaatgtttatgtgtttcctctttctatctcctttcctggaaacttaaacctcaaaaattagaaaacccttccttcccacctatcccaaagatcttctctataacatatccactcacttggctttccttccttctctctgtccccagccatgccccagttctaataatccttacctgtgttagaaaagtcactgcatcaacccctcggaagcttctcagacctgacctctcgcctctacttcttgtgcttttcagccgtgtgatcataccctgagcagtggggaacctgaattctcctgtaaatacttaatgaattttccaacctgatagtatgtctccttggacagtgttcggtcctcatctgtgactgtttagtactagggtacctccttcctttggacctctggcaggaaggagatagatgatcaaaccctgtcagggtttaagacggtctcttccccccttccttgctgatgcccaaagtttcactctaagaatttcctcgtagtttctcttaatatgccagcctttgttaaaaatgcagatgccccgtagggaaatgcgattgatcctttaaattaagctggtcacttcagatcctgctttgagaacacgttttgatagaagagagatagaattatatgggtctgaaaaccagggaggtaattgataaggtgttcaggagtggggggaggagaggacgagacaccaggaacagagactataaactgcccgctttaggagggcccagctaggcagtgttcccagcttctcccaacatgcctgatgcctcatccggggccaacgtgagcctccgcacatcatccacaatctgtaccaggccaccacctttatgataagaatgtaatgcacccctcagctcttccctaaatctacccaagttgactctattttctcttcctatcactcagaatacagatctcagcctcttcccccagattccacgaaaaaacttgattacactcaaaattcatgaggtgtacaatcttccctgaaaatctctagaatcacccgtagggttcatatcatatagcgctcaagttttggcttgaagaatctcccacccagcatttcttcattccaggctttcttctgcactttcctaaattggatcttcttctccatccaggactttttcctgaagaatttctaattctttactatgcacacctttactatgcagagaaaattagcaatgatcatttattacctgagcaattctgtgaagcctatcacgacatcacttctggacaagatataccattatctgctaagaattctgagaaataagacgctttcagtgatgacagtgggatgctgctgctgttggtatcaatggagacacagcttatttcagtgggtgctgcagccctgagcatgtagcaggcacaacaccatgtgcctcacagatattactttatttatttattaaaaatatttatttatttggctgtgccaagtcttagctgcagcatgtgggatctagttccctgaccagggatcgaaccaggccccttgcgttgggagctcggagtcttagccgtggaccatcaggaaagaccatattactttaattcctgcaaggggactttaaggaggaattatcatctcccattttacatatgtttcctgtggtgctagaactggaatttgaatagaaatctgtctcaactctaaaatctgtttttccatgctcacagcagactgtcatcattagtcttttcaagtctcctctctagttttattttttatctttattcacactggggcttccctggtagctcagatggtaaagaatctacctgcagtgcaggagacctgggtttagtccctcaaggggagcggctacacactccagttgttgctgttcattgtctaagtcatgtccaactgtttgtgaccccaagaactgcagcacaccagacttccctgtccttcactatctcctggagtttgttcaaactcatgcccattgagtcagtgatgctatctaaccatctcatcctctgccgcccccttctcctcttgccctcaatctcttccagcctcaggatcttttccaacgagtcagctctttgaattaggtggccaaagtattggggcttcagcttcagcatcagtcctaccaatgaatattcagggttgatttcctttaggattgacttgtttgatctccttgctgtcaagggactctcaagaatcctccagcacacaattcagaagcgttagtt

SEQ ID NO: 61829 - DNA, 1214 bp, Bovine  19866881146657
  misc_feature (1)..(1): n is a, c, g, or t
ngcgctggaggcactgtcagaataaataccgcaggttacctattcacagacattgtatgtcttgtatgctttccatgcagtgtatcactacgactgcagcaactggaacagcaggggatttcagatgcagagggtggggagtgggtgcagcgggaagaatacttaagtcctctccttccctttcaacagcgggaaggagtaatctgtcaaatggaccaccacatcatgtgaatcgtaagggggccttggccaagactgcttggttcctgtgcatcagtaatatttctaatttaattaagatattcccaactatgcatttaagggttagaaattaggaacataaaaatacagtgaaggctataataatttattccctgatttgtaattccgggtggttttttccaacttgtagtcaatgaaacttggcataaaactgatggaagaattataaatagataacatctttcaagtccagctgaacagtcacagcaatatagtcagaggatgtgtgaacttggaagaaggctggagagtcaacgtggcatctcagtttgcattctgaaccacgaatccagagctgggtgtggggatcaggaagaagctggcgaaggcccagtcctccactgcctttttatgaagatgatacacggccagccagtgatttttaaattaaacacttggcttctctaggacaaagaactgaatttaaaagtagaattctttctattccattatctttttatttattttctactactacaccatgtatgccaagtattataaatccagaggaagaaaatccaaagcttgacatatgatcctcagattccattatgtttgggaaaactgaactatggagtttgtcacttatgaggcaggaaaagatttacagagatcacctaatctggggtgtcttaaaacagggtctaatgcaaagacctcagagtccataagttccctgaaattacatgcaaagttctatttgtgtgagcatttttctggagaggggttaggattcttaatgaggtctatcgcctcttaaaggttaaaaacttattaaagctaataagctatcaacttcaagtgccttgagcagatcatatttttaaagctaatggaagacataattcttccacttttattggctgattgtttcaatttctaaaatagtctccactgatggtgaatttcccactacaagtcttattataagt

SEQ ID NO: 61830 - DNA, 2731 bp, Bovine  19866881290619
  misc_feature (1)..(1): n is a, c, g, or t
ncagcagctactgccctgtagacttgacactcccttcatgaactctgggcatttgtagcaacagagtttctagagtgaggatgaagtaggctggagtttatattcaattctaggaatctcagtcaagaaggctgcatttgatctgaaacatacccataggaagtgtccagggtagggagggcgctcaagtcatgtcataaggaaaataatggaagggatgggagaggctcatcttgaagaggaagtgactcatggggccagcagaggcatcctcaaaacactgaaggctggcacaggataaggaattacactaatgtcaagtacattagtgtagaaagccatggcaacccactccagtattcctgcctggagaatccccatggacagaggagcctggcgggccacagtccatggggtggcaaagagtcagacacgactgaagagacttagcatgcatgcatgtacaataagagattgacctaggaccagttacctgttgtacaacatgcctgttggaaggaattcaactaaaagaggaggaactggctaacatccatagcccttttaatgataaggcctccctgtggaagattttcaagcagaagaaatgcagatttcttcagattggaatttggaccagagtcctcaaatttttgctgccactgggctccaaagctactttcagagaataagaaagattgaccaggagtatgagggtaggacgagagtcagacttcactctgtctgtgtctcctgccccctaatccaggtccctccaggtctgctgcacccactaccttgactccagctcctcagaaaccagatgctccagaaactacttctacaaagccccctgggccactgcctccactttccaccccttcttctaaggatccagactccttttcccctctgcaaggcccagaccctcatctgtatcaccagatgggtgttctcctcaagcagatacaggatatgagagttctccttggtcacctggtcatagagctgagggacttgtctagccacctgaagcttgagaccacaaagggtcctaccaaacatgaataaataattcacttgccatattgcttgactacccccaataaatccagtttttttttctagttttcatctttctgttctatacttatgcataaatggttttacaggttgccccagtgttttgttagagcagcagagataggtgagtataaataaatttgtaccaagttatacctagagtttaactataattgtgtattctgtcttaacatgaagacatatcctgcttgatctagagagttgccttctgtggcccagaccagaatctggtgaatgaaagagaagcaatgagatagatttaatgcagcagtctcaaccaagggcaatctctctccatcctaggggacatttggcaatgtctggagacatttttggttgtcacatggtgaggagggtgtgctgctggtgtctagggatgttattaaacatccagtaatacacagaacagccttccacaacaaaggattatctcgtccaaaatggcgatagtgctgaggttggggaatctcagcttcacgtaggtgttggactctgagatgaacttttgcctcttttacttaattctctcccgctagccttaattcagcaaatattaattacatgctggtgttttctggcctctgctacatgcccaaattgatgctatgttaaatatacctataaaacagtgtttctgtctatagagggtttacgatttgagatggagggatggtaatacgcctacccattaagcaattaaagcagggcatatacaaattccccagaggatcctactgaattatcatgcttgatcacagaaatatgtgataaagcctaacactgctgggcttcccaggtggtaaagaacttgcctgccaatgcaggagacttgggttcgatccctgggtcacgaagatcccctggagaaggaaatggtaacccactccagtattcttgcctgggaaatcccatggacagaggagcctgaagcattacagtccacaggctcacaaagagtcaaacatgaccgagtgactaaacaacaacaatagcactgccagaacagcaattatttaattcatctctgaaatatttttctttaaaaatatacataaattgattttggtaccataataatacttttttctatgcttggactgctactgtgcattctcagccaatgagagctagcttgacatactctacagtaacctttggtcagtgagttagcccttcattttatgacctcagccaggggggactctaccatattatcttaaatcacgttgtgtgaagttattcagtgagcggttttttctgctatttattctgtgtgcagtttggacccacagtgatttacaacgatgtgtatttgattgttccagaaatgccacaaagaaacagaggaatagaatcacgttgaatgttaaaattcaagttttctggtggtttctgtgttctgcttagtcactgactgacttagtcgtgtctgactctttgtgaccccatggactatagcccgccaggctcctctgtccatggagattctccaggcaagaatactggagtgggttgccatgccctcctccgggggtggttcctgctaagtcgcttcagtcgtgtccgactctgtgcgaccccatagacggcagcccaccaggcttccctgtccctgggattctccagg

SEQ ID NO: 61831 - DNA, 1396 bp, Bovine  19866881332282
  misc_feature (1)..(1): n is a, c, g, or t
ncactcggtgacacccagtcatgaagcgcgactgcaggcacttaccagtggtctcatactgaattagctcctcagtcctgtctctgtgcttgtaggacggggatgaaaacacccttcttcattatgttgctgtgatagatgacagagtagggccggtattccattactcctggcatgtggtaggtgcttagtaattttaactgttagtagcagttgtctctgaggatgggggaagtcagacttaaactgcagaattatttgtttaggtgttggataggctcccatttttattttcctttcaccccataagcccccagaatctggtccttctgtctgtctgtctctctcttttttttttcttttttaaaaaaatctgtgatccatttccagttctcttacccaggtgccagggatcagagctgtgactcttcacctgctctctcttctcccaccacagatcctttcctttttaaagagtcactattgctggcatcttcaaggaaacagatggggcacaacaattgttcttttaaataaataccaaagataaaaaatttaaataactgttaaagataatgttagatggtaaccttcagagtggtttgttgcccctggtaggaagggctgagttacagggaggatagcccctgaaaatgttcagctctctaggaaatttcttctcagaagataactaagtgttaagttttaagcaccattctgtgattcatttgacttactctgatcatgctgctgcttgaggtaaagattgatggcttagaaaaatgttgcctgtaactttacctttcagcaggcagcttttatctgcttgtgtccctgagaaagagtaaatattgacatgttaagtgaaatagcttcagtttttacacgtggatgtgagggatgagatgcttacgaaatcggaactacctccctctcttctgttcatctagaatttacacggatctgagttgctgttacagaaggcaaacatctgaatgggaataggggttagacagacaacataccaagaactctgatgcccagagtgaatacattcactatttaaatgtagataatattagatcttgttcttctgctttcagaacctatacttctaagtcgtctgaccaaactgatgggagcgcagctgcgaaaaattagttttctcatttataaagtggataagttgtggtctggacatcggaggcatttgggtggtatctagcattcctggagccgctggtgatttgattcctgagttctgttggacagaaactcaccaggtctccctgtgttgtcctgcatgttgattatcattttggctctgaattctcacactttggcaatctcatcaagcaaacctgttgttttcctgtggcctcccatcactttatat

SEQ ID NO: 61832 - DNA, 1308 bp, Bovine  19866881343616
  misc_feature (1)..(1): n is a, c, g, or t
ntacagttcttctgtgtattcttgccacctcttcttaatatcttctgcttctgttaggcccataccatttctgtcctttatcgagcccatctttgcatgaaatgttcccttggtatctccaattttcttgaagagatctctagtctttcccattcttttgttttcctctatttctttgcattgatcgctgaggaaggctttcttatctgaaggcattgtgaggtgttaaaaaattagtataattatttttcagtaggtagtacattcacatggttcagaattaaaagtgaataaggaaatcaaggaatacttcttttgtgtagcagtagtatttcagaggcataggatttacttgagtagaagaagcagacaagaagtggacccaaactttaccatttataggggtgggtttttttgtttttgtaattgttgctatttgatattttaaaggtttctttttcagtcatacaggggtcagtcgaagtgtgactgtaataactgcttttatgatgaagactgaccagcttacctttgaagaagcctatgaaaaccttaagactgtcaagccagaggccaagtgagttacttgatacagtaataattctgcttttgtgatgcagttttatttatttaaagaaaatttaactcccatatctgtttgcccttgcaggatgaatgaggggtttgagtggcaactgaaattataccaggcaatgggctgtgaagtggatacctccagtgcagtttataaacaatatcgtttacaaaaggttacagagaagtatccaggtaagtaataattggcagtatgtattcagtcctttttgggcgtccctggtggctcagcctgggtaaaggatctgcccacaatgccggagacctgggttccatccctgggttgggaagatcccctggaggaggtcatcacaacctactccagtattctcgctttcggaaatcccatggactaaggagcctggcgggctatatagtccatggggttgcaaagagtcagacacaactgagcaacgaagcacagcacattcagtcctttgtagatgtggtttactctgagaccagatgcttcaggtgcattatttcacttttgaagcaggtacttttatttcattttgaaaccatggtttagcaagaaatagcttgttcagggtcacatggtttgtaaatggctggctcgaacttgaagtcaggcagtctgtgcctggaagccaagggctgcatcactgtgctgtcccacctcgtcctcgttcctcaacacgggagattttttttaatttctgagattagcat

SEQ ID NO: 61833 - DNA, 1183 bp, Bovine  19866881412170
  misc_feature (1)..(1): n is a, c, g, or t
ngatctagctccctcgctagggactgggcacaggccatggctgtgaaagtgccgattcctaaccaccagaccggggagcgcccacgcacagctttttatgtggacatacattttcatatcatttggataaataccaaggagcatgattactggatcacacagtaagagtatgtccagttgtgtaagaaactttcaacctgtcttccaaagtggttatgccattttgcattcctgccagtagtgaatggatattcttgttgctttaagtccttgctgacacttggttgttgccagcatttcagatttaggtattctaatagatgtgtagtggtgtcgcattattttagtttgtagttccctgataacatgtgatgtggagcatcttttcctaaattgtgtttgccatttgtatatctttcctcttctctttccttcctacctcccttactctctcctcctctttcttacatttgtgcaaaagccacttgtttttttattttgaccacatataagatatatgtaccaagatcagaagctttgttctgcccctgtggtttctttgataacttcagcatcttctgtgaaagttctctttgccttcctgtgttgaccagtacctgacacccctgatcacactttttccctgaagccctactgaatggttgctgttttcattctcaaaacctttataccattagggtctctgaaggtgggttagcgtctttcttgttcttcattgctgctttttgatcattcatcttccctaaaaaaatccacatccaggcttaagtttcacattgtctcacatgctctcctccacctgtccctcttatagtcatcttctaatttctggttcactctccctcactttttgaaaaaatttagttcttaacttattgtcacttacttcaacactccttccatcaagatttttggctgatttcagtattctcagagaaagaaagaaagaaaaaaaaagtgaagttgttcagtcatgtctgactctttgcgaccccatggatggtaacctaccaggctcctctgtccatgggattgtccaggaaagagtgctggagtgggttgccattctcttctccaggggatcgaatcccgtctgagccaccagggaagccttctcagagaagatccttcaaacaccttgacctctcatttcctgggtctc

SEQ ID NO: 61834 - DNA, 1736 bp, Bovine  19866881490331
  misc_feature (1)..(1): n is a, c, g, or t
nggccccgtgaagagttgcctctttagaacagaagacgctcctatcattcttatcactcaggaaattccaagagtttttaggagctctagactaggaaccagagacaaaaaccaaacgtctttctatgacgccacagctatgctggtaaatgtttaacaaccaattttcctggggaaaacaatacagatttgtaatgtatgctgatttctttaatgtaaatatcccaccatggctcgtgtccagcttccagcgtgacgtcactaaaggtggagatgggaggaggtatgcacagttggccccacaaactagtgtgagccagctccacacaccactgcctttactctgatttagctctaatactaaaaaaataactgtcttggcctcgctactgaatgcataggtgttggcagaagaacactctgatggttagaaattaaacgtctgttcaacctacgtgagctcctgtatctcgccggtagttgtttcttctctcacagttttatttgcagaatcttcatggagttttattctatgtatgtagacttagtgttcagccaagaattcaagaggaacccttatgcaaatttctgaatctctttccctatatcactgccttctttctggtgctctgccttgagtgttcaagctgtcttgctttcctgaactctagctcttcaactcagggctgctgtgatctcaggtttccccttctgcattgccttctagaaagcgcctccagccaggaaactgtgttaattgcaggtctcgccttgtctcctttctctcagggatcacaggtgctgctctgcctgttgtgcaatgtctgaagcagttgtctcacacattttgttcaattttctagctgtttacagagggagtacaagtctgttatcagttactccagaagccagaagagggagtcatcctgctttcactgcagtaaagcagattcctttcttatagggagatcccacatttctgatttcatattttcctttttcaaaaatggggctcatcttatttctgtttccacagaaactatcagcttgctactgttttaccctaccttgctttagattgtccgtgcagcctggaataagccttctgaagatagcattttcaggcgcactcatctggcttacagattccgagggacagaccttgactgctatcctcaggtgggggccatggggtccaaggatatccacaacagcattggaggagttctttagctcaggagattgtgaagatggcatgaggactaattgaaagtaactgaactcacatccacaaaagagaatcaagtacagtttgttaccttagttcaggataaaataatcagtttaggataaaataatcatttcaggataaaataagacatttgacatctttttaaatattaacttcaattttttttctatgaaaaaagtagggaaaaagtctttagccaagtacacctaagaggcttgtgtctatcctggaaaaatctgggtttctcttttctcgccttgtgcaggaccagctgatcctcctctgagtgtcccaggctgttcttacaccatctgtatctgtgctggaacggaggcttctttttatcagtgcctttcttgccagatgcacaactattttcagcctctgcctaaaattgtcagggtcttgaaaactaaaacgtaatgagatttttctttcttctaatatgatcttccaaacgcccccactggctacgtgtcattgg

SEQ ID NO: 61835 - DNA, 533 bp, Bovine  19866881574234
  misc_feature (1)..(1): n is a, c, g, or t
nccttcctcttctttaattccttcttttgaaccttttcatcgcaatacttcagactgtcacccccaactcaatcataaaatactagtattttacaggattctttcatgtttcctgattgaaatgtttttggcaacgccccagataagtctgtagacttctttttggtcagagtttatatttagcttctctcttaacttactgtagagttttcaccactgcataatgatgacttgctactcttaggaattctgtttcttaatgattatttagttttttcccatctttgcaaaccttcagagtttctgttatagggactttctgtaatttgtaaatcacagaaagtttcccaagatctgtcacagcctaaaaccagttacagtatttgccagctaactcttgctttctttaaaagtgatacaaaataccttatgttgtgtgttaaacagtaattgaacatcacgggcctgaagttcaatgaaagttaaaatcaagtaattagtctgaaagtggattctctaaaatcatgactggg

SEQ ID NO: 61836 - DNA, 2006 bp, Bovine  19866881720285
  misc_feature (1)..(1): n is a, c, g, or t
ntcactagctataagactttgagcattcattttctctcagcttcagtttccttatctgtgcatctaagagcttagcagagcccctcacacataatgtttaataagtgacaattgttcctaattgtaataggaatatattttccaaagccaaatatattttcccaagccaaatacagtaggcttatactatataagattatattaggcttatactacttacactacaagtacactctacttgtaagagacagtctactttttccaacaactcagaaaatctacccaaggattgaaataaatctctgctgctgctgctaagtcacgtcagtcgtgtccgactctgtgcgaccccatagacggcagcccaccaggctcccccgaccctgggattctccaggcaagaacactggagtgggttgccatttccttctccaatgcgggaaagtgaaaagtgaaagtgaagtcgctcagtcgtgtccgaattttagcgaccccatggactgcagcctaccaggctcctccgtccatgggatttttccaggcaagagtactggagtggggcgccattgccttctccggaaataaatctctaaaagtatataatttaagagaagttctgcccttggaaaatcaaatgagaacttcagttcaacaaagagaactgagattacactcttggtactgacaatgacggtccaatgaaaaaatgaaggtcagtctgtgtttcccccaaattttaaaggtaatgaatggtgtaaattttaggtttgctaaaggactcattcagggaagtatacaaccccaaattcacactgaagctcaagaacagtataagtactcctctgttaaggtaagaatattactatccttataaggtaaggacaagttttctttaaacactggatgataaagcttctctactcttatttcgaccacattccattcctactcttcctgccacaaagccaaacaaaatatccgtaacaagcaaattcataattgtatccggagaacaatcaggattatacccatttataagcgttaggtgtagatggacagcaacctgaggtcaggtgctagggtgctttgcttctctgccaatatggacatcagcctcgatcaatagtggaagctcagaaaaggtttgtcttctttcagacgaaccaaacgtgtacatacacgcacaaacactatacggcaagcatcgcccacatcgcacactgagaaaaaccttcagccgttttggtggtcacggccatcctgccctaagcttcctaatgacgtcgtattcgccgcaccaaatcatcacctggtactttcccagaggaaacagccaacacgatagtaattctaatcaggcagcattttacactcatgtcgccaggacagacaccgacaggttctgctatactctactaggaccacggacggacacgacgagtgaccctcgcttccccgacaggattcgtccacacctgtcaccgagagggcgcggaagcagggaggaagaaacctggagccacccctggcacagtctcagatcccactcaccccagtcttcatccggccggtgagggagtcccggactaaaaggtgactccatggtgccggcaacgccagccggttcccccgaaacacacgttcccctgcccagtaactcggtgactagtcctgggacggcggcggcgagcggacaaaatactccgtaacgctaacgcgacggtggccgaatggagacaaactgcttccgccgcacgagggccgccagagcctgagctagttttaaacaaatcgctgagctagtatttttcccttttggagttttcgacattttctgttctgctgttttaaggaaaaaagaaagacgcaaatactacgtcggttaaataaaatatattataatattttgagaaatgggggaaaacccattctgaacatcgtcccctttgattccacagtggagatatatcaaaacaaaatttagagactaaaaaagtaactctggt

SEQ ID NO: 61837 - DNA, 821 bp, Bovine  19866881067260
  misc_feature (1)..(1): n is a, c, g, or t
ncctttagcacctttaggaatgccacttttcggtagagaggctcaatacttatatgaatcagcttgcaaatagcaagggctattagtttatgtgaagctgcatagtatggaggcgtctgatccataatgctctgcgcatgctgccaatcaccaatctttaacaaggcttccaacaaaccgagtttttggttgtcaggtggcttctccactttctcctcttctttttccttttctttctctcgctcgtcaattttatcagaagacaatacaaccattgtaagttttctaacgatctgcttagcttctacaatttctcgcttgtgttcatccataatgcaattatcagctggaagaagatgtacataaagatcatctaaatcaataaggttaaattgtagaagtactgctgcaactctgtataaagatgaaggagtctctccatttggttcctgataaaacttgaatttgaacccaagaatatgacacagtgtttgcggctcacacatactcatgtaagattctaataaagatataaagaagtcatcttgttccggcctgcactcaaacacttctaaaatgacatccagaactctattgggatccagattaaagcatcctattaaagatttgatattttctaagattaaatcactagtaatatttccagataaatcttgccccaattcagcaatcagcttggcataaccttcattttcttctcttaacaaattaaatttttgctgcttgtaaaagagttttgtcttgattttaactgacttttgattgaattgctgtgattggttgataagccctaacgattc

SEQ ID NO: 61838 - DNA, 3071 bp, Bovine  19866880485757
  misc_feature (1)..(1): n is a, c, g, or t
nttcactgactacactaaagcctttgactgtgtggatcacaacaaactgtggaaaactcttaaagagatgggaataccagaccaccttacgtgcctcctgagaaacctgtatgcaggtcaaaaagcagctgttagaactggacatggaagaatgtactggttcacaattgggaaaagagtatgccaaggctgtatattgtcaccctgtatccagagtacatcatgggaaacaatgggctggatgactcataagctggaaacaagatggctgggagaaatatcaacaacctcagatatgtagctgataccatttcagtggtagaaagtgaagtggaactaaagaacctcttgttggtgatgaaagaggagagtgaaaaagctggcttagaactcaacactcaaaaaactaacatcatggcatctggtcccatcacttcacggcaaatagatgaggaaaaagtggaaacaatggcagattttatttccttgggttccaaaatcactgtggacagtcactgaagccacaaaattaaaagatgtttgtgctttggaaaatgctatgacaaacatagacagcatattaaaaagcagagacatcactttgtcaacaatgatccatgtagtcaaagctattgcttttccagtagtcatgtagagatgtgggagctagaccataaagaaggctgagagccaaagaattgatgctttcaaactttggtgctggagaagactcttgagagtcccttggacagcaaggagatcaaactagacaatactaaaggaaattaaccccgaatgtttattggaaggactgatgctgaaggctgaaactccaatacattggccacctgatgaaaagggctgactcatgggggagaccctgatgctgggaaagattgaaggcagatggagaaggggacaacagaggatgagatggatggatggcatcaccaactctatggtcatcaatctgagcaagatctggagatggtaaaggacagggaagcctggtgtactgcagtccagggggtcgcacagaggcaaacttgactaagcaattaaacaacaacaacacttctgtagggtgaggctcactcctagaacgtccctcctcccctgacacatggggcctgaggcccacgtggaattgtttcaggttttgaagggcagcagcctgaggtcctcggcactgggcacacacactcccctctccccaaaatggagagcatcgctgaacaggcccccctaacaacagtggggatataccacagtcttttctcccccaacggccccaacacctacaaggcactttcaaagtcagtttctgatttgctctttatgatcttgtgaggccagcctgtgtaacgagaacaccttttgcagaaggataagtttatacaaatgcctctggggttgggcctgggctgctcagcccagctggcctgaagcgtggcctctggactcgcagtccagtgctcactttacagcagcatccgcatgcacaacccttacccacctgccccccacctcgccctgcaggagacctagtttcttagaagcagatgaaatcaattggtccttggaaatgtgtcaaccgctgagaccaggagacaagtgccaggaggaaagaaatagttgagattcctgttaaagaacaatgttgggtttgacctgaataacaccagagaaaaaggagaaaataataatgtcagacattacataatctgtggagacgcagaaggaagctggagctggaagaagcacagcgggggagatttcaaaggggtcacctttccccacggaaaggatgagggggtggacagggtcactgacgtacactgagctgttgccatctactaggcggtgggcagtagattgttgccatgacaaccccgtggcctaaagattattgcctccagtctgtggatgggaatactgagagaacgagggtgatttcatcctcccaaagcagcactgagatgcccaagggctcttcctcaaatggggagcaggctgagggcttcagtatggtgtttaagagcaaggactttaatagccaaagcccattaattagtgagtggctaaacaaaatgcagcaaatccatacaatcgaatactacacaacaatcaaggggaaagcacaatctggatggacctcaacattatgctgggacttttctggcgtccagcagttaagactccatgcttccaaggcatggcaagtggatttgatccctggttgggaactaaggtcccacatgccacgtggtacagccaaaaatattatatatatatatatatatatatatatatatatatatataaaataaaattacactaagtcctacattctccaccaaatgatatgaaccctaaaagggagaaagttgggggcaaaaaattctaagctattacaataatttgtggttttccaaagctcaattcaacctgacaaaatcatattcctcagtatataatttctgtcttttgggagaattttaaatataatttttccccttggagaaggtgtggatgatgaaagaaaggttggaagcactgcgctaaatgaaagaagccagacgcaaaagaccatataatgtgtgactccacacgtaggaaatgggaagaaaaggcaaacctacagagaaagaagatgagcagttgcccaaggctgggcgtgggaacagggtgtgactgcaaatgagcaaaaaggacctttctggagtgatgagaatgttctaaatttgaactgtggtgacggttgcacaactctgtaaatttcctcaaagtcactgaattgtactgtaagatgagtgagttttctggtattgaaactatacttcaataaagctatttttaaaaaaataggaagaacacgggcttggggctctgagaggcctagctccggttctggttccctcactcccatggcccaggcagctccctctgggctttcagtgtgctcaactatgaaatggagctgcgaggagagccttgggaagctgggggatgcggtgagccaggcaccaaagagtgagacaggcctagacaacctctcaaccttcaagcct

SEQ ID NO: 61839 - DNA, 1579 bp, Bovine  19866880507454
  misc_feature (1)..(1): n is a, c, g, or t
ntgtgcttgctcctagcgactctgatggcctttcgggaaaagcaaattcttgcacagtttttaaagtccctgcccgctgctgctgcctaccagtgagggtggggtggggtggccaggaaataagatcccttgggaagcagggagaggggagcccaaagtccacgagccttactaactattcgtgtttccatcggagatcacccttaaatcacctccctgtctcccatcccagggatctgctggggcaggactacttctccaagccacaggcttgattaaaggaatcaagcctttcatttggggtcctgcctgtctcttaggcttttcctattttgtcataaccatcttttgaatgtgccgtttttatttttttccatccaccccaagcaacggtgaggtaacccggccgagataattgctgaacacctgcaagacgcaggcctggtgccgtgagcacggaagagcccgggtgaggctggagatcagccggccttcccgcccccgcctcctagacacctgcggaggcctgtcgcttgggacgggagggtcgattagggcgcttgtaattgagatggggtgagggagtttacgatggctccagagtgggaaagagggagccggcttagatgacaggaaaccgtctcctccgctcggcggagcagattgagaaagcggcctgggtagtaatggggttagctaatccctgatagtaagaagggaaggagaggccgtcatcataatcacgactaatggattccagatggagaaacagaattgttctcattagcatggttgtgcgcgcgtgacacacacacacacacacactcacacactcacgcacacacccggagagacccattccacccacatccctgactttgataagcactgtcagataagaatagcccacaccgcgaaggtaggtagagagccttgtcaattatttcttccccgttccgcccctccccctccacaatatccgtgcatacgcaatgatttcattaacctcgagactcctgcagatgagttgaaaacccagcttacacggccaattagttggcagcgcgttccgcacgctgtatggaagtacctttctcttccccttaaattccgcctgacttttcggctgtatttcataagtgttaatgtaatgttgctgaaaggaaatatggccaaggcaggaaactttccccccactctctgggatgcagctgttcgtttggtttgggttgttaattcaaaacactcccaggtgcctatttcatattatctcttgtttagaacaaaataaaatgaaactgtcaaaacctttctgcctcgctggggcctgggctcaacagccgggtaaagagaccagggcaaggaagcaactgcccactccccttttctcagtgagtagtgggcaccttccaagtgaggccccccacctgcggccaacctgcctgccctcaccaaggtcttgttgaaggcctgctttggactccattcccaccccaggccctttgctcctagccttcctctccagaacacggtttccacttttcagctctcttgcaaagcctcctgtctgacgctttcc

SEQ ID NO: 61840 - DNA, 1943 bp, Bovine  19866880793054
  misc_feature (1)..(1): n is a, c, g, or t
nttttgatggtaagaagcctggataagttttggaagcaaaaattttggcctgaagactccaaagcatttgttcattcaacaaatatttattattcaattatttgatgccaaagacagcactaggcattgaggatgcaccagtgattccaagacaagataccttggctaacagtttaggtttagtgagagaaaaggacgcgcccaccagataacagaatatatgtgagaagcgctgtgattgggcaagtacagggcattggagaatacagtacccaactcagacctggactaagtggtcaggaagcacatcacagaggaagtggtgcccaagatgaaagataaagaacaagcattaagtagtgtgaaaaagtaagggaaagagtgttacagactgctgctaagtcgcctcggtggtgtctgactctttgcaaccttatggactatagcccaccaggctcctgtgtccatggaattctctaggcaaaaatactggagtgtgttaccgtgccctcctccaagggatcttctcggcccaggaattgaacctgggtctttaatgtctcccgcgtttgcaggcaggttctttaccactagtgtcagctgggaagccctgttactgactgagaaaacagcattacatggctcaacccgaaagagtattggggaactaaaacattcagcatggccaaatgcttgcattagaaccaagtagtctgtagaatctcagtagcattgaatgaaataatgcatgtgtgtgacaccatggactgtagcccgccaggctcctctgtccatgggattctccaggcaaaaaatactggagtgggttgccgtttcctcctccaggggatctttccaacccagggattgaatctgcatctcttatgtctcctgcactggcaggtgggttctttaccactagtgccacctgtgaagcctgaatgaaacgatgatgtacacaaaccacggccaaagcctgccatgaccatggttaatttcaggtggctatactggttggtgcttttaatagctgtgtctgtgtggccagagaatgtgcaagtggaaatgggttggctggccagctagtgttgtgaatggaggccaacccaagacaagtgcatgtccctcaagattaagcctgactctgcagcatcttcttcctacgtccaaccagttgagacataagaggagggtaaagaaaaaaaagaaaaaagaaagaagggggtgaggcccaggatcttaagaaattgtgactgtcatgaaaagagtttcaaattttaagtgttttaaacttgaacaatccttataaaacaaacaaacattaggtaattgacggtaagcataaattcggagtgtaagctacatataaaaagaactctggggacttccctggtggtccagtggttaagaagccacctttcaatgcaagggacacaggtttgatccctggtcacttaacaaagatccaacatgctttggagcagctgggcccttgggccacaactactgagaccatgagttctggaaccttcatgccacaaccagagagaagcccgtgagtcacagcaaagatcctgcaagctgcagccaagacccaccacaaccaaacataaataagtaaatgattttaaaaataaagaaatatttttaagaatggaaaaataaaagactcttgtgttaattatacagtgctgtgtaacaaattagctcagaattcatcaacttaaaacagtaagtatttatcgtctcccaatttctgcagcttagctaactgcctctgcattatcatctctcacaaagctggggtcaagctgtctgccagggctgctgtcaatgttctttggtcactatgtcgtgtgctgtgtcttcatctgaaggccggctggggaggatctgcttccaaggtcacttatgggttgtgacggattcagtttctcagggct

SEQ ID NO: 61841 - DNA, 2628 bp, Bovine  19866880973873
  misc_feature (1)..(1): n is a, c, g, or t
nggatctctctagtacgaccccagccttgaatcctctactgactggctttgaggatgggggatttgcatcctgctgccagctctgagactcactcccagtcttgggtcagtgtccaggtttgcagacaccaatgcaatggaggactggcgtgtgcagcttataggaattcaggagccacctgttagcgggcacctctgtcgtgccaggcaccatactaggcttctgggcatctggcacagcacacacgattttatttgttcttcacccaaatactacaatgagaatcttcctgtttccacggtcatgagaaggagctcagcaacacattcagcatcagtcagcggaaaagtgttggagctgggtttaatgctgattctcttcggttaccttgcacatgagaatcttaaaagagaaaccaagtcccgacacctctccaaggtttaggaaaagctattagggacgaggctggactgggacatctgtccacttgggagaaacagggctgccctgtggggaaccctatgtcccgtggctgctctgccctagggttagggtgctgtgttgtgggagggtactaagtggccctggctccagggctaagagggcctctccttctcttggttccgggagccgtgacttcactgtgtgctaccagctgtggtgagcagtaggggagagtccagtccagtcctgagtgcaacccccagatggttgatcccggaggccaggtgcacgatggatgtcctgtagttaccagagcctggcatttgggggctcttgaatgcaactcactaaggtgatactggaaagtctctcgagtgccttgaggttggttgttgggcatctgaggaggagcgctcagccttaggagcagacagtctggcctctgcagacatcctctgttcacccaggaaggggctgggccaccacactgcatccttctgcctggccgtcccctccgcccctcctccaccttatataatggcacattatacaacattgcaaagcaggtggtatttttaaagacagcaagtgagcatttttttggcctaaatttgggaatgaaacagatggatttttaagactctgagcttttcctatgaatagtaacccttgttctcctctgcttttaaacaccagtttcaagaccacctctagcaaccaatcagcactctatttaattataacaaaattcttagctctgtctgctgctgctcggacaagtggggggcactggatcaatttctggagccaggcagacttgccaacaacaattttctttttcccagagggcctcggaggccggcagcaggttccaagcccttcctctcctgcccgctcggcgtgggctccttgacagcgagtttgaaaagggttacagagaggcagataaatgcccggcttgttgcagccttcctgacagcgccgacccccgcgccagtgagctcatgcccgcctcattacgcgtggtgccagattttttccattaacaggtaattgagtagaaactaaaataagcgaagtttgttcatcccttggattttcttgccggggtttgaaagaaaaacactttagcttcgttagtggaggagtgtccttgaaaacgtatttatgttttccaagtgatttgtcgcttggtaggtgtaatgagcccgttcccctggcctctcccttcttgtttttcttctttaagggccatgatgttcagagaataggagctggtttcctgggcccctggctgtctgacaccctgttttaagagtggatggtgaagtatgctctgttcatggtagagagcttatttttctctcttctctctccctattgcactcgcatggtgtgcgtgcacacacaccctggaaaatcacccatagaagcctgttgatggatcacacagtcttagcctgcaacctacagggcccagctgtcaggtgccctcaggacgactggccccgcccccaggggccccaggctggccccgcccccaagcgtcccaggccagccccgcccccgtctccgtgccctgcgcctgcgcgcaggtgctccaggtggatggcctgcccctctgaggggcattcagaagcaaagcgaggttcggtctccttttctctctttgcggctttcctcatgcgtgcccagcccaagttctaattgcacaatttgctattccaggaacagatgtgtgagccctgaggtctccagtcttcctgtttcccatcttgctgggctcctatctcagctggtctgttttcagcttcatgaagaagattcctcatcactgcccagccccaagttctccgttagggttggagcttcggatgagatgtgtgtgtgtgtttggtacttgaaatacagagaaagagagtaagtagaggcatgtcctccatacttaggagtctccattttacctggaaaacaccagagaatcatggctttatttaccatcatgaaccctttgaaattctgatccgtgctaataaccatcaccctacctcaccccggaaatgtatatgtttgattacaaacaacaggctgcatctggtttcagtagttcatgacccgccgtggccttcaggccatgaatcgccacagcagtcaggtagggccaggaatcaatgtcattaaag

SEQ ID NO: 61842 - DNA, 798 bp, Bovine  19866881042324
  misc_feature (1)..(1): n is a, c, g, or t
ncaggtgtccacctggggccaagaatattagctctatcccccagccaagttgaagaaactcaggattcattgggtgtttaacaaagtgttcagaaacctttgcatcaatagaagtaaaaaaattagccctagaccgagaagagctctgaagccatcttagacatcattaaagattcaaaaggactaaacagtctccaagtaactcaattgcactataagaaaagaatacttaaaaatattaataagaggctgtggggacattctcaggctagatcttgctggccccaggtcattcttctgggtaggaatcagcctcttctctggtcaagacttccacaggtggggtttgaagcaattccatcagctatggccggggtggcccattcatcagaaatgttccaaccccccccaggaatcttcttggcacaagcacaaggttctagctaattttaaatgtaattaaaatattttcttcctttaaaactaaaatagattttttttaaagaatataaaaatatgcagctcttaataaaaacacacaagtgtgacatgtaaacaaagattaacagacttgcaaaaaggcagcaaaacattacccataatgagaataattcattaaaaccagtctagaactgatgttagaattagcaaagaaagatggacattagtatgattattataactgtattccataggatcaaaacactatagagagatatgtaaaatataaagagaccctagaagcttttgaaaatactacccccacacaattaaatcaaaatatccaggaatacatgt

SEQ ID NO: 61843 - DNA, 1542 bp, Bovine  19866881057334
  misc_feature (1)..(1): n is a, c, g, or t
nttaaggttaattacacagacgacaaagcatcggtgcctcctctccgggatggttggcaaacttgactagactcaaaatgaacctctttgattccatctgcaaaattagatcagatttgataaagtaaagatgtaccctttgaagtattccctatcaacataagtgctaagaacacttgagtgaaggaatttgagcagttttgaaagcagcagcatagaaacttcaatgaggattgcagctaagggcatgcccagaaggcacgggactaactgcgtctatcctgcaggcaataagcaattgctaaagattccagacttctcaaagttcagagttcaacgctcggaaactttgttgagctcatgataggctgggctctgtggtttgcattctgttttcagagggtctcagaatcctggctgctcttctgtttctgtgctgcctctgcatgatggcacgaaacaaggttgttttttttttctctttagcttccacacggaggaggtatgcattaaaccctcagctgttttcctgggtatgatccctccagagctacagggcagaacatcagcgggtgaaaagtgtctgtttatctaaatgaaaagcagaagatctgcatcgaagcccagctccgtcaccatctcactgtgtgaccttgatggagtccttcggtgtgtccaaatcctagcttcttcctccggcttccacttcagctaccagttaccaagtccctcctatgtgccaataatacctgcctctcaactgaactgcacccaaaccccatgctgctgctgctgctgctaagtcgcttcagtcgtgtacgaccctgtgtgaccccatagacagcagtccaccagggtcccccgtccctgggattctccaggcaagaacactggagtgggttgccatttccttctccaacgcatgaaagtgacaagtgaaagtgaagtcgctcagtcgtgtccaactcttagcgaccccatggactataccccaccaggctcctctgtccatgggattttccaggcaagagtactggagtggggtgccattgccttctccacccaaaccccatgattgagcccatactaagtgctggggagaagatgctaaattactgcgtggtccctcctggtctagtggggcacaaagagacttgaactagtgttttaatggaaagtgccaggagtggccacaggaaattgtaccaagtgctgtagacgctcatcgtgcgtgtgtgctaagtcgcttcagtcgtgtctgactctgggaccctatgagctgtagcccaccaggctcctctgtccatgggattctccaggcaaggatacggagtgggttgctatgccctcctccaggggatctatcccacccagggatcaaactgtggttctgcactgcaaacggcttcttgaccagtgagccacctgggaagccctgtgggagctcagaggggggagccattcattctgccagggggcatccagggaaagctcagaagtgagcagagaggactggagctgacgagctggagaacaagaaag

SEQ ID NO: 61844 - DNA, 1069 bp, Bovine  19866881132274
  misc_feature (1)..(1): n is a, c, g, or t
ncttggtcttgggtgtctgagtggcttccttaactccttggaccatcaggcgactctgtcagaagcccctccattgagtttagggaactgctaaagtttcacagcacatttgcttttgaaccccaccctcagatacttccccaagacataagggaaaccaagaaacaaggcatctgaagaactgcagagtttttacatgagatcaaagtagcatcaggactttttaatagtgaaacaatgaatcaagagaggaagaatcaaatgagagatggtaaatattccataaagagcaggattagagttctcaggcagggaatacccacagctatctttataccaacttaaatcaggcagaagctctaacaatgaggataaaatgaaataatggatgcattatttctagtgggacttgcattgctatttggcctaattattcgtgatatttcacccatataagaagcttcttcagaggaaagaaataacagtttgtctccttgaaaacaaagaacaaaggcctcagtgctctctagaagctcgcctatcattagaaggggaaagaatctgcccattagcaggaaattctccctagagatcttgaataagatctccccaaataatccctcagtgaactgcaaatgcctgcatggatgaagattcagaagccataggtcttgctgcagaggtgagagaggggcgatgcaagccaaagaaatgttctctctagccttggtctatgatgactggtgtgtgtgtgtgtgtgtgtgtgtgggcacatcatgcacattttaactataaattgggaaaacgggccacaccccaggattgcttcctttaatgccctctagtgtaaaggactaggtttggctaagaatgatagaaaatccacaataacaatggcctgaacaatgtacagattatctgtcactggggaatgggtccttgtagttcagcctggaacagccatctacagttaacagggacaaggccccaagcaagcctcgaccagggaaagagtagttgctctagtgtctgatgtctttctgggtctagggctccacagcatttcctt

SEQ ID NO: 61845 - DNA, 1483 bp, Bovine  19866881136356
  misc_feature (1)..(1): n is a, c, g, or t
ncggggtgggtagggagggtcttcagggtcttagatgacccgccctcccagggtctgaaatcagcatcaggaaggaacactcttcagtgctctgtttactgttttcttttttaaatgagtttatgactcatcttgatacatttttccgggacactgcttcctatggctgtaccaaggccaatggcacctagcaaaacagtaacagatgctgcatgtcactggggccatggagcactgatgggcaggagaggctgggacaaagaagcgctgtttcttccttatcaaccacccgccccccaccgaccccgtgattcaactagtcctattttgggggggctatgatccagagtggaagggccagctatggtagtcttcctgcctcaaaaacccatcgcaccaacagtgagcagccacttcagtgctgagatgatgacgtcagggagtgccctagaaccaggcctgcgctcacagccagacttacctgctgagcatctcactactctatcctgtaaacctcctgcaggcacgcaagcatgcacagaagggaaaggtggtgggcggccctccaccggggctggggccacaagggctgtttcccaccttcgctgtaaccctgtgcccagccagcgagggtctccccgcctcccccacgtgcaggggctgttcacggttgggcgctgctcctctgtgcctaagactctgtcccacccccccaacctgggccaagggggcattgtttcctgggggtcagacttctatggatggctacagcactgcccgttggaaatggtaaaaccaagaaagctgcgcagggtttgagttttgttgaagaaatgaggtggttcagagaaaagaggtctgcctgtgagatgcagaaaagaaacacgaccctgcaactgtggtacccaccgtgcaccacctggcctgagtcatgcgcccacaagactgcaaagttatagcttctactagcgccagagtctgacactcaggatgttgttggttttgtcaactatgaacggctgactttttcttcccccttcctctcttctttctctggaatcagatccatttagacagcaagaagagggagagagaagattcccccagccatctacgaaattctgccgattcacagttcctcccgcactcacacaagcattacaattctttgtgcagggaaatgattgaacagggcaggcagggagaggataaatgtgcagcccattttcatccaaattctcacacacacatgaatatacatagaactaacacaaaccatcctgagcccttgggctttattgggtgggttttttgttgttgttgttgtttttgggggtttttttttttttggcccttctatagtacaacaacatagcaagtatcataaccagactgctgagcattaagggtctagggggccaaattcagctgttcttaatgaccctgtctcagtccccaaaaggaggaggggaggggaggcggg

SEQ ID NO: 61846 - DNA, 1004 bp, Bovine  19866881362061
  misc_feature (1)..(1): n is a, c, g, or t
ntgagtagcaggccccgaggggccttggtttgcttgccttcacatgaaaggttgttcttgcttgctccctgcaacagcagattgccctttccagccagctccatgcactttgttttaaaggtttaaaaatagaatgaaaaggtcttgtagagttgtgatgaggcacgactccgtcttgtacacacgactgtgcaaagggaaggcagcctgccttgagttgcgtctgaccaggcaacatgagtacttacagtgagactcagatgccctatggatactgttcacacgctgacgtgtgacatccacgttgcctctggacctttcagaacagcctgcagactctcagcctcatctttcctcacctgcccagctcttaggtgcccagtttgagtcatgatgccctcctggctgactcactcatgccttcttcctggtgggttcttggtggagatgcctgccctcctgctgtattcagtggctgaacacttattcttcacactcaacttagggttgtctgccctggaaggcatctacaacaaagccctccctccctgcagggatgaaagagacacaggagaatccagaaattttcagacttgtagagttaaagtatgtctttccagccagcaagatactttcaaattaagacacaacctgaggacaaagaccaaagtggcagcctggccatcacgtgtttgttatgacctctgattggctgtgttcccccttcaagttcttgcatttccacacatatttcaggttaaagggtctaaaatgtgcatgttcagtcctgtctgactttttgcaacgccatggactgtagctggccaggctcctatgtccctgggattttccctgcaagaatactggaatgggtcactatttccacctccagggagtcttcctgacccaggatcaaactcacatctcctgtgcctcctgcattgcaggtggattctgcccaaatatttgggcaccacagcccaggcaagtgacacatcagataa

SEQ ID NO: 61847 - DNA, 1685 bp, Bovine  19866880451099
  misc_feature (1)..(1): n is a, c, g, or t
ntatattttcagaaatgtgacttaaataggcctgggacagtgcttacccttataaaaaccatccaaaaatgttcgtaattgttaggataatttcacagggaagtaatagcaggaaattggactatttgctcaaaagtacagtttatttgtaactcagatatttatgtatccagtttgcttataacgtttgaaaattctgagataactattctcttaacactgtggtaggtttgtcattgtctttgatttgtaggccttgggcatctatgtgagcatcagtttgtatctgaaattattatgaatgtatttgcatattagaaatgagcctgtcgaagttccattatttaataaggtcacagcagtaattctgattaatggagctgactcttgacagctctgaggataccgctaagacacttacaagtatacattttcataacagaaaatgcccttcatttccttgcctgtaaagaatgggtaataacatctaccttatggataataatgaaaatgagagaggttcctgaattagctcaatgagaacaagcgagcagagccgagttgcaggtattgggccgtcactgtcactggtctgcatgtcctgttcctgcccctgatccttgcagagggcatgactccagtttataatgtttaaatattctttgaccccctcctccaggtttttttgggagtatttgaaatataaatgtgaaatcttagagtaaccagagtttactgaatagctttagtgatgtttttaatgttatcttcagtaaatactgcttccctgctggctcagatggtaaagtgtctgcctgcaatgcgggagaccggattcaatccctgggttgggaagatcccctggagaaggaaatggcaacccactccagtaatcttgcctggaaaattccatggactgaggagcctggtaggctacagtccatggggtcgcaaagagccagacacgactgagcaacttcactttcacttcactttcactttcagtaaacacagttttgaaagcctgtacgttaaatcagtgcacctgggtagctaaaacgatactgtcataagacaatgcaaggctgtacttcagaaatccaagtgtgtctgtgagagtaatggaaagattccagtcagaaagagaaatttgccatcaccattctgaatttcttaagcttactagaagtgtatatttttaaagtctgtttgtgttttaaatacctcaataagatagaccagtttgacactctaaaagaaatttaaaaactcagccttcagacaaatatcatgtcccaagtaagaggcatactgagggaaagtcactatttagaggaatgacagaggactgagtttcccagttaagctagtgagaggaatgaacagcgttgttacaatgtgggaaaaatgaatcctataagctaaccattatttgtgaagctcattgatgccaataatttactttcataggttacaccgtacacagctttctagctatgcacttttctttgtttttaggcattaagttgccaataatgtagaatcttagccttctggccctgaaagttcatggactctatgatttcaaaaaggtagaaaaagaaataaggaatatgaaacatggggaagtttttgtgttttatttactttgtcaagataatcaaacgcttgagagagcttcctta

SEQ ID NO: 61848 - DNA, 778 bp, Bovine  19866880488583
  misc_feature (1)..(1): n is a, c, g, or t
ntaatagacatattttcaaactgcttatgtcccaactgtcttagaagtacagactaagaatgctgctgctgctgctgctaagtcactttagttgtgtctgactctgtgcgaccccatagatggcagcccatcaggctcccctatccctgggattcttcaggcaagaacactggagtgggttgccatttccttctccaatgcaggaaagtgaaaagtgaaagtgaagtcgctcagtcgtgtccaactctttgcgaccccatggactgcagccttccaggctcctccatccataggattttccaggcaagagtattggagtggggtgccatcgccttctccgagactaagaatgagggtcccagaattatacttcattccactgctcaatacaaatcttatttacatgagtcacaatcatattatgttctaagttaaagataccaaattttacaatagaaaatgtaaatctagttccattactttaggctagaagatatagtcacacaccacaacaagatggtaaagtatacacagaaggctctctaactaaaagatacatgaataggcaaataatttctacccatagtgttcaacactctacctgaaaccatctttgacaaatcccaggtcatctctccacggcaatttccccatcacttggcctcttagacaggactctgctcatgtcttcccataacttgattaatccgcacattcatctcttggacagcttaactctactgaccattaagctctttctaatgaaaaaccctaatta

SEQ ID NO: 61849 - DNA, 901 bp, Bovine  19866880707373
  misc_feature (1)..(1): n is a, c, g, or t
nactgctctattttgagcccccaagtcagtttgttatgaattaatcataaagcaaatatttgaatgaattaattagagaactcaagaagtggaataatttgagctaatccttgacaataggatggtttctcttgatatgaaactgggttactttaaaattcattctaaaacagtccatgcattaaatgttaatcttcttaagatgatgtcaaaacatttagtttgccagtttccaaaggatttaaaaaatcccccagggcctactttgatagtgaagagaaaagatgactgaaaagagtgggaaggagcagaaaagatgaaaaagagggtaagtgatatttgagaacaaagttaaagtaaatgactttaaaagtgatcaaacgctgctggtaaaactggtcaaccacctgtaaaagaatgaaacgaacactttctaacaccatacacaaaaataaactcaaaatgtattaaaaatctaaatgtaagaccagaaactataaaactcttagaggaaaacataggcgaaacactctctgacataaatcacagcaacatcctctatgacccacctcccagagtaatggaaataaaagcaaaaataaacaaatgggacctaattaaacttaaacacttttgcacaatgaaggaaattataaacaaggtgaaaagacagccttcagagtgggagataataataccaaatgaagcaaccaacaaagaatctcacaaatatacaagcagttcatgcagctcaatacaagaaaaataaacgagccaatcaaaaaataggtcaaagaactgaacagacatttctccaaggaagacatacagatggctaacaaatacatgaaaagatgctcaacatcactcattatcagagaaatgcaaatcaaaaccacaa

SEQ ID NO: 61850 - DNA, 2302 bp, Bovine  19866880724661
  misc_feature (1)..(1): n is a, c, g, or t
ntgaactgccccagtggctgaaaatgtgattctgaggagttaaggcatgatgtcattattcccaaagcagattctcagggagactgggcactcagcagtctgattcttggagccagaagcagtacatagacctggtgaagaactttaatctcttttgtataatgtagtgacttttttctcaaacggaaatgttaccaaatccatggtttgtcggctcaccacatgactgaccaataatcagactaggtgttgaggcaaggaatagtaactttattcagaaagtcagatatcctagaaggtgatggactagtggcgtagggcaccatcttactgggctctggatgacagtttgtttcatagacagagagggtgaggacgtgagactattaagtaaaaaggccataaatcttgcaaaacatctcctggcttggctagcattggggaagaggatatgctgagttcttcttttctgcagccattcacaggtgagcagggtcagaatgtctccctgtaagctggacaaaggcactttagcttaacattcaggcagaggggcagggttcctgaggcatgccattatatgcttacagctatagacagaatccttttggtgactgtattaacaaaagcaatgaaaagcaaaggttaaagtaaaggaaacagatccaacatatagtcagattttgttcctccctattacagaaacctcatgcgaagagctgactcattggaaaagactgatgctgggagggattggggacaggaggaaaaggggacgacagaggatgagatggctggatggcatcaccgactcgatggacatgagtttgagtgaactccaggagttggtgatggacagggaggcctggcgtgctgcgattcatggggtcgcaaagagtcggacgcaactgagcgactcatctgatctgatcagtatattagtgcaaccactgtagaaaacaattggaaggttccttaaaaaaactaaaaatagagctaccatatgatctaacaattactggatcacactcctgggaatgtatcagaagaaaataaaaacattaattcaaaaagatatgttccctcatgtgggtacacatctaaattgtaacatatataaattgggaaaggagtatgtcaaggctgtatattgtcaccagcttatttagctcttatgcaaaatatatcataagtgtggggctggatgaatcacaagccggaatcaaaattgctgtgagaaatatcaacaacctcagatatgcagatgatacccccctaatggcagaaagcaaagaagaactaaagagcctcttgatgaaagtgaaagagcagagtgaaaatgctggcttagaactaaacattcaaaaaatgaagattatggcatctggtcccatcatttcacagcaaatagatggggaaacaatggaaacagtgatagactgtattttcttggggtccagaatcactgcagatgttgactgcagccatgaaatcaaaagatgcttgctccttggaagaaaagctatgaccaacctagacagcattaaaaagtagagccatcattttgctgacaaaggtctgtatagtcaaggctgtggtttttccagtggtcatgtatggatgtgagagtgggactataaagaaagctgagcaccaaagaattgatgcttttgaactgtggtgatggagaagactcttgagactcccttggacagcaaggagatccaatctgtccatagtaaaggaaatcagtcctgaatattcattgaaaagactgatgctgaaactccaatacttcagccacctaatgtgaagaactgacttatctgaaaggaccctgatgctaggaaagattgaaggcaggaggagaaggggacagcagaggatgagatggttggatgccatcactgactcgatggacatgagtttgagcaagctctgggagctggtgatggacagggaagcctggtgtgctgcagcccatggggttgcagagtcgaacaagactgagtgactgaactactaccctcatgatcattgcagcattatttacagtagccaagacatggaagcaacctaaatgtccatcaacagaagaatgggtaaagatgtagtgtgtgtataatggactactactcagccataaaaaaataaaattttgccatctgcaacaacatggatggatttcaagggtattatgcttatgtaagtcagacagagaaagacaaatattctatgttattacttacatgtgaatgtaaaaaacaagtgaatataacagcaagaaacagacttgtagata

SEQ ID NO: 61851 - DNA, 715 bp, Bovine  19866880907500
  misc_feature (1)..(1): n is a, c, g, or t
ncataaattagaataaaagactgagaatatttactttttaaagcagatatttatttactgctctgatctactcattaaaaaaaaattacagtagatctcttctcatataaagatttttttttttttttggtagcatttgttagagccaacttaaaggtaaaatttcttcccttctagaaaatcccaattaaactaaaactaaaaaaatcccaatttagcaagaaaggaatttatgagtgatttgtggtgaaatgcagtcactaatattttacattcaagacaattttgatattacactcaattcaaattattcctgttaatcagcccggatcttatttaatgaaagtctaaatgtctgttcttcgtccacctcacttctctgttttagaatctaaattgctatagctcttagtttggtcctggtaaaaatttcatcattcagagaaagaaagagagggagagagaatggattagctagtaagctgggattctccaacatcttaactgctcagggttattcttttaattcattacacatcatgaatttcatgtaaggtttgcaagaaaccatagaaaaaacttaaaagcaaagcattggtttaaagtttgacactaagaataactcaaggcactgtgatggtccagagaacgaagggaggtttgggaagagtatgagctagggcttactttagtagtcagagctaaatggtatgta

SEQ ID NO: 61852 - DNA, 1667 bp, Bovine  19866881119005
  misc_feature (1)..(1): n is a, c, g, or t
ntgctgctgctgctgctaagtcgcttcagtcgtgtccgactctgtgtgaccccagagacggcagccctccaggctcccccgtccctgggattctccaggcaagaacactggagtgggttgccatgtcgttctccaatgcatgaaagtgaaaagtgaaagtgaagtcgctcagtcatgtccgactcttagcgaccccatggactgcagcctaccaggctgctcccatccttgggattttccaggctagagtactggagtggggtgccattgccttctccaaatcaactgtagttcaacttaaaaaaaaagaaaaaagtattacagaagctgctaaacattgtgtgaagttcaaaataagtgtcacaagtttaattttatacatcaaagacatgttaactttgattttaaaagattatatgaaaaagctttcaaaacttagacatcttataaacaaccactacttactgtcatcaatgtcaatatttttttttttttagccctcatagaaaaactttattggaaagcaaggaaaactaccaagatacgaatgaagacaaaaaataaaaaaagttcagacataaagtgtatgaccttggtttaagtggaaatggaaccgtttggtggtttgtagttagtgacctatattttcactttgtgacactgctgctgctacagctaagccgcttcagttgtgtccgactctgtgccaccccagagacggcagcccaccaggctcctctgtccctgggattctccaggcaagaacactggaatgggttgccatttccttctccaaggcatgcatgctaagtcgcttacattgtgtctgattcaatgcgaccctatggacagaagcccaccaggctcctctgtccacaggattctctaggcaagaatactggagtgggttgccatttccttctctacaatgtcaatattttaacatctttaattttccacatgatcagggatgcttacataaacaatagctacaataatcatgtgaaaattacactaatgagcttaactgcaattatcatgtgaaaattatattaatgaactaatggaaacatcctaaaagtattttatactggtggggattttaaggttcgtgggacccttagaaagctcagtgttgttccctcttctctgtgtaggcaaggtggctttgggggttttgaggaaacccaaaaccattttttccagtctctctccaggatagctaggttaagatagtcagaatcatcagtgtgtttgagtcaacccagacatcaaaaatacttagtcattgtatgaaaattagactataattagagaagaaggtcacaaagtagttatcctttttctaaaatgtagatttttattttctcattatagcctactttttcaaaacccaaagatcatctttgaaaaaacaaagaaaaagaacaaagaaagctttcaaaaggtgttccactaagagactgcccttaatcactcactacagatttcaacaaagtaagaacttacatatgctcatttctaagttctttttaaagcatgtgaacagaagccatgatctacatgttctgaagatattcaatcccagggttggtctatgactttataagtgtccctgatctcatgatgctttaaggcttggaggcagcctgacgagtgggatggag

SEQ ID NO: 61853 - DNA, 1790 bp, Bovine  19866881132686
  misc_feature (1)..(1): n is a, c, g, or t
naacatcccccagacagaggagcctggagggccccagtccatggtgtcgcagagttggacatgactgagtgactatcatacacaggctgagagaagcagactgccctctgcatgtggctgggtatcactgaatcctctaagggcctggaaacagtaccaatgatggcccaactgaggaagaacaaaattggtgaattaaaaaaaaaataaagaactcagattgtctttactcacaaatgacaagatattttacacaggaacccccaaagaagctatgaaaaaactacatctggataaggactccagtaaaattgtagcatacaaagtcaatgtataagaagtcaatcacttttctatatcccagcaatgaaaattggaagtttaaatacatatatatataaaatttataatcacaccaaaaattgaaacacttcaggttaagtctgacaatctatgtcaaggatcttacatgtgaaaaactacaaaatactgatgaatgaagtcaaagaagttgtaaataaactgggaaatacttcatgctcatggatgggaaaattcaatatggtaaagatgacagtttttcccaactaaactacagatttaatgtagtcccaactaaaaatccagaaaccattttttttaaggtatcaacacacttaaacatgtttatggaaaagcaaagaactgggaattagcgaacacaacactaaaaggaaagaataaagttggaaaattcacactgccagatttcaagtcttactataaagctatagtaattaagacactggtatcagagaacacttgccaaaacttcaacggtacttcttccattgaccagcaaccccatatttctcctcagagtactgtttctccacctggtcccctcaaactagcttgtcacatttctccatcttactttgttcctctcacttgggtcattttaaatgccccagctttccaatttccatgagaaatgctgccaacccccaacacagcaccctgcttcacttttctgctttgcagatacagtcatcacactgcaatcatccactcatttctttgaccacagaattgcaagttgaaatgcaaacagtaaggtttgttcatagaaagaatccaggcaccagttgcaaagttttcctggaaatacagccaggggaactacacggtctatcatggcggtgtgacactccatcaagagcagctgaaggaaatgagcattagccaaaagatccttcaccaggacgtcagcggaaaacatgtcatactaagataaacatctaaaatcccttcattctgttgacaatatattcactgtatcccatttcctctttttgtcacctatctaatctttccttctaatcttcaaaatctagttctctgcccaaactccctggtctctttcagtctttttcagctgtttcctctgaggatttcatttcctgtgctaatcttttgctctttgctccactggttctattggattgaactgctacacaatgggatgctttctattgttttgcgtgtgagcgtgtgtatgtgtgtgtgtgtgtgcacgcatgcacatttttcagtgctttttcaccttaaagaaaatctcttaaaggccaaaattccatttcacacttcttttcaatccatatacaaatatatttaattgattaatatctgtttctaagcaaacattctgccctaattttagcatgaactgggaaaatcatgtaaatttctgaatataaatgtcatttaatcctacctataatcatagtgaatgtatgttcagcgataag

SEQ ID NO: 61854 - DNA, 1941 bp, Bovine  19866881286579
  misc_feature (1)..(1): n is a, c, g, or t
nttgaagatattttaaagataatatttaataataacatcctatttaaaatgatgctgttaaatgctacactcacatgtcagcaaattgggaaaactcagcagtgaccacagtattggaaaaggtcagtttgtattccaataccaaagaagggcaatgacaaagaatgttcaaactatcttactagctcatttcacaggctagtaaggttatgctgaaaatccttcaaagtaggcttcagcagtacatgaactgggaacttacagatgtacaagctggattcagaaaaggcagaggaaccagagatcaaattgccaatatttgttggatcatagaaaaagcaagggaattccagtaaaacatctgcttcattaactatgtgaaagcgctgtgactatgtgaaagcatcacaataaactgtggaaaagtcttagagatgggaataccagaccaccttacctgtctcctgggaaaccatgagtaggtcaaaaagcaacagttaaagaccttcatggaacaaccgactggttcaaaattggcaaaggatcacgacaaagctgtatgttgttatcctgttcttttaacttacatgtagaatacatcatgtgaaatgccaggctggatgaaatgctaactggaatcaagactgccaggagaaatatcaacaacatcagatatgcagatgatatccatccacacaccagagttaaaacttttatccagaaaaacaagttaaattctcctcctgtgtcgagttattccctcaagaaaaatgaaaaacagtgctttcccagttgtctgttttaacagatttctccagtaataatagcaagtaatttgcatgtaatctaacccatctttaattaagttgttatcccattcactcccttaaaggccaacttgtatctccaaacagatgtgacataattaccagctcgaagattgcttctcaactgagcccactgtatttcccttcctctcttttttacatgctaaaatttccatggcttcttggagaagagttaatgtcactgagcaatttgacgatttcagaaaattgtctccatcaaatctagcaaaacaggatatattttacagagcatttcacttgatatcccagcaatgagaaatttggcattgtaaagactttataggcttttaaatttttatctgaacacaccaaacagacaccaaggttctatttctttattctttctacttctttcttccactaattggaaaaggacatacacatttaatttctattttattcaccaactgcattaattcaaaatggtctctggtgggataaccaacatcaatatctattccatacatcccagcccatgtttccctcatagtcacagagggttgacacagagcaagttactgagcctcaagagtgtcttctcctcacttagagaagaggcaacagacacaagaaaaagaaatgaccctggaagaaagcatagggcaaaaataattgccaccggtcctccttgagtaagggcttgtagtttcatcttcgtaggaggaactaccctgtatgcgccttctggagagaaaagctacagaagagcagagctgctcaggtctcaatgctgttctggaaatactggacaattcaggctttaggggcctccagatagtctcattttatgttgctttttgttttcctggtgacttatgggaaaaactgtttttaaggtgaggtcaaagaaaaagataagagaaactcaaaagaaggagaacaagaagagaggcaaaggagaaagtctggagcaggggctgaggcacaggtatattattttttagttatgtgaatttcatatgaaacccccaaaatattggggctcaggaaacaactaaattaaaacttaaaaggacttctgcttttgattgatattcctcagaaaatatttatcagtgtgtttgccatcaat

SEQ ID NO: 61855 - DNA, 4488 bp, Bovine  19866880378688
  misc_feature (1)..(1): n is a, c, g, or t
ntgtgggagacctgggttgggaagatcccctggagaagggaaaggctacccactccagtattctggcctggagacttccagggactgtacagtccatggagtcacaaagagtcagatattactgagtgactttcacttatagaaaaattagaaaatagagataagtcaaaaatcagcactgttattttaataatcagaggaagtgaacatgacaaaataatgttaaaatgaggtgaaaagaacaaatggcaaggttcaaattttaagacttctccctcagtaaaaatacctcttatttacctagaggtttccaatttagagtattttcttatactttctgactgtgaaagcaacagtgaacagagtattttagagtagttttggctggataatggaactgcaggcaatttctgtttcccttctttaccattttttagggagtggggaagtgggagttatctatattactagatttttgataatgaaagtgtttcattggtgtaagagaaaatcagttacttttaggaaacatcagctacaacaaattgcagataaggaagctgaggccctgagaacttaagcaatttgctacaaagtggaagagccaggacttaaaagggctcaaaacttctttccccaaacccacagccttcccacctggatccctttggtggtgcaacacaggactcttaagtgttcaggctgagtctagactcttgggtaaactaagacccaaactattgctaggcaggtgcatatggatgatcctcttgtttggagaagccatgcatttaatgcactgcagctggagttgtgttacatttcctgagaaagcaacctaaacttgaccccagccttttcaaattcccacaccgcagagccgctcctcacaataaacagggcattttacttggctcacccagccacaattcagcttaaaaattgtacaaactcgtaaattttaattctggtattcaaaacacatgtttagctggtgggatttaaaaaaacactccctggcctcatttttgttcagagcaacgcgtggtggttaatccgaaagctttgggtctggctcaccttttaatgccacatagcaattcattttcgttaactatctacactgcaaatcagcactttggaaacacactcactcggacaatcccccttcctcctccagccatttccaactcagagtgagagggggccactgaacattctctgttgtactatacagcacatttgagacctcacactcacccagagtaaagctgctcttcagcccgaattctcacgcttgtttgcactctggccacactgctgggtcggcgtgggttcctggcaagaggcacggtttctctctaatcagccacatgggctccaggactctcctctttgctccccctctccccgctgcattgtctgacacgttcccagggagcatggggcttccctggtggcttagacagtgaagaatccacctgcagtgcaggagacccaggatccatccctgggtcgggaaggtcccctggaggagggcatggcaatccactccagtattcttgcctggagaatcccagagacggaggagcctggagggctatagtccatggggtcgaagaaagttggacacaactgaagcacctgagcatcagagagcatcaggaactttgactctgtgctaaataaaaccaaaccaggaggtttttctagaggaaaattcatagtgaatattctaaggaaaacatgcatgatttgggaggctgagcacaccacagggtccctccatgaacgcaggaaaccacgagccccctgaactgatgggaaggatggctggcctgtgaagagacgaagcaagcatgttctatggaacaggatccatggcaccactggctctgatgtcatctcttttttaatatttatttgggggatcttgtggtggcatttggaatctttagttgcagaatgcaaacttagctgtggtgtgtgagatctagttccccagtattcattcgtgccttcacttccattaacgggacagaccagtcagtcctaaaggaaatcaatcctgaacattcattgtaaggactgatgctgaggctccaatactttggccacctgatgtgaagagctgactcatttgcaaagaccctgatgctgggaaagactgaaggagggaggagaaggggacaacagaggatgagatcactagatggcatcactgactcaagggacatgagtttgactaaactccaggagctggtgatgggcaggcctggtgtgttgtggtccatggggtctcgaagaatcggacacgacggagcaactgaactgaactgatgaaagtcaaggaggccttgaccggtggcctctccacggggtttcccacaagaagagaccataacctgctacacatctcccatggtccgcggatcagagcaggtgagagaattcgtaagctatggtaaatcagtaatggaggccagaactccagattcttactcatcctaagctctgtgctctttagacctttccatctctagacaaaaagcagtgaagtcttgatagtgtgtgatggatggggtgagagctctgaatatccacaacatactggggctgtctttgcagcttgaggccagaacatgagcccagtgatctcagacaaacgcctccctgactcaagggtcgtccatgaggcactgacccaacaaccggcagcttcccaaaccatcaccattaatgacaaactgataacctgttaagcacaaggaaaggtgacagtgaagttaaagggagacctgctcttctctgggcttcccaggtggctgagtgggaaagaactcacctgccattgcaagagccgcctgaggcacaggttcaatccctgggttgggaaggtcccctgcaggagggcatggcaacccaccccagtattcttgcctggagaatcccatggacagaggagcctggcgggctgcagctcacagggctgcagagtcagaaatggctgagcacacacgcaatggctcttcttttggtcaaagatagcttgaacatcacaccgtgctgagcttcagatccagtccttagagctcaggccacactgaatgtgtctgaagcagggctggtgtggacccaactctgtttaccctgctggccaaaggctgccctgggggagccatgctggcgagctgtggtcaggctcacaaagccaccttgtagctctggggctgagcctcaatagtctgtctgttacatcttctaggccattttgatgtgtcatgtggacccagctgccaagcccggcaaccagctcaaatccttcaggcattgcttcttctttctgacgtcatcacatcgaaacacatgacaccacccacaaatacctgggcagccctccaggaatagcttcctcctcccccttcctatcttccactcacagcatacctactgccaaatgataaaaagcagcaagacccctttatgccctgccaggtaaccaagaataaagcccaagaggagtaaggagactaaggatatttctacttttgatcaagctctagacacagagttaaatgattaagaaaaaaaaaaagtgaactatcacaacccaaactctgatatgattctgcaatcagtctgctaagtctgctaagtcacttcagttgtgtccgactctgtgcgaccccatagatggcagccgaccaggctcccctgtccctgggattctccaggcaagaacactggagtgggttgccatttccttctccaatgcatgaaagtgaaaagtgagagtaaagttgctcagtcatgtccgacttttatcgaccccatggactgcagtgcaccaggctcctccgcccatgggattttccaagcaagtaccatggattatttaactctggcaaatcaatgtgctaataaccagaaatttgaagatatatttttcctcttcaaacctaatagcttttaaatttcaatttctccttgccttaaggaatcataaaagggtgagaacaagagctctcccaggctgcacttggataccctggtggggtcacactgtgtccgctgcgtcctgctgcctgtcaggggcctgcctgtcggtacattgcttcaaaactgccactgccaccgaaggcagggaaatgggtcagcagctgccaagtgagtgacaggccagctcactctgccaaggcccagtcactctcttttcagaagatgtacagccaaagtaggccctgcacccagccattggggtcactcaggaaaatctcagctcatttgacttagaatctgataaatgaaacctctggcaagaatgaagacacagccataacagacagtgacccacttgtcttctcttatgctccacagtctccccaggcaaagcaagctcagaaacatctaaactccagcaatttccaaatgggtatctccagagccaacttctctcctgaaagtttgctttccaaagactatttccca

SEQ ID NO: 61856 - DNA, 1161 bp, Bovine  19866880674943
  misc_feature (1)..(1): n is a, c, g, or t
nacaaagagggcacatgtgagaatgtggccaaatgcaaactgcctaaaacaaatcagaacgcctaacaacacagggagccagcagagtgctttgaacatactgacacaattataaattcactccatggtgctcaaaactcatcaatacagggtattagagccagaaacattttcaactgatttatttttagagaatttactggagacagatttaaaaattcatatttatactatcaaggacaggaggtacaattagatgaaaacaacttagaaggtatacacacacaactctcaacaaaatattacattgctttgaaatgtttaaaaagtttcaaaacttccccacccacacaaaacagcctagtctctcaaacttctgatcactggtgccaaaaatgcatcaagatggcaaaagcagttggtacacaaatatcacactgcctataaacatgaagtatgcagcagtggctgcaaagtcactaagctaatggctgggaatagtcatttttgccagttcttacatagccatttagcatctcagcaataagagctcagaattttgacctttctcaaaaattcttcattttccctttctccctttttgttaatagcaaagccatgctaaaactacagaggttttctttgaaaagaacagtaagataggagttacaaatgtgacctcctctgaactgacttttcccaagactgggggaagcagtggtcagtagaagggagggaagtttcccacggaattgttagatgctcagtaatgacatgtgaaagcaaaaaaaggggaagggagggacggtgcaaagtgacccatccacctacaaatccatccaggactttaaacagagctaaggaggagagaaacagggctgggtaaatcccacaggattactgtctgagagcaagaggcctgtcccctgcttgaaggacgacagatggccaaggctgggcctaacatagtgggatgggggctgactgcgtgtgggctctggctggttcaactcacaacactccgccacccccatcctgtgcccactgagcagtctcatgcctcagacctgttccatgccctacttctgactttacattccagtcccatttgtctcggagaaggcaatggcaccccactccagtactcttgcctggaaaatc

SEQ ID NO: 61857 - DNA, 2587 bp, Bovine  19866880756560
  misc_feature (1)..(1): n is a, c, g, or t
naatactggagtgggttgccatttccttctccacctaccataagataacccatgagtgagagtaggttggtagcctggctccctccccagctcaatagaagcccctctcccacccctgacaggacagggagctctatggagtgtgagagcaggtggagacctcgtacccagtttctctgctgtgcccttggccgtggggtgcttcagcacggggctgttggaaggggtcccgctgagcctgctgcgcgtgggcagggaggccacaccgggccagaagagctcggcactcttgtccgtctgcgtgctgctgtccttgctgcccgtcttagcgtgggcgctgctggccgacgtgccgggggttgggggcgagagtgtggcggcagagggggtgggcagcaggggggtggatgcgtggtcattgtgctccttccccagcagcagccctgtgggtggaagaacagcttcttcagtaccgtgcctcaagaagcaagacccatcggctcggcagggatacagacgccagcgaagagaacggatgtctgtacaggctggggagcggtggactgggagatcaggactgacacacatacacacctaggtggaactcgtggccaagagtctgcctgccagtgcaggcgatgcaggagacttgggtttgatccctggggttgggaagatcccctgaaaggagggcatggctacccactccactattcttgcctggagaatctcatggacagaggagcctggcgggttacagtgcatggggttccaaagagtcagacatgactgagcttacacacacatgtaaaagaggcagttagtggaaacctgctgtatagcacagggagcccagctccatgctctgtggatgggataggggtcacagtgggaagggggtccaagggggagggacaatatgtatatggatggctgattcactttcctgtagagcagaaactataacattataaggcaactacgttgccaacaaaggtccatcgagtcaaggctatcatttttccagtagtcatgtatggatgtgagagttggactataaagaaagctgaacacagaagaattgatgcttttgaactgtgatgttggcgaagacaagagtcccttggacagcaaggagatccaaccagtccatcctaaaggagatcagtcctgggtgttcattggagggactgatgttgaagttgaaactaatactttggccacctgatgcgaagaactgactcactggaaaagaccctgatcctgggaaagattgaaggtgggaggagaaggggacgacagaggatgagatggttggatggcatcaccaactcaatggacctgagtttgagtaaactctgggaactggtgatggacagggaggcctggcgtgctgcagtccatggggtcgcaaagaatcggacatgactgagcgactgaactgaataccccaattaaaaaccaaaaacaaaaaacctagcatggggcaggggaggagctgtcacataaactggttataatataacaaatgataggatactactattctgaggatgctatggaaagaagggagaagaggtaccttacaggcagagtgtcgaggggcaggggcactcctgcaaggctttctggagacaatgctttctttccatatgcaacccaggagggctagtcctgagcagtggtggcgtgtctaagaaaacctgaaggcttctctgctcctagacacagccctgttggcctgctgctctgcctaacagcccccaactctactcctctctggtaatgaattgtctccccagggcctgggtcaaaacaagcacgcctcctggttacagcaacagagttgtgtacaatattccccagagggctccttgtgatgaagagccatgtcttctaagaggcaggaagccagctgagttcctggggagggcggctcagctcttttcttcccacccatcccaagaccaaagcgttcagggtgggaagagggcggccagctgggcaaaagggaggcgagacgtgccccgtttcttcaatgtctttctgcaagctggacagcacagcaactgttctaatagtgaagtacggccctcattcagaaaagtgccagcacttcacaccagcctacagaaagtgcagtaagcacaatcaagtgtctgttcatttaacgaagttcacacagtctccttggtagggctatttcagggtgcccattcataatgcaacacaactcaatccagtctgtctacagcgatgcttctcaacgtgttcacacacatcaattacttggatatagttaagatgaagattcaagtcagcggggcaccttgagcttctgtttctctaagaagctcccaggtgatgctggtggtgctggcccacagaccacaccttgaggagcaagaagccttcactaggtgcttcccagacatcatctcagttcgtatgaggtaggtcctgttgctctcttttgttttatagaaaaggaaatggccgatattagtgtctcacagtggagaagtagcagaaatggcatttgaagccagaggtgcctgcctttaagtccaccttgtgtccttttcca

SEQ ID NO: 61858 - DNA, 2663 bp, Bovine  19866880769623
  misc_feature (1)..(1): n is a, c, g, or t
ncgtagacttggctttggactgttatagttgtagggtgaggatccctctgctcgggaatcctttggaggaggtgggggctcctgggcataaatgagttgtttcctccaacggggttccctatgttcattctccaaaataaacaagtatacataatgttgttgatttttggagatgtaattcttgggatgcccctttgccaagaaggcagggaaccggggagggacctgcctcattgtaggcacttgataatgtagaggaaaggaggggagcggggtgggtgaggtccccgcacaaagtcctaatgcccccttcccccgctcagacctctccctcacgttctggttgtgttctttgtgtctgaatcccaggcccaggcatttagctctggtccgccaaagctgggctctgtggccttaacctgtgtgcgccggtggtggtgggtggtacttgaagtggttccattttagagcgagctgggtaggcctgtggtcctcctggggaacgggccactgatatgtcccttctgtttggcagagaactctcccggccacggaaagtcgcctgaccacaaaggccgcgtcagcaacttactccacaagcctgagttccccgacggggagatgatggaagttctcatctaaccctgggctccctgttgaatttaacagtggaacaccgaggcgcaaggaacgtggcaaagagaaagaaagatcatgaaggttgcggatgggaaatcagggatggtttgagcagataaggatttcagattagtgagaattctttttataaatgttaaaacaaaaacagaagacctacatgactgaagatgaagaggatgccgtggatttttcccgcttacggtggaagagagaagatgcatgtaggtttggaaacaaagaagatctaggaaatgaaattttttcattgtacagaaaaatgtacctctcggggagggtctgtgtacacccacggtctggttataaacagataaacctgagcatggatcttccttggaatacgcccattctccttgcctcttagcttgttttgagaagaacctcctagaaatctctcagtctgtcttgacacaacgtcatttcaactgtgccctccatgatgtgtcctgtgaatgcgtgtgggtgtggcagggaggagaaatgtccagggtgatggagggtttaaaaggccatctccacctctgtacctgattggtttggattttcaggaggttatgggccttcttggcttttctgcaccgagcagtatgcaggatgggagctttctggtcttggggttcacccccgctcacatctctgagttcatctctgtctctgcctcattctctttcattataccttttttccttcatttttttccctcttgtaataagccttgcagggttccttcggtctggggtttgccagagcagtatctgatgggtcatcatgcacagtgactagtgggacaaagccttttggtggcttcctggcagtttcctccgccttggaggagttgggctacagcagttgaccttctgacagtgaacttggtcagctccgatgagacagaggattcatggccactgtgacgtcctgcattaagctcctgccaccacaactttctcccctcacatcagctcttgcgtggagttctgattctccacctcattgctccgttgaggtaggactttcaggattgcgctccaggaaccaagggacacttgacttggtggcatctagaatctcccctggcaccttgtcccggcttgctactgtttgtggcccctgctctgccatccccttgaatccttctggatgtagttggtgagcacacagattctgtggctgtcagcagtcaggtccgccctgctggggacttgcttcgtaacctaataggccagtatcgatacagtgtggttgggttgttcaagggtttagttcgaagcaactggtccaaagtaagacagaaggcaccaggtccaagaagcccggaatgagtgaggccgtggcccccttttgccctgtgttgtagggttttgcatctgacgtctcagatgtcggcttcctttacaaacctggaaggtgctggatcagaggagagaggctagtcaggccatcagatgcccttgtggggttctgatgaatttgctgcctccgggccagcggcatttctgtcaccctgggtcctcatgcccatgatctgagactttctcgcatcccacccaaacgaagccctgaagaccccatcacttcaaaaagttggctggggtagctccttgaagggttggtttttggagtgtaacctgggtgcctgcctgcctgccaagtcgcttcagtcatgtccaactctgtgcaaccctgtggaccatagcccgccaggcttctctgtccatggcgattctccaggcaagaatgctggagtgggttgccctgccaccctcccagggatcttcccaacccagggatcgaacccgtgtcttacgtctcctgccttggcaggcgggctctttaccacgagggccacctgtggggagccctgtaacctgggtgaagcctccccagatccacatggtagaagagggtgatgagtgtgggtggagggaaggaaactgcggctttgcccaggagcttcctcggagctgccggggtcagaataaacagaa

SEQ ID NO: 61859 - DNA, 1006 bp, Bovine  19866880771120
  misc_feature (1)..(1): n is a, c, g, or t
naaatttaaacctttaagcaatttttaacccttaaaaatatttaaaattaaaaaggtgtattaccccctacatttttctttactaatgatttttattttttcctttgaattaattaggcaagtcagatacatcagtgtggaagatttattgttacaagtttgagtgaaataaagatttgttagtgggaggcaaatagagcatttaaatagataaagtttgaattggacatatggttactgaggcattttgatttgtctttttaattgctttgttgttactatcttaaatgatttgcttctggaactcttgggaccaccagtattgcagtaggacctggggagggactggaagtacttggcagggcagcagctgtcttactacattttatatcacatgtccccttgtgcacatgcagttaaatcttacactgtggtgaagggatggtttttataatgctgcagtaaaattggattacttagctctgttcttgtctcatacctaaaataaattgtttcatatttccacataggggaaataagggaatgttttcctttctgtatttctgtgtttaaaaatgtccttttcacatcaggaaatgcccagttctttgtccgctttttctgctcgttttcacagttttttcctcctactcttcttgggctaaaaagatggtcctttttcacgaatatcactgctatcatcattcatagcataattatacaggcatatttaacgctgggtttaatatttaatacagtgacaatgtagggtaatacccataatagcttcagtttcttacttggcaaagagatttcatatttaagtgttagattttctctttggtgaaatcgtaacatatcaaaggaccttggaagaagggattccctttgatgtttggtctcctacttaggtaatacctattgcagtttgagtttatcttgtagtattaatctttggagaagtttgaattaattgatacacagagagggaaactgacttcctaat

SEQ ID NO: 61860 - DNA, 1362 bp, Bovine  19866881301910
  misc_feature (1)..(1): n is a, c, g, or t
natggacctttgttggcaaagtaatggtcaaactcctttgtaaaaatttgtttatatgtctgcttctcttcctgggctgtgagttccctgaggcacagaccaagtttcattcttttcatcttttactgagtatgtttatttcttgcataaatggataattatctctacttacacaaatgaagacccgggttcaggaatactgtgttctgcctagtgtcacaggcagagcctggacgtgagccagatcttctgactccagcccaggactcattctgaggttcagccaaacccacaggatggccctggggactataattagaaagccaactaccctagatcaactttcctcttctgagaagaggagaaaaagcagagacatttcttgggttggttccattaaatctgttaaagagattgagcagtccaggtgtggtagttgagatgcacttttgcttggaggctgggaaataaatgaggcaatgattgaaatcgaaagagcccatggagttttgtttattcagcacacaagtattggtcacctaccatgtcccaagcatggcatgaggtgttgagaatacaactacgaactaaacacagtgcagctctctggaaactatttacctagtctccatatgttgatgtcagcttgcggaaggtggagcctctgatgcctggacattcaccattggtgcatccagctcgtgatgttgggggttaataatatggactaaattgaagtcttgctttctgaagaatccctcagggtctcacttgcaggtaaggaagaggattactatttagatggcaggagggagaggtaagggtcacagaagggcaacaagggttgggggaggggagggaaggctgagtctgactctttcgaggcagagcttgtcctccccaccctcttcctgactgtcctcatcccatctctagattctgctcctgcacttgctgctccctcccttctttggctcacctccctccatctacatttttcagcatcctggcactggtcaagctcctttgtaaaaatttgtttatgtctgcttctcttcctgggctgtgagttccctgaggcacagaccaagtttcattcttttcatcttttgcctagtgtgtttatttcttgcataaatggataagtatctctacttatacaaatgaagacctgggttcaggaatactgtgttctgcctagtgtcacaggcagaacctggacgtgagccagatcttctgactccatccagcccagggctcctccagagttgcggccacacccacaggatggccctggggactataattagaaagccaactaccccagatcaactttctttttctgagaagtagaagccaagg

SEQ ID NO: 61861 - DNA, 3131 bp, Bovine  19866881597210
  misc_feature (1)..(1): n is a, c, g, or t
ncgactccatattcttgcctggagaatcccatggacagaggagtctgtgaggtctcagagagtcggatataactgagcatgaacacataggcatccttgctttaactccaaatcagaatgtccctccccattggggtggctgatacggagactgggtacaggaataagcctcaggaggcatagagtttagtctcagccctgtcccttagctcctatggcactgttccttcaaggtttccccttctagaaccatgtgaggctcaggaagatcatacttgtggcagatagccatttgtgtaaaagtttaacgtccagagaaaagctgaaattgtgggcagggctttcctctacactcatgtcccaggcctgcctgtcctccagaactgaagcccaccaacccactgcttcttttctgccttccccaacccccatacccacagccgcttgctaatgtagctctccccatcagaactggggataggtcacatcctagcaatgctgctcttccaggcttgcttacactaaagcacttggccatgctttatggtatgctatcctcacaacgtctttctgagtcaggcagagcaggtgttaatacccccattttataactaggaatccaaactcaaaaatgtggaaaaacttgttcacgaacatagaactaagtggcagaaccgggattcaacaccagatttcttgaacctaacgctgtcttgctgcccttgtagcaaggtaatgcaattgactggggcccctttaatccttcctttccttcctgcctcccttccatttattggaatgctgggaatatgaagagattggttctgtgtcaggggacttaatccaaggtgatgagagctgtctttaacagagatgcagacctcataaagagctctgggggcccagggcagggcgctggcacacccacagctgtgcctacagacagaaacatgtatcttttgaatggacgtgtaagccttatccaaataaccttgcttggggaggcagcaatcatcatgtctacaggaaaacatgcttcaatttgcctgccatgccctagactccattccaacttaatgtgaaaaactcccagggtgagaaagacggcaagtccagtttccaggcttttctcttggaggctgttttgaagagcagccagtcagcatggcactggggatggcttgatgttcctctttggggtgaactaggggggcgattagagctgtgtcaacagctttggatgaagactctggccctctaaccagcaggggagactgggcgagccttgggcagacagattcgggctgggcccagtcagcttctcaaatgcgccctgggtactaaaggggaacagctccagaagtcttccttttccaaggaatcacgcaccgcacagcctttgagaagccacctcacccccactcctgtggctagggtacccagccttcaatgacactgggttctaaggtcatcctgtgagagcagcgctcaccccggggaagacgctgatcagcttcatgtcgtagctctgtcctggtttcctccactgtaaagcaagggcagtgataatacccactctgccctgcagcaaggatgacaggagttcatccaagtgtgttttgcaaattctaaactgtgattatggagatgacggggcttccctggtggctcagatggtaaaaaaaatctgcctgcaatgcaggagagcagggttcaatccctagcttgggaagagcccctagagaagggaatatctacccactccagtgttcttgcctggaaaatcccatggatagagtagcctggtgggctacagtccatggggtcacaaagaattggacatgactgagcgactaacactaacacttcactttcatgaggatgattattgttaatatcaaaattattatggtcactgcctagtttgggcccagagacccatgaattcaggtgagggctgaagacaatctggggtcatggggatgtgctgattaaaatgtgcctgcctgccattggagggctggaaagagaagggggctgctgtcttttcagagagggatttcaagagcaggggtccccaacctctgggctgaggaccggtgcctcctgtcagaccagtggcagcattagattagaaatgaactgcacaataagtgtaatgcacttgaatcatccccaaaccattccctcaaccccctggctatggaaaaattgtcttccatgaaatcagtccctggtgccaaaaagcttggagacagctgcaaatagagcatttccgggttcattttctggaggaagagagatgggatggaagctccaatgtaatgagttccctacccacctccactctgctgagcactgttcagggtcactgtcctgggaacagtgcctgcatgcccagctgacactaattggttctcgtggcatgtttggctgctcagaaaaagcactaaatggcagggcagagcttctgtttctgagtctcccaggatgggacccacagagggaaggagactgaaaaccaacctcacatcccaggatttcccagggctcggcccacttaaccactaggtcagttttcatctacacaacacctaaggctctcaatgtaagaagacctggaaataccaattaattccatctcttatggagcagctttcttgttgttcagttgctcagtcatgtctgactctttacaaccccatggaccgcagcacgccaggcttccccctgtccatcaccaactcccagagcttgcccaaactcatgtccattgagtcggtgatgccatccaaccatctcatcctctgtcgtccccttctcctcctatcttcaatctgtcccagcatcaaggtcttttcgaaagagtcagttcttcacatcaggtggccaaagtcttggagtttcagcttcagcatcagtccttccaatgaatattcaagactgatttcttttaggatggactggttggatctccttgcagtccaaggaactctcaagagtcttctccagcaccatagttcaaaggcatcaattctttggcactcagccttctttatggtccaactttcccatctgtacatgactacggaaagaccatagctaaatccaagtacaatctcctaaaaagg

SEQ ID NO: 61862 - DNA, 848 bp, Bovine  19866881794277
  misc_feature (1)..(1): n is a, c, g, or t
nccagagagggccagtggctctcctgaggctgcactgttgacttgcgatgtggggctgagtttagtatcacagtgaggcagcgcaccagccccctgggccaggagcatggctcgacttcattattggatcacacaaccaactttggggcccttttctcatcacaggtcccgtgggcagcagagcccaccagccacccagcattcctgggctgggttcccacccaaaccctgaagtcagccagggccaatatttggacccaattatgtatttccaaacatccgactcgagaagtgggaggacggagacaggcagccagggttgcttttgtggattctgtagtcagtgacctaaatttcacactggggggagaattttaaaaaaaggaagaactgccacaggtaacactgatacgttagggaaagtgctgaggatatgaaatgcccgactagggtctttgaaaagttgtctgttttaattggacatgtctcttcagaactagctggtggcgggcccatcatgggctgcttttaatcagtgaaattcacatttccccgctgcaactgaacacagaagaaagagcagtggggcgggggccaagggggaggaggatgtgattccaatttgaaataccttaatgtaagagaagggttttatttaaaacagaattgcccagttccttctactttatgccttcgttaggagatttttttcccctaaagagcaggagcccagagtcattctggcccattttctcttctttttctagaatatatgtgtatggtgggtatccttcattccccaaggttcccagcatcagagctcactgttcctggtccaaagggcagtg

SEQ ID NO: 61863 - DNA, 992 bp, Bovine  19866880465549
  misc_feature (1)..(1): n is a, c, g, or t
nggtgcttttgtcttaattaaaatacaaatgaataaatcgtcacatacatatattgaatataccctatagagaagtgctgtcctaggcagaatggaggatagaaatgagtgtcagacatgatccctgacttcacaggtcttagaaagtgatcattttcttcatatatttagcattagacatgtttcataaataattaaattaatagtggtttaagaattccaattgctagttaagaatcatattaagaaaaatagcaactttccagaaatcattatttaatactctttcaagtctaagactattagccttttttcaaaatagaagttaaagtatgttgtcctcacagtgaatttaatgtatgaaaaatttcattcaaatgacattatttctatttaaagttttgatataataatgcagggatccccaatcacgaatcagtattgggccctggcctgttaggaaccagtccacacagcaggaggtgagtggtgggagaaaccgaaaactctgcctcccacactgatctgtggaaaaattgtcttccatgaaaccggtgtctggtgcgaaagaggttggggactgttgcagtaatgtatgaaaccaatgccaacttctgaagaatacctctttttggatcactgaaatgttttaccctgtactggggcctcagtatcagtgagagtgatgtctgattcttcgtctacacttaaaaataccaaatacacatgccacctggacattgtcttgaactaaatcctaaaataaaattaagtgacgtgttcttgtcaaactcaggtctaggtgccgccaggctactggatgggaggcagtcattcctccagatggccctggccctccagcagacatcattttctttgtttaaactgaatccggcatcgtccttccggctgctggacacccaccaagggagagaactctaaaagcagaaatgcagaaagaggatagaagttaagggacgtagccaacagta

SEQ ID NO: 61864 - DNA, 1407 bp, Bovine  19866880760694
  misc_feature (1)..(1): n is a, c, g, or t
ntagacttctctttgatgagttaggcgacaaccatgggcaaggaaatccaaagagtactatgagttgtaaatgatgcacaatgcagaagatgggaccaacgagcagaaattgttaccagcgagcatctgcaattcaaagcatcctggattataccacctacattctcacagcaacctatgagataaatacttgatgctgttttgttggtgaagatactgctctttggaaagatgaagtaaattgccatgggcacacaggaatcagaagtggatctggactgatagatgccagaggctgctctcttaatcacaatgatactatataccatttccccaattagagagacgggatgaactgattcaatgggcatgagtttgagcaaactctgggagatagtgaaggacaggggagcctggcgtgcttcagtccatggggttataaagagaaggacacgacttagtgactgaacaacaaaaatgacccgggtggggaagaagtttgagctctgagacaataaaagcagatccaactttgttaaagcacctatagctcaaaacgcaggctggtcttcccggcttgcactctgcagacagcccatattgtgcactggtactttctgtcacacttagacccaggtcatgtgatgacccttccatgccctccagagacaaaagatacactagaatacaatattaaacaactgcctcattttattccaagcagctgcttcccttgatgctacagttagaacagcatttggcttggctcatgagctgttagtgctctgatgggcttcgaaatgccacataaaataaattgatcatatctgagcatatgctctgcaataagcaatgagaaaaccagcctcgatattgacccacaaaattccatttctgggctggctcagtccatttttattgccctgtcatcacgttgcaatatggttgacaatttatatgcttatttagtttaacgacctagcgtaacatttactttggcctccttcagttgatcccacagagatgccaagagtagcagtccctcgcctgtgaggggtctcaagtcacttaatccataaaagagaaggtgcagaaagaggccttgaaatgttgaaatactgagtgaagtcactaatgaagggcttcacaaactaaatggacactgagctggggacagggaggagtgtttgaggagcaaacgctttttactctgttgctcatgttgctgtcttacaacaataagtatgtttgacacaggtgtgacccaaatgcaagtcatagcctccgacaaagttatcacgttgactacagaatacctaaaagggcagaaggtttgggaggcaaaattctaaaatgtgtgccctggatctggaaatccagaaagcattccatcgccactctggagcg

SEQ ID NO: 61865 - DNA, 893 bp, Bovine  19866880984851
  misc_feature (1)..(1): n is a, c, g, or t
ngtattcagcctacagattttggttatacgatatatatgttgccacactttgcactcaaaagttttcgaaggaaaacctaatgtcttgtcctccagactgctcctattcctaatttctctatttctaccatctcttccagccacgtaaatttaaagccaccatcctcctcaaatcctccctttcagctgatcaccatttctaatcattttccaaatccgatagattccaccacttcatgtctctgagatggaatgttagcatgaccttataacctaaggcatgccccactcgagtctgctctacccaaatctttgtaatacatcattggaccaatgttctttttcaatctgtcttctagtcactactggccccagtaatagtaaaaccataacccctaacccacatacccttgatcaaatgaccctttgcttactgcttcctctgtccagaagttcatctaactcttcaaaggcttttctccccagaaaactgtctaagatcaccctgatcagatacaccctcccttgaatctccagagcttgatgcttggccatctctcatcctgtgttccttccagttatttgtgaactcgatatgatatcctcctccttctccagatgtcatctcctgaggactgagaatatgtcttactcttgcccagagcttctgcagtacccactgcagaacatacagtatgagcttagtgcattgaaaaatgtatcatttctgaataaataatatactattgattcagctgaaatgtcccactactggacccattgctatcaaacccaagcaaatgtctgccagcctcagaagatatcccagtaagatcgtaaatagcctctcttagaaaccacagtctcattggcccacactatacactgcaggg

SEQ ID NO: 61866 - DNA, 899 bp, Bovine  19866881154827
  misc_feature (1)..(1): n is a, c, g, or t
ncccgaaacagatccacagctgaaatctctccacgtccttgcccctgcttctgtgtttctatgatgccccagtcctgcaagtcaatcatgatcaaagttctagagacacatttggtctggctgttttctcttattaccacctcatctatttctgtacattcaagccattcctgtaaccaatgccctggtcccaccctcattggctcagtatcttccgagtggacagtgctgtcacctttgggaatcctgtctctatcctccatgctgtcgacagtgtcatcttcctagtgggagtcctggttatggccctcttatgctccaaaacctttctacagaataaagctcaagctgcttgcctcagtaatcaaaaacttactttacctggcctcagactactcctccaggcccaccatacagctctgtgaccctcctacagtccaaccagatttgaggatccatgaccctggacatatcccgttcatttacccatcatggtgcactttctctcatcattctctttctcctccatttctgctaattaaaatataggccattttccaagactggttcaaatggtctagcttataagaagtcctccgtcatttctctaacccttcccacctttacactcccataggcatttatctggaaacatcaagcacttaccatgttcgctctacaaggcctttgcaatttgtccatttgtatttatctccgacttacactaatagcagccactgagcctcctttatctttgtataattcatgattctagcataggacactatgcaaaatgggcacttaataaatgtatttaccattgaaaaggaatttagcattctagtggggtaatctctaatatgggttctaatacacagtattcagggcctccactgatt

SEQ ID NO: 61867 - DNA, 3331 bp, Bovine  19866881268009
  misc_feature (1)..(1): n is a, c, g, or t
naaccatttatagtttaactgaattccttgagtttgctttaaaaataagtaatagccaattttagtcaatctctaaaactgtaattaaccacataaaactttaaacccctcttttgtatatctgaaaatctatgcagtatcactaagatatatttttcctgcacttgaactctgagtctttaattaacaagtcctactgtatagcatagggaactatattcaatatcctgtataaaccttaatggaagaaatatgaaaatatatgtaatattgtattaatttctgctgtatggcaaagtgatttagttgtatatacatgtatacatgcttcccaggttgatcagtgttaaagaatccacctgccaagcaggagacacaagagacacaggttcaatccctgggttgggaagatcccctggaggaggaaatggcaacccactccagtattcttgcctgggagaatcccgtgaacagaggagcctggtgggctacagtccatgaagtcacaactgcagcagctgagcatgcgcacacccacgtgtatacatatatgtacaaatatatacaactaaaatactttgctgtacagcagaaattaattcaacattataaatcaattttacttcaatacaataaattaaaaaaaaaacggattgagtatggagtggctattaattaagtccagtaattccagtaattcagcacttcccctatagataatgtagaaagggcccatgtcgggagaaggtgattagagctcactgagcatgtttcctctaaaaatgaactagttgatatcttgggtaagtgtgtcctaatccgaatgcaccacacagagtgagtgggtcttgggcttgtagaggcctcagttctccgttcacttgcatatgtaaacagcactgtatttatccccacggtatcagtctactgtcacaaaggggacagcaatgagtaggatggaatttggttttgtccaggcacttccctggtggctcattcagtaaagaatctgcctgcaatgcaggagacttgagtttgatccctgggttgggaagatcctctggaggagggcatggcaacccactccagtattcttgcttggagaatccccatggacagaggagcctggcaggctgcagaccaggggcttgcaaagaattggatgctactgagcaattgaacacaagcacttcctttcagttgcttgctcttcctcttctgaccacagaggggagcattgggatcatttaaagacgcttagcattctctcaggacggacaaaaaggcttgaatgacacaaagtgttagacatctgagtcttttcaggattggttttcctagatgaattcttttacaatatgtgtttacaaaaaaaaaaaaaaaaaaaaaggatgagagggaaaccaaagcttcttttaatggtttggtatgttttctttaatgtgtaatctaaaatagaagcaaaaacatctacctgaactaaggggaaaaaaaatttttttttcaattagattgtagtttatttggggcttcccaggtcgctcagtggatgaaaatctgcctgcagtgcaggagacgccggagatgtgggttcaatccctggtagggaagatcccctggaggaggtcttggcaacccactccagtagtttatttactatactgtgtatagttttaggtatacagcatagtgattcagtcttttttcagctatgcttcatgatatgttattgcaaggtaatgggtataatttcctgcgctgtccagggcatcctgtttcttatctatcttagtaatttttatctcttaattccatacccctaatttgtccttctgccttctctctccctttgttagccacaattttgttttctatgtctatgagtatgtttctgtttttcctgtacatttatttgtatttttttttttttttagattctacatataggtgatatcatacagtatttgcctttctctgtctgacttatttcataagcacactattctctaggcccatccatgttgctgcaaatagcagtgtttcattctttttatggctgagtaatattctattgtgtatatatactacatcttcttaatccaatcatctgttaatgggtgattgggttgcttctatatcttggctatagtaaatgatgctgctatcaacactggggtacatgtacttttttgaattagtgttttcatattttctggatgtatacccaggaatgaaatttttggctcatatggtagttctagttttagttttgtaagcaacctccacactgttttccatagtggccgcaccagtttacattcccagcagcagtgtacaagggttttcatttcctccacatcctctccagcatttgttatttgtaggctttttgatgacagtcattctgaccagtgtgaggggatgtgtcattgtggttttgatgtacatttctctagtaattagtaatgttgagcatcttgttcatgcacttgttagccatctgtatgtctttgatgtttagcagtataattttattggttggtggtattttcttggttgtgctattttctaataccacaatgaggaaagatgtgaaataattttgtttggcctagagcaagaacttgcaaacatactgtattcaataatactctataaacttgcaagcatccttgctcaatagggtgtgaaagaaccctatttttggtattgagtttatgagattttagatatagtttctgaggcttatttaaaattaccatgtttcatttgcagagtatatgatttgctaatttatttgtatttcaaagagactgaatctttaaaaatgtctttgttttggactaacttgcttaagtgtcataacttgtttctgaaattctaatatgtgctggtataatattttatattgtatattagtaaaataaaaatcctgattttccctttttttttttgtagtgaagatagtttactctgtataaacaatatagtaaaactgtagtggcagaataaaattgtaaagttaacccctcagagatatataacatctctttgttcgtaacatctagttgttttcaaagatactgtttactaacgtttttaagtttaacttcaatattttaactgtttgtggctaatcctatgtattcttttgttcaccttcaaaggttatattttttgacacatgtttttctttttaaggttgcattttggacatttgcatttgtcctctctcatcccaatatccacaggaccattatggaaggcatatcatctgtgtttggcacagcaggtactaacactgaattaaattgcataattgcagttacat

SEQ ID NO: 61868 - DNA, 892 bp, Bovine  19866881424853
  misc_feature (1)..(1): n is a, c, g, or t
nttcccatttaaaaatgcaaatcataaagtgctttgataagttacatgatgaatccaatcccccaacccataactactaatgcttatcatttcttgaattccaggaatcattctaaatgatttacatgccttaacttacctactgactctccaccacagtctgtgaggttggtacccatatatccccattttacagagtggaaaactgaggaacaattaagtaactttgacagggtccatgaggaaatggcatgactaggcttcaaactcagggagtttggcactagaattcactctcaataccacagaaatgaagcagatcaaaattagtacaagtctacatttaaggaaatacaatctatttcatgaccacctgaatcccgatcaggataactctaatttattgacaatgaggagacacacacagacacacacacactcacagataccctcttctgcctaggataatcatgttaagaaatctgtgaacaccagatcttaaaaaatcagtactgggcttccctggaggtccagtgattgagaatccacctgccaatacaggggacttgggtttgatccctggtccaggaagattccacatgccaaggggcaactaaacccacgcgctgtaactactgagcccatgcactctagcgcctgagctccgcaacaagagaagccaccacagtgagagagcaggcccttctcaccacaactaagaaagcccttgcacagcaatgaagacccagtaaagctaaagtaaaataaacacacaaattaaaaaaaaaaatcagtactatcctaactgatccatggtatacagattgttctccctcggcaacccaaatatgaagctctccagttttaatctcatctacgtgtgctccatcat

SEQ ID NO: 61869 - DNA, 1735 bp, Bovine  19866881539005
  misc_feature (1)..(1): n is a, c, g, or t
nttctcctctgtgtcctaagctattgctcttgaacttgctcttagcaacaaccggagctacctgcttgcttgttcacttctagtgggagaggacagagggggcctctctcctatgcatagaagaaaatcgtctctcccttgaatctgatttaccaatttaggccaaggatgaacagttgtctccagggaaacaccaggcaccaatctgcttacctacccctcagcttctagaacaacttctaggaaggaagacagaatttccatggttggccaaggctaattataaccattttggtggtggtggtgatggtttagtcgctaagttgtgtctgactcttgcgaccccatggactctagcctgccaggctcatctgtccatgagattctccaggcaagaatactgggagtgggttgccattcccttctccagagaatcttccctacccaggaatcaaacccaggtctcctgcattgcaggcagattctttactgactgaactacaacaaaaaccaaattggtattataaaacatataacaaaggaggagttgaatggatgctgttgagtaagtcataatcacaaatatggattggtttaattatgttcaaacaatggagatgagtgccttaagttaaaactacaatattttgaatatagaatttttaaaggatttgtatgttcactgagtgagattttgttctaaacaggtatctacatttctccaacagaaccatctccaatgaggaaacggtatttattcgatgtaggctgtacgttttcaaaggtcagggaccgtgtctatctttctccatgctctattcttaatgcttagtacagggcctgctacaggtgagatgttcaaaataaataaacattatttaagatgttcttaaataaacagtaagtaacttgcactagaacagggcatcacattgaatagtcagcctgggtaccatattaatttaactctaaaagacatcaaaggcaggttattatagaaccaaactaattcaataaacaaaaaccacctaataagttgctgtgatggtccaagttaaagatgttctctaaccccagcaaatgtccatcataacactgctatggacatatcaagaaatactgatatttttatctttatctttggcttcccagatggctcagtagtaaagaatctgcctgccaatacagaagatgcaggagactcggttcaatccctggggcaggaagatcctttggagaaggaaatgcaacctactccagtattcttgcctggaaaaattcatggacagaggaacccagtgggctacagtccatgggccgcaaagggttggacacgaccgagcacacatgcacactatctttatctttaaaaaagaagtcaaagcacttcaaatcatccttataggaaagttgagcatttgaaacacaaacccagctttcatctggtagctgcaattgtaatatttaattctcatgaggtctcctatcagaaaccactgcagacattcccagaaagacatcacacaatatgatgggccaaccaaagagaatgtggtctcctagatttcctttagtttcgatagtaaagaaaagagggattaagccaaagctttccctctctgagccttcatctttctgcagactttctggataaatgtgacccagctgtcacactgaccttccaggacactggtacttcccgctcccaaatgccatgaagcagtccaagaaagca

SEQ ID NO: 61870 - DNA, 3123 bp, Bovine  19866880373428
  misc_feature (1)..(1): n is a, c, g, or t
ntgaaagtttattaagttttcattaatattttattttgtcctgtcagtgagtgctagctagttcatacacttgaaatagcaaatgctaaaaaggttcaaaatatctgatcagcaagagtccctccatctttcccgcagtcccaatcaagtcctctttgaagttccaaactccatggcccctggggcagagaaatctctaagcagagttataaatgtcccaagacctttaggcctgaggtttcacaatatgctataccctattcatcttcctgacggtgaaaacaaatgaaaaattcttggagtgaaagggagctggacagtcatattttttttttaattagtaccatcaaatttctctttgaaacaagttctcaaatcacgctaatcaacaattttttaaaaaatgaagaagtctatttctaagttgttaagcaagaaaagcaaagtgcaaccaatgatgttctgcttgtgttggaatttcaatgaaaatgtcatctcttattctcaaaagacatgcaagtaagtagcacacatcaacctatcttcttagacccagaagttgcactatcctcaaactctagaatgagttgaacacaaattattaatttcatggtaaaaccaacatgaagagatagtgataaaaaagaaatcattatgttgtcttaggtaagtccttcatttgttttcagccgttatttgtctcctggacatccattagccttcatcagtccttgctattttgaaatcaattaagatctgatacataaaagtttactaaaggagaaaatttcagagactgacaaatcatattcttaactgcctctttcccaaacttacccccaatgcagctgtttcactgatagggttggggtccctttagacgggatgtcatggtgtctccagatccaggagatcttgttccaactcaaccactgtgtagccatgagtaagctcttccttctcattctccctcattctcctcatctgacaatctttagttggtgggtctagaattatagagtcactttgtgtaaagtttcgtataaaccaagaggatctatcttaatgctttcccatcaaactctcaaatttacctgcgactctttctatcttccttcctttctccccatgagagtgagcagctttcttcatacctaagatcaactgtttgactgttgcttgggatcacagtctccatcttctaggaaatgggtcttaatcatgactgcacattaaatcactttgtgaacttttattttgctttttttaatatctaccaatctcattccagaaggaaggtttggaggataaagatagtggctgaggcatcagcattttttcttttttttttttaatttttttaaaattttattttatttttaaactttacaatattgtattagttttgccaaacatcgaaatgaatccgccacaggtatacccgtgctccccatcctgaaccctcctccctcctccctccccatagcctccctctgggccgtcccagtgcaccagccccaagcatccagcatcgtgcatcgaccctggactggcgactcgtctcatacatgatattacacatgtatatatggaatttagaaagatggtaacaataaccctgtgtacgagacagcaaaagagacactgatgtatagatcagtcttgtagactctgtgggagagggagagggtggggagatttgggagaatggcattgaaacaaaatgcttttcttatcaggggtcagacagcttcatttaagtgaaaagcaactggtgtttagaagcagtgcttaaaaaattatgggatccgctcttcttcatcctttttcaagattgcacagggatgtgttgacaaatacgtcatgaaattcttagtgaatgaaaacaagcctaagattagaagccaggcttactctatctatagtctcttaaatctgcatctgactcccaggcatcagcctgctgtattccactctgtatctgtatttgactggaagcgttcacaaatggggaagacataaaatatttagagcccatgaagcactcaggactgtcaaaaatgatctatttcacatacatggccatgtgctggcgcttttagggcgaatttgtccatttatgttgaatatacctacagtctttgttctcttggatttcattgagttctgtcataaaactaacaataagctttgagatgcacttgagttctgtttctttttcctttcttttcccccccccagcctttgagtcatgtatatgtgattgagagaggcagattgtgtcttcagaatgagtgagttttaagtatttaaatacggtaaggtttgtctatagtggctcagacagtaaagcgtttgcctacaattgcgggagatctgggttcaatccctgggtggggaagatctcctggagaaggatatagcaccacactccagtattcttgcctggaaaaatcccgtggacagaggagcctggttggctacagtctgtggggtcgcaaagagtcagacacgactgagcgacttcactttcttttctttcactttcttttgtctatggtttagaaaaggaatgactgccaggagtcccctacctcctccctttacgtcttcatgagtttatgtcttactgagttgtcagaaaagcttgtctttactgaaatttaataaagcatagtaagccatcacatgacacagaccaccaaggagcatcactctcacgcggcccttccttactgggtttattacccatcagttgttgctgttcattcactcagctgtgtccgactctttgtgaccccatagactgcagcatgtgaggctttcctgtccttcactatctcctggagtttgctcaaactcatgtccattgagtctgtggtgccatccaaccgtctcattctctattgctcccttctgttcctgccctcaatctttcccagaatcagggtcttttccaatgagacaactctccatcaatagtggatataaatgattttgactgaagagaatcttagcaggaagatattaataaatgtgtgctgctgctgctgctgctaagtcacgtcagtcaagtccgactctgtgtgaccccatagatggcagcccaccaggctcccccat

SEQ ID NO: 61871 - DNA, 1209 bp, Bovine  19866880449561
  misc_feature (1)..(1): n is a, c, g, or t
ntgttcttgcctggagaatcccgggacgggggagcctggtgggctgccgtctatggggtcgcacacggccggccacgactgaagtgacttagcatagcatagcatagcataccattctccagaaaagctctaaaaaatgaaacggatacattttactgacaacttcaatttgcatgacctaccaggaaaatattgcctccgaggcaagaaatgagctttcacacgtgatctttaagcccttcccaagtggcaggacgttaagcattcagagaggaatgtcataggaattctaagaccctgtataacctcagatgcctggcttctctcctgcgctgcccctgagaagcctctaggacagagtggaaacagttcttagaggaaatgacccaattgctaagataacagtaatttatgcctctaaatgccccggaaagagatagattaagtgacaacaaaatcttcatcctattttttcttcttcttatccaacccacctcaaaatctatcccgattcacatttttaaaatactgcatgtatcagtcagggtaagttgagttttgtttcagtaacataagagttctgaacctcagaagagtaaaatgaaattttatttctttctcttgcaatgccaccataggcccagggagcccttggagacaggtaacctccttatggtagtccaagacagtctgcttcaatctgatgttacctccatagaactaagtgctttcttttctagcaagggttagttcttaaatgctttcaccagaattaacactttttttttttggtcagaatgaaccacatggtccttcttaacttcaaggatgaggaagcatcattctctacatgccagagataggaaagaagcagatattgtgaacactataatatcgatcataacaacccacttcccagagcaccttctctgcagtagcactttttgcagggctgcaaaagcataaaagcagagaaccctattagtagggcttattgcccaggatcttgctgctacagtctggatgtttccagccttagaactgtggtacatatgctttgtgagggatgggaagaggcacatttgtgtagtgctcaactctgcagagaggcaatatagtctaatgatcaagagtacggattctggggtcagacaacttgcatgtgagtcccagctctgacacttagtaccagtatgatcttagcaaaat

SEQ ID NO: 61872 - DNA, 2422 bp, Bovine  19866880471467
  misc_feature (1)..(1): n is a, c, g, or t
ntttcccctgcaatggtgatgcttcttcctgatggggttggagcctccataatgcaaagcagaaccatgctggggactgagtgaaatgatctatgtgatggccttaggccagggcctggcgtagtgcaatgcttgatacctgatggctgctgtcatcatcatcatcattattaccatcatgtcatggaaacaggcttctagaaagctctgtggcaggtcctaggagggaaatcaaagaccaacgtggatgtacagggcagtaaggggatgggagcaggagatgttgagcctggacggacatatatctgagcatgtcttgaggcaagtatgtggggacaggtttttataaaccccagtgtttttcctttccttgcctcgtgcctcagtttccctgtatttgggattaaagaattggagaagcagactttttagttccttctagtactgtcatcctaactctgtcaccctgtcctggggttttgctgaaatgtcacccacccactcttcctgcagggccagaaactcccggtgacaaagtcacgtggtcccagagcagcagatagttccctggatgggaggacagtgtatgtggccaaccagtagccaactgtttgtacagatcaaggctgctgagatgcaaaatagaaacacggcaggggaaaacaggccctgtctctggaagagagatggctccacgatgagcagacccacaggacggtggggagcgctagtagggcgtctgaggtctccgtgtctgtctgctggtgttctcaccagcataaaaaaacggtgggtaacagggggtgtggggctggagattgacagagggccaactcggcatctgagaccctggcttctgctttggacagcaaacttgaccttgcgtgtggttatcaagtggggtattgtccttcccagtgggttggggggcactagggagcatgttttccattaaatgacccctttgtggggtcgtggaaggccgtggtgactgacctcaggttcattcagagcaccagggcccttccagccaccagccctccaacgcacacacacacacacacacacacacagactgctgaagacttgaacttggagaggtcaagaggttagtcctggcccccctgggcaagtagcagggaagtgaaacaaattgacaataccaattgtcagggccaagttcttcaagggcagcatagcctgtgtctgcagggcctgcctcagccttgaacaaaggtgctgggatgtgcctgaggccaggaaaaaaaaaaaaaaagccttcagggtgagacctcttctggagccacagggctccctgatttcaagcctgtgctcggcgtaggagtccgcctgcctctggagaggagcagggtccggcggaggaatgcaatcttgccttgttcgcccagcaccctgtttgtttcccgcacagaacaatgacctctcgtgagcctgtgctttccaacctcaccgagggttactgtgcagccctgattcctcccctgattatcttgaagcctgtcaagctgtaaggttctccctccgctctctgctctttcttcctaatagacatgaaacagtccagtcaataatattttacttgtcttcccactgcgtgtctcttcttctgatcagtttaggcgggtttgactgcagaaagtcagaagggaggttaagatctgaaaagttcagccaaatgttatcagcctcagagatgttgctaagggagaggccccccagcccttggcgaccggagccaataatagctgcgatgcactgatagcgtcaacgcctgtcagagatccaggcgtttgcggttcgtctgtaaacgcaaacacctgtatccagtcaagctatgatggttatcctctctttgcctgtcattcccttcggttccttgaaggggctgccaggatgttctaagctgtgagttgatttataaggtgaaggatctctccgaaactttggcatggacggggaaattgactaaacgcacctctcctccagggggtgacgcggccttttgacaatggtgagtgaaatcgacggtctccttttaattacatttttgaacccatggcaccaacggctgagctgtgggaattgggggcttaggcagacttttattgtctacatggccattccccccaccccccccctcccccgccccttgaaaggactcttggtacttgtttgagatttttctgtgtgatgaattagatcaaagtgactaataaacagtgtctgtggaagctcttcagaacacagtatatgcatatttgagatatttccaagactgaacaggcaaggtccaaactgtgaaataaacttagggtgtaaggagaagacagcttatgtgttgacctcccggcaggggcgagatgtgtggtgggcacccggctttcctcagtgaagcattgag

SEQ ID NO: 61873 - DNA, 1585 bp, Bovine  19866880563791
  misc_feature (1)..(1): n is a, c, g, or t
nttctggactttgctttgggctgaagccatcccctctccaaggatcctcagactccataaaaagctttggaactttattctcgtgaaacactgacctaatctttgcatggagactgctatttacattaaaattggtcacataatgaaaaaaaaaaaaaagtagctcattaatatgctaagaagtgctaatttgaacattgctgaaaagcaattgcaaattccattttgcaacttgcaaatgtgatgcagtgcaaattaaggctgatggactcatcttcagacattcaaacttcatctggatacttccttagcatccaggtctcagctgcatccaccggcttcaagacccaaaggggtgacttctccttcatttgggaagaaagagcgtgcctccagtaatgggagggttccactatgagccatttctacaacgacatctggtgagtccaagtaagggcatcatgaggggtgctgctgaaacgacccataacgaaagaataaaataactcccaatcttcaccaacacaaatcctctgtaagatggagccataccagattcacaacttccagctggatcccagcctccagctctcttccgacaggtgacctgtgatgccctgttgacccaaactggcttgagaaggtagcctgagatgccctctctctgccgaggaaacctgtgggagtcagagccagattggcaagtgtcagccactgttctccctggggagcaccaggggcaactctgtggatgggaaataaatccgaggactatgtcacactcgggagttccttccgtcttcctgccaccctccctgctgtctacacaggcagtggaatcagaacttacatggagtgagggtcccaagtcagcacatacagggccatctgtgtgggcctcagaagacccttaagacagcatagcatcggacaccaacatccttctcctgctaagtgcagcatattcaccttcctccatctttggtcagttattccttcttctgtcgaataccagacgaggtggctggctggctttgggggccgtactatatttttgaagtgtgttatctacaaacatataaaaacttattaaacacagcaagatattccagctctgagaggtaccagtcaggggccccaatactcattgccaaggcttgccaccttggcagggtcagcacaggcggaagccccttgtcgttgccccactccaggtgatttccctggaggatgagcagccccacctgctgtcccttcaagtcaggagcatttagtcctgaccgcatcctcagctaggcctcaactagactttgctctcttgactccctccccactgcttctcaaaaggatgcccatcaaacaaaaggatgaagtaaagagatgaagggacctgggtaaggcaagagcagaaacgttagtatagagccagaaataagcttaatacagagtcaggtgaacatgcagtgccaagagggacatgaaaaacagcttccccggaggcagagcaaacggaaacaagaggcgtgaagaactctgtccagaaaactgaaaagggtcttctgcagctgagggctaagagaagttt

SEQ ID NO: 61874 - DNA, 1788 bp, Bovine  19866880589931
  misc_feature (1)..(1): n is a, c, g, or t
nactgaattttttaagtggtggagctgggatttgtcgttgctgttattttttggatatttgtttatttgattgcattgagtcttagttggggcatgcaggatctttgatcttccttgcatcatgtgagatctttagttgcagcttagggagaacacttagccactgcatgagggatttagttccccaatcagggattggacctgggcctcctgcattggaaatgcagaatcttagccactgggccaccagggaagtcccaataaaattgattatgatagaagctaaagttagaagaatactcctcatctccatcatcaaattgcttagtcttaaagcataattattcagattaagctattttgagataatgacttttttttcttttctttttttgaagtggccaaactttgagttaagtgttcttttggtcaacaggtggtaaggttctagcacacactgaagccctccatggccgcccaagcggtggcagctggtggcagctctcctggtctgcacaaaagccttggatccgattatttagggagccgagtatttttgttgatgagcaaaatgaaatcctctgaaagcaaaatcaatcccttgcagagaccccagagcattgatcctggtgcccattgacaggcttgggctgttgagctatttggaatgaccgcacaaaatgagcaagttgttacagttttagagttttggtatctattggcaacccctgcactcatatgattaatcacacattcaaaatgtgcgcgctgtggaaattgactgcaacgcagcagaaacaaagttttcagttatcctcgtataataaattgaagctatatccctaagcagaattgtcttcaggattccaatttgccttgttaaaagtgttgtttatacagtagttagcaaaaacgcaagtaattacatacagaattcattctaagcaattctttattttcccccatcctttattggttttccatcttcattacccaatattttttagtcgatctcagcagaaactggacgggtgagatgtggccaggccatgaggcttggtgactttcctgattcagagagagcatctggtcaaggggacaaggccggtgagactcacacagcggctggaggccttctgccagctacagggctgcgctgacaaggaggaggcagaagcagcgtgcgtgtggtattgcatttcataaaacaacatttacctctggagaaggtttctacggatttatttatttatttttgagcaggagcacagttttgtatacgcggagtggtgtggctggccacatctgtttcggttgctgtaaccggtgggactttatttcataaatatcatctgagccgggaatacagcttttggaatgcaaattatgtttaagtgagtaaacatttcggtggctgggggcccggagcgtaggaagggagaggggcagagggggagagttgcggctcatgaactgggtccaggtggaaggcgggccggggttggaaggttccagctggggagggaaggggacaggagcagccccgaggggaagccctcccagaaaacccccagcttcccagaggctcctgctcactctccccagaacagagacctcatccatatctatcaggagaggcctaattatagagctcggagattttaatggcacagggaaatttaaatgcagtggaaaatatgaatattcctaagccagcagtcaaaatacaaaatgattggcttcagaatcaatgaattataatttcagagcgcgtcctcaaaggtggag

SEQ ID NO: 61875 - DNA, 1309 bp, Bovine  19866880594859
  misc_feature (1)..(1): n is a, c, g, or t
nttgcgtctcttagccttggttcactaccaaagacagaaaacaatacatgctatgagctccgtatttgttagtaattcttattgctgtagtggtcctgattgttaagagctgtcagctattcatcctcaagttcaggtcccaaagagcaggaggggacataaggccgcttcagctctctatcgcacgaagaggaagcgctttcttgctcccccccctaccctccatgcctgtcatgtccagacaaccagacagatgctcaggactgcaaggtgacaaatccactcacaagatacagcttgctaagtggcagtggccttttattccctgacatctctccagaccgttgaagggattagaactggattagtctgagatgagcctggctctgccgttatcacctgtttataggataatgacattatctagtttggcccataagggcctccttccatcggagctttgttctctttgatcttgagtgttgcaggcagcgtatctttaaatctaaacaaacccactgaagcctcaagataagtggtcaaaacatccagtgggaggaaaacagattccccctttccgggctgctcaaggccaacagtaattttaaaactgtgcagactttctttgaacctaaagcttaccttcccattttcaacactggcctcccatgtcccctttcacacatgcagcactttaaagtttgcagacctattttacctttgcttattaactcagttgatgggcagggtgggttctatgcctatggtgcagaggaggacaaaaaacccaggtttgtgaaagcccaggtgtttgccagcactcaggtcatttccaagaccagtactgagactaaacccagcttatctggaaaaattcagcatttattttatccagtgcctgtagccatctaagacctgcctctctgcccaaacagctttcctgaaggctgatctctgcatagaaacatctgtttagacagaggttccaggaggaccttggctgaagttcccttccaaagctctcctaacatccgctctacagtactttattttaaatcatctttattgaagtataattcaatgcagtgagacctgttttaagtgtgctgaccatttgttgcatttggggaaatgcatagagttgtgtaaccacctccacgaccagaatttaggtttccatcactccccaaaggccttcatgttccctgaattcaaactgcatatcccgtctgcagcctctgacaacccctggtctttctgccactatagttatgccttttctagggtcttatgaaaagggatcacctgg

SEQ ID NO: 61876 - DNA, 3052 bp, Bovine  19866880613228
  misc_feature (1)..(1): n is a, c, g, or t
ntgcctgaggttcctactgggatggttaggtgaataagtaatagaacaaacacggagtcagctgggcaaaggaaaataaataaaataacagcgtgttcttggttctgagagccctgccacacgagcttgttcccctcaggtcctggagcttcagactctctgatgaaatggggagggcggggggagaagggtattatttggaaacacatgtactcattccttgtgaaagaagtgaagtatttaacatttctccaaggaaaacatctttcattacttgacgtgttctgtggtaatgatttttcagttcaacaaacaagtacttattagcgttcgcacgggaacctatctgaggtggatggcggggccatttttaacgggaactcggcagccagggttaaagggagtctggccggtcactggtggccctggtgccgggacccaggtctgctccagacttctcagagcccgtgcctctggcctgtgggctcaagctggcaagaatcaacaaagttgcttcttcggctttttgcaaacaggacatttgactttctggtatgaacttgatgattccacatgggttggcctggagagatggcacgctcacatgccaggagtttggctgaggatttgatggttaaatggattgttttggttaaaaatgatacagagggaggggaagcggtgaggtgtgtgggtgcagggcaagggggggcgacttcctctcctgaccccaccctatgcacctctccttgcttgagcagctgtggactctgctgcccacggttaaatcctcctgattccaggtggccctgggggcagctgttagggctctcagctctctctctgtgggcgtggagccttatctttaaggcttatttgtccccagttcctagggacccttgagcatgaccttcacccctggtttattttgcccatcttttctcctactagataagagtgtcatccagtccagttgcaatcctggcccacaatggcgttttttctgctttacctgccattcatattttggtgtccatgaaattagacatagtgagagctgcggcactttttcataatcccagtaaacattttccttgaaactggagccccccaccaaactgagaatgagtattgatgggtgatggctttgtgcagatttcatttttggttcagttcccaaatccagctgataatctcagtgtgtcagccccaaatcacatctgattacgggtcatctgccctcatcgcccccaaaagcgtgatctcagcttacatcccaggaggacgtttttctccgcaagtgagaatcctctcttgctctcagatggcacttactcggtggcttccttctgccttgtcagtgtggggaatgtagcggttaacactgtttatacattccaggagtattaagcagttaggttactggaactgtggcagagcttgtgggagcagcattctgggctgtgcctctgtcatcaattactgagcatttcatgaaattccagatgtaataataaagtttatgacgattatattgtcaggaggtacagagcacacacctcattgacaactgaagaaacaggttgagccagcagttagacggtgatgttagcacacgacaaagggtctttcaggaaacataatttgtccctcccgcaagcaatcgtatgcatttttgtgaatggaagcatgcgttttggagccccagctactgtaggaaaagggagagagtaggaaggggatgcccttggctgtacggagcatgtacagcctaccttgtggtcgccctggcccagaaggaactgtgctgaggaggtggcctctgctgttggggaagcaggcatggcagagactcagccactctgcccagaaagagcctcccttcccatggaagtgcagggtgccctggtgaggaaatagaaaaatggatgttctattaaaatcaatagactgtcacggcctgaccggatagcacagacactccagtaggtggcaattggtggacacgcagtgccagggcccttggccgcagtgagacagcgcctgccttgcttcctgcaactgtgtgcagtttcctctccctgtgcatccatgacatttccagaaaattcgtctttaccagagggtttcacttccctgtgctacggcagagcacggcgagcagagtagagcagcggtcaggaagtttcctggcaggtcgtagcctggtccactggaaattaggattgctgtgatcgtttgggtgtttgtataaaggcagatgaatttttaaaaaacaattcatggcagacacaaaatatctgtgacaaagacaaaagcgataaatataagctattgcatgctatgagagaaaattaatgcacttcttttaattcatcaacgaaccaaaaaaattcttctagacatgtccttccttacaggcacatttcctgtagttccagtataggtgagcccatgaaggctgggcattgccctgtgcaaatttcctgtaagaaccctgcttctcagatgctttggtttagttgaagtgtctctctagggcagggatgtgttgctgtttctttcatggagcctggagagggatgcaggggcagagggtcttgtggggttggttctcacctctgctcttgggtagagggagattgcagggggcccacgtccacctgagtgaaccgggcaggcgctgcctttcccactagcgtgcgcccatcccttcattgtggggtcatctgtgccgggggcagtgagggggcacacagatgctgggtatcccatgccctggggcactgaccaccttctctagacagtatccccgccagtaggagcaactgggaaaatatatttccaagagtctccatccgtatccagaatcacgctcccgcatggtctgcttcatgaccaagaggagataggagttccagcctttttttttttttttaattttaattttagatggaacttggctacttgttaaaaaagctcattgatgttttgaatccaaagggatgtggaccacacagcatgctgttgttttttttctccccacccccat

SEQ ID NO: 61877 - DNA, 2135 bp, Bovine  19866880619591
  misc_feature (1)..(1): n is a, c, g, or t
ntgtaaattttaaaaaagagaaactgagaagctggaggagagaaacaaagagggcaggagccaaggccattcccctggacgtccacgtaggggagagaagcttccagaattggctgctgtgcccccattatcttgacaactgtcagttagagcttcagtgctctccagggccagccttgattgtgagcggctgatgttgtcattttgttctcggttttgccttgagcgcgctcataagcaggagccaggtagtcaataactgatgtatcagcagttattccccaaattgcctcacaagtctgcgttttccctctttttttaaactaaagattgttttgtaaagtgattagaatgaaaggtgactgctcagggccaggggaaatgccgtgaaacccaggtgagttcccagaatgaaaacccctggttccccgccctccacttctgggattctggaaggggaaggatcagcttctggagggcaacgtggcatctttcctttttcctggcatctggcagagccaggctggggctagggctgcagatgcaagcagggaaggagcagggagaggatgggagtcctggttcgggtgggtgccccacagccatctttaataacaggagcaggccagttagccgagcacagtttgtgaggctttcctgctggcccatttttattcctgcctatcactggacaaactataaaaatagctttagtcttgtagtaaaaaaaaaaaaaaaaaaaaaaaggtagggtgtgtgtctactttctgtgtttgtctgcatccagcccaggttgggaggcctttcagagaagctgttttgtaacacccctggaacctcaccccgtagcctgtagggaaacaggacagaacatagcggtggtatcacgctggaccttctcaggtgttcagtgtgtgtatgtgttctagttatgttccaaattgcggtttctctgtctaaagttaaaaaatgaaaggtgaatacaatatattgtatttggtaacaatgatatggactggtacatcgagacagataatgtgcacttgtaattagactcaatagacaggcagtcatttttaaattcttttgacacatgcataaaatagtcatataataagataagatgacaattttatgttaggttgataaagtgtcctgatacatgcatttaaatgtctgtaagccttaaaaaaaaattcagacagattaattctagtttccagtatttgcagttagtcattaaattaattttcaaatcctactaaacaatggctatgaatatgttttttttcctgtctttcttgagtcttatacctgattgtaaggaatggatacatagatttggtagctttctcttaatttttcaacatttgtaaacatttatgttagacatgggtgtaaaaattcaggttactgtttgtgactagaaacatgctatgcagttttagaagctgagaaaaaacaccagtaatagaacataatcttcttatgaccacttgcctgaacaactgtcatactccacatttaggaatctttattagaaagattacatagtgtccttgaccaaatattgaatattttataagccccatttaaaaaagaagacattttgagcacatacacttgatttgatcagcacttagattcttgggcttagttactttcaattttgtaaattattttagtatttcaacaaaagtggcccgagagacatatggggcagggggagcatttctctaaaggtcacgttacctggactttttgaccctctccttaccttattttctcaagtgtgctaaggtgtggctcttgaagaataatttaaatttgtttgggcttaatgataaattattaattcatactgtcaggacacatgttattaattatgactgtgttttcttcatccagaacagctgttggggaaacagtgtaagttcagattgtcttcgagggttgggagccaaagcaaggaacttaccaactccttgtcatcatcttcctgattcccttgctttgggaataaaggattgcagggggcggagtgaatcggggagagaaactactaattctgggccaagatgggtgctaacaaatgctcattcatgtacctttttagagagcaagcctaactgcca

SEQ ID NO: 61878 - DNA, 943 bp, Bovine  19866880697963
  misc_feature (1)..(1): n is a, c, g, or t
nccaggctcatgggcaccatgatatgacagaaataaaagtaaattatatcacttgtcatcattaagaaaaattttcatctccgttcttcattcgaaaagcactatatttaatgaatgagtactgagtcatgacatgtaaatgactgaaatattggaattatactaaggtcaactaacgtatttttaaaccatgaaattaagggatctattcatgcctgtcgacagtgccactctcagtgattatgatctctgcaaggctgcccctggacactggggaatggtggacagttctacaagatgtggaccagcttctgtggaaactctcctgtgatcaaattgaagaaatctcgctgacctgtttgcccaggttctgcaagcctcaggacactatacatatctaatgaaggaatggctggtcttgtgcaaggcaagccgcattccaaagagcatcttgtagatttatcactcgtgggagagggaacactggctcctgcggttcttccaaaatggtggcccccacaagctgtgcgtcaggaaagcagatctttgtcagctgcattaatctcctctaattttctctaagaaaattaagatgcctcaacatccaaactctgcaaaaattttggtaaaagatggaagagaaaagataaaagatgctaaggtccaccaggaaacctgagatgagaaaagttatggtgaggaactatcttcccaggaccagacactttcaggctaaagtgggcatgttttcatttttgcaccctgcagccattttcaattttttggtaaaataatactccagacttcttttgatgaaggactcctttccattctcggtcatgaagcttaggtaggatttaccctagatgcagcaccaaatttggacactaagtgtcctaagtccatgaacatatgactttaccctgaccacaggaattaatga

SEQ ID NO: 61879 - DNA, 606 bp, Bovine  19866880709295
  misc_feature (1)..(1): n is a, c, g, or t
nattcctcccttgtttctggctgtaccttctgcaatcgaactcccactctgccgcagtagcgtgcaacctacactccccgacctcttgcctacccatttgcagatggccacacaggtgggagatgccactgcctttcagggcctgagccattatcctgggataaagtctaatgacttagctgtgggcaccaaacttgttcgtcttgaactcactttgattcccctgggacttacgtggaactcgctgagcaagcgaactgccctaaattaagacatgggtctgtccatgctttccagtgtgtttaggaaggctttactctggattcgtgtccagtccctgatcccagacccactccctgggatggatacattttcaccacatttattattgtttctggttcccgctttccaaattgcccagagacaggagtcacctctctgctcccctcaaccctaagagtattttgagagcagaaggctggctaactttccagtgaacttgtatgtaacaatccctaaccagccgagaatacattcaggaagccaggtcaatatataatctctaacagtcagcctgttaagccaccagtctccttgacagacatt

SEQ ID NO: 61880 - DNA, 1307 bp, Bovine  19866880718664
  misc_feature (1)..(1): n is a, c, g, or t
ntgaggaagaaacatgtttaaatgcccccactcaagtttttcattaagggattgcatagctctgtctgaatgtggtcacaggctatgaggccactacagtcttgtgtgaagccagacttgcaaaaagagggaggagaaagacgtgttcaaggagcccatgtcttcagctgagactgcagcctggaagctgaaatgagcggcagaggcagactgcactgctgttctctgattccagcactcagatcaggatacaaacatggaatttcaagctctgcctgcgtagaaaggagcttaaatgtcatttactctgacccctaatttaacgtttctttcctccccaagctttccttcaagtggtcacatagcctgtgttgaacctctggtgatgagaactcacttcccaagtcctatggaagcaataccatttggggttgatgcaccctgttctgggtacattgccacctgtctaaagttctcagtcctctgagctgctcagcactcgcagcctcctcttcctctggaagctcttcaaacacagaaagccagaaatgatggttcccagtgtgggtatattctgagctgaatggttgctattccctcctcacataagcctggtcctgtatatctaaacctgtcccaatctttgctgctgctgctgctaagtcacttcagtcgtgtccgactctgtgtgaccccatagacggcagcccaccaggctcccccatccctgggattctccaggcaagaacactggagtgggttgccattttctcctccaatgcatgaaagtgaaaagtgaaagtgaagtcactcagtcatgtccgactcttcgtgaccccatggactgcagcttaccaggctcctctgtccatgggattttccaggcaagagtactggagtggggtgccattgccttctccgtgtcccaatctttactgaccacaataattttcagtgtgatctgatcagcacagtaggacagggctccttctcatcacctccaatgttctctatactatactcccattaatacaaccacaattgcagtgttggagaagactcttgagagtcccttggactgcaaggagatccaaccagtccattctgaaggagatcagccctgggatttctttggaaggaatgatgctaaagctgaaactccagtattttggccacctcatgcaaagagttgactcattggaaaagactctgatgctgggagggattgggggcaggaggagaaggggatgacagaggatgagatggctggatggcatcactgactcgaggacgtgagtctcagtgaa

SEQ ID NO: 61881 - DNA, 977 bp, Bovine  19866880751621
  misc_feature (1)..(1): n is a, c, g, or t
ncaattaaggaaaatattagttcttctgaaaggaaaagagctctcttgtgaatttggggcatactggctgtatgtgtgccctagtggtaaatatggattttattaaataaatctgcatcttaacagcagaatctgaggctcagccaccatcatttcccctgtggtaaaccttggaaagacacttcatgtagaaactaaagaggaacaacattatcgcttggcgtggagcacagcccttaccagagccatcactgaaatatgttcacaaccctaaagtttgtttctgatttgcaagcattttcacatttgataagcacctgttgtaaatttacatccactcaggaagtattcttacgataggaagctgtgcattgtaaagcatatttatattcttacccttgtgcagcgttgccgcttaatgctcaggctgatgaaatcactggctatacaggacccaacgggaagtgcagcaccacctaattctcatggcatcatccctgaggaactgcaggtcccttccccctggaaaggattttactggcactgatcaacaagcacttgggttttaagtccattaacttgaagtgtgtgcgtgtgcacgtgtgtgtgtttgtggaggctgtgggggtggaatgacagacaaagagaagcacagacttcacacttccttgagatgtgccattacactacagaatcaagaaaccatccccaaataagtaggagcctcaggccctgagcgccagggaaaagcaggcacaagcctctgatggaacccagatttccaatctggtgccgctgcccacggaagggaacccactggccacattggcccctcggtccctgatgtttctttacaggcccatggagagtgaaaacgccccaggcagtccactgccaggctgccccgggggggcctgcgggctgtgagaatcccctggcttggctcttttggcagatccgtggcagccaacatccat

SEQ ID NO: 61882 - DNA, 1745 bp, Bovine  19866880777616
  misc_feature (1)..(1): n is a, c, g, or t
natgttcatttgcaacagctgcctgcagttgggaaaccagatctgctttgtggcatccttgatcgaagacaatccgtctggggctctgcggcctctcccaccatcgtcctacccctgaggcagtcacgcagttcctgtgggctgtgtacagcccagagtccctgagtatcaaatactccagcactcaagtgacaatcagaagacatggtctgagtggcacggtaacacccccgaaatgccaagcttgcacccaaaccttggctttgactcgcaaagaattaaagtcaacatgtgtctgggcatcaaatcagagagaactgtcaactctttcagcttgtcagttctgcggcactaaaatttccttcttaaaacagtatccaatttcaagtgtaaaggaagagaatggataatacagatgtttcatggattttgaagtatcgagagtctaaaactatcacttttactttatcagccacctcagaaaagttcaaagcatttttcatgaacgttttcatgcaaaatttcacaaaagcagacgggaaagatgagatcctcattttaaaggcaaaaatgaagggacggctagaggtcggcggacccttagcttctttcttctacatgtctttccccaatcccaacggtcagcgttacatttttaaagcactgtccctagacgggccaggctcttctggacctaccaggactggagacctaagccaggcactgaggggacgggtggctttgtgcccagtagaggcagtgacaagccagaatgctctaggtctaaaaacagctgaacagctctggcctatcctgccatgaagaatgtggacctcaatgaagccagataatctgatttttaaagagaagatgtaaatttaatagtttttggataaaattcagtgattttttaatttttgaaaaaaaattcattgcaagcaaaaaaaaaaaaaaatcacatctgtgagccagatactgcccaaggcagctggtttgcaacctcaacctggcatgtactgccactgatggcaatttctatctgtgcttaggaaagagagtgaaaaaagagaactcctattttaaaccacaaatgactgcaaacacatctgcctgctaggggacctacaccctttttctccagtttggagtattttctaagaaagatactgtgacggtttggggccataaacccctgctgtcaccatcttcagacatagtctgaaagggacaagtagatttttaaaatttatttttatagaagtttagttgaattactatgttctgttaattactgctgtacctatatacaatggaatactactcagccataaaaaaggatgaaagaatgccatttgcagcaacctggatgcaactagagattatcatattcatcctactaagtgaactgtgtcagaaagagaaaggtgagtaaatttttatctgcttagaaaagagagaatgtagggttttgggaaggtctgagctctgctgcaaataaagctcctttcttgttcctgtccagtcttccaagaaagtttactatcttcgcctgcttttgctaagatgaagcaagggagtgccccacacctgtgtcgatgtgaagaggaaagagtcactgggcaagtctccaaatgcctgaatgagaaaaagaagtgggagaaagaaggcacacagaactcctcagagatactggaaaggagggttcttggcttccctttgcaggtaggacaggatttgaggggttt

SEQ ID NO: 61883 - DNA, 1085 bp, Bovine  19866880791407
  misc_feature (1)..(1): n is a, c, g, or t
ntttagcccctttttatttctgtttatcataattccaattgtatttctcatatttaccttttagtgccttgcccagccaggctgggtgatgagggagccactctggatggagttgcccccattcctggtgccaggtgggaggggctggctgtagggcctgggaggcagcctctgatttcctgtgccctgtccccgggcagtggcgagtagctctccccaaaggtaggccttaggagcccttgaggttcaccctttggaggagaaggggatttctcagcccccagttacagacagactggggagatgtcagtggctcttgccaaaacaagggatcaatccattttatatatagtagagtgtatctgttaatgccacattcctaataatagcacagggaactgtgtttagtagcttgtaataaccaattgtggaaaatactgaatatatatatatattattgaatcactctgctgtacacccaaaattaacacaatattgtaaatcaactatcctttaatttaaaaaaaataaccagttggtagataccatcagaaagttggagggctgatttggattcgtgcttgtaccacagaggaaaaagtagaaagggaagaaaaaaaataacaaaataaaggtaagaggaaaaagaaaaagttggatggttagcaggttatggtcccagtaatcttcctctcaggtcgcccttgcagggatatgtttattcgaggggctggtgcatttctaccaggcactcagggaaagcccacaaggaagggccctcttggcagcatcgctttttccccttaacctgggcccaggacaaaagtgtctgatcaacagtgttggtggtagggctccctactcttatccatccacctgtccaggctgcatctgtaaagtttagaagacacatatataagtgtgtgggatctctctttctcatggaggtcagcacctctcaaatcccaggaatgtagcccttccgggggcttcctggggatgagcctttccctggacccacccccccacccccaaacttctttttgacttttttcccttgcttgcttttccaggaggcccagagg

SEQ ID NO: 61884 - DNA, 1159 bp, Bovine  19866880807100
  misc_feature (1)..(1): n is a, c, g, or t
ncggggcttcaaggctttcactgcccagactggaccctctatgtgaacagatatgctgatggaacccactctctgttccagtaagaaaacgacagcaccgacggtagtggaatctggctgcctgggaagctaacaggtcctgctctcagctcaggttcaagaaccttctgggattacacttgccagacttcatctatgcctggcagtggggggcgggcagggagaaagaggtggcaggaggaacctcagtcttcaaagcccagggataggagggaccttcagtggttgtagctgctcctgggatgaaaggcaagctcactttttcccctcttgacaggtctatctgcaaagtttacaaaagagaggaagtgaccaggatgctaggggcgtggtctcaagggctgggatggatccaggccctcccgcccccggcctatactccccggacactgagcatccacagctctgtgccatcacactcaccgccaatctcaccatctgcagctctgttcagtaactacaggatgaacatcatctcaattaacagcgtacctttagggcgtctcgtcgccaactcttccaggacaattgtccacactgtcatcagggcctaatcaactaatgatggctgaaaatgagggaggccaatcccaataaattcgaaggcaagtcatttttctcttttaatgcccctctccctccttcttccttcttcccacggcacaatgcagtaaattaatgtcaccgtggttattacagcaccgctgctatggcaagtattcaagctacggtcctggaatattttacctcagcatttatttgtccataaaataaaacaggatttatgggatgactctccagtttgagggctgcatggacagcagctgggccacatccttacctcctccacaggtaaagatatagggatgctctcgggagcaaaagaaacctggtggacagggtgcctggggctgggaagaacgagttccccaaaggacccactggccatgcctaggggaaaagctccagttaaaagaactgaagatgtgggaatcagttgcaggaaaaggatacagctttttgaggggaggatgcagacaaataacctactcccccagcattccagcatttggtaccctgctgcacaggctccgcagaa

SEQ ID NO: 61885 - DNA, 1034 bp, Bovine  19866880827568
  misc_feature (1)..(1): n is a, c, g, or t
nggcacctggctctgcatgccggcatccagacccgaacacaggctttgctgagatgccctgtgcatcctgctggccatcaaacaaggcctgaccgctccttgtggatggcagcggctccaggcaagccagtggcctcctgcagacatctcgagcaggaggaaacaaacagattaatctctgaaatttgatacccgttccagacacaagtagcaacaaacttagcgacaaagctgtcaaaatatgttccacagcctcattggcaagagatctggacacacgaaagaaattcagcaaaaccaaatcagttgccaaactgggaggtttgacagcgtgctcgggaatacatttagatcaaaacaggaacacatccaaaggagcgagtgtctccataaattattatggaatgattagaaataattagtcagtgatttcaaaatattacatatatttttcagtggtattgaggggacgtgttatataacgtgggattttgtttttacattgggtttttctattttttttttcttactgctctccagcagttttcaaaagataggggccacagatgtaatactccaccatgcaaatcacggtggcttaaaagaatacgtttttaggcaacagaattgcttcgcaaagcttctaaaggaagagaaatggcagaaagagagattcttgttcccttctgggcctttttgtggggcatactccctagttgcttttcctgagttagagtttggtatcaaaggggtttacatttacaaagatttacatttacaaaggcctctagcaggttgttggacaagcccctgatcctgctggggctcacccaagctcacagggaattccgaccagagccaggctggaaccctagcctcctgactttcatgctatttctttggacaggacggacctgggaccaaaagtcacctatggactttctgaagaaacttcattccagagacagatctttggcaacaagtctgttcctagcattcctgccacacatgagaagaattcttgtccaggcaag

SEQ ID NO: 61886 - DNA, 1845 bp, Bovine  19866880835439
  misc_feature (1)..(1): n is a, c, g, or t
ntgtctcctccccgcgctttccctctcttccccctttccacagagcctcagttctgtttggttattttcctaccttttttcattattgatcccagacccaggaaatgcacctgatcttctaagccaatcaatgcacgccactcttttaggatctgttattagtccaagagtgacaggtgacctgagtgtgtccaatcagaatgaaggaaacaactcacggcctctggttagagagagagcctgtggttattcccatttacaccaaagagaagaaaagaaagcgagcaccccagctgtcatggcccaccagccagcaatcatgagaacagccaggcagaggagagagccaaagctgagtaaagagagaggcagagagagaaggaagaaagaaaggaaagaaagaaagagaaagacagagagagggagagagagagaaagaacagattcttcttttttaatatttatttatttttaattgattgatgattggtgtacaatattgatttgatttctgtcatacatcaacatgaattaaccataggtgtacatatgtcccctccctcacgaagctccctcccacctcccagattcttgatggaactgttgttagaatatgcatcaaacctacgtaattgtaaaaccacccctccccacaaagcctacttgaaaacacagttggagtcagtacacatgctttctactctagagcaaacagttctaaactaatgatgctgctcacatcattccctgccatagtgatgaactctggcctgtatcattggggtctccaccacccttgactatcttccagacaccttacttgaatcttttgatatttatcatggtgcttgaatgttttttcatagcaaagaggttaagttgggtgtgaagtgttccttgtaccacgtcatgatcaaaagtggggagatgagacctcaactaagaagactgagaatttcaagggaaataagagaaaatagttttcttatccctgtcttaagtcacttgtttgtgttacctgcagggctcctggggatatgtggtttgctgacagatttttaatcagcacacttccaaggagatgtgtcccgtggtgccctgtgtataggagtgtacttgccatctttcagcgagacatctctcctagctggtcccctgaggacacaccaaacggtgtcctggtggctcccctgcagcggcccagggtcagcctgactcagccacggcctgggcttgccctgaagcatccctcccctttctcggagagactttgtgtctgactcgaacacaattctctccttttagatgtactttctgagactctgtggaagcatatttaaaacattacaagcaaatcaaaacatatgataaatcatgaattttcctcctactcccagtggcctcctatagatgcaaactttgacaaagaataagcaagaagtaaaatatttgaggcagacagatggtagccctgaagttacaacttctcctcataactttaaaaccattgaaatcagacacttttttttttttccttcttgcagaagtttggctaaaacagaaggtggacagagtatctgagtacatctcacgtacagtccctgagtttctcgtgtccattttgaccttgatttcttgttggcttttggagacctcacacactctccaagaacagtcagctgggtaaagttcactgcagatcatctttggaaaaacgaattttccaatgaagacagcctcctgtccagtctgcagacagtccttggtcccacaaaagcagaatcgtgccctatttaaaacatggaaacaacagcaaatatggcagcaatggatagcaaagagcag

SEQ ID NO: 61887 - DNA, 984 bp, Bovine  19866880838315
  misc_feature (1)..(1): n is a, c, g, or t
naatgtgattatgatgaatagataagataggacagggtgtttgaaaaatgacttaaggactgcatgtaagtcactggctagagtcccaaaatgcaaattctggttaagttaatgactggaaaatcatgatggccccaactgcatgagcttttgcattatttaaaattgctttataaacaataaataattagcattttgtgttagaatgagttaattatttcttaattatttctataggcattacaatcccaacatcaaaaagtttcagtgtaattgacatgcagacagtcccgcttctgcctggcggtccagcatcataagttactgctcattttgcaagcggtgcgggagtgttcatgtcccattagaggtcagcactttattaaaacgtctggaaacatctagtttgcaggaggcttctttccctaagaagtgtctgtgcattctcctggatggggttttaggaagggaagttgtatgcccatgcccgccttcccctgacaaatgagacttatcatccgggcagttctatgctctcactcaccctctcaggagctggggatctttatgaaaaataaattaataatgcatactaaattatatctgcaagagacatttaggtgtatattgcagtcttcaaagatgattagatttacgttttgttcaaggagacttgtcacccccatcttccaggcacatcttgaactacaagtctgccagtgcagcccgtgcacggctggccatcccatggggtcacagccactgggctccaggtgccaggtgcaccgattaggaccacagccaggagaaccttgaccaagtgacttgactggagcctccaaggggaaagctggaaccttctgtggccagggggccatcagcgtggtctgcaaagggactcctatggctccgtctgcagagcctggtgtgtaatcgaagggcagctccatcctggatacttaacactgagggaaaaaagccact

SEQ ID NO: 61888 - DNA, 1827 bp, Bovine  19866880844852
  misc_feature (1)..(1): n is a, c, g, or t
nccttccttgaactatgatcacaaataccatcccatcttgcaagattcaacttgaatgtggtgtcccccacccctacccaggtatcattagtagtttatccctctggaataacctctgtagtagcgtttctatatgaattgtgatccgtttgtgtgtgtccttgtgaaagtagttggcctttgtagtagagcacctgtactgtgcccgtgcaatggaatcactcacaagattatttatgatcaaaagagagaacgcaaaccaaatgcctgcaaggcaggcttctgacaaaagtcagtgttgctcccttcctccttctgcttctgcatggggaggagggcggattggcaggccacagatgaatgaaatccatcagtctctcacagacttgccttcaagtctttcccaggctggaggagggcttggtgactcattatggatgattctgtaagtcacatattcttgacatcacctctaagtgcaataggtattgacttttgagaacacactcaattttttaaaaaaatcctttttattttgtattgaaatatatctgattaacaatgttgtgatagtttcaggtgaacagggaagggactcagccacacatatacatgtatccattctcccccacactcccctcccatctaggctgccacgtaacgttgagcagagttccctgtgctatggagtagggccttgttggttctccagtttaaatacagcagggtaaggacacactctttgcaagtgtgtgtggatctgcaaggagatccaaccagtccattctaaaggagatcagtcctgggtgttcactggaaggactgatgctaaagctgaaactccaatactttggccagctcatgcgaagagttgactcattggaaaagaccctgatgctgggagggattgggggcaggaggagaaggggatgacagaggatgagatggctggatggcatcaccgactcgatggacgtgagtttgagtgaactctgggagttggtgatggacagggaggcctggtgtgctgcaattcatggggtcgcaaagagtcaggcacgactgagcgactgaactgaactgaaggacacactcattgttcacatgctacctgggaagacccaaatcacaacataattgttctccttactggtttattatgtctcttttctgaaccttagtttctcccactgcagaacagttctcgtgtgttaagagtttcttcccactcagatactttcacagcctatatttggtcttgaagcaattatagaacctggggataaattagcctaaggtatttcctttgcccttcttacgtcctctttaattttgggttgtgcatttattttggggtctatttctttccctcttttcagtgtgatgtatggaaaaacagtgtttaaaagagaccttgtaaaattacacttggatttaagcagaattctatgaaatgtgtgcttaagcattttgggggtaaaaaagaattgaaacgggatattctcttagacttaagtatctgaaactggaaataagttgcaaggaagaaggaagtaagtatccagagaattccagtgcatcctttagggtctggctccctaggacccagaaatggtgcctttttggtgggagggcttgggtgatgttaaaaacgaggaaatgatctgaacaactacaatgattaatactaacactcgtcttcaaagagccatgagctctttagtatctatgaaatatatgaggcttcagttgaagtttttatctgagagatgtatctggggctctatttcatcttcactcagctgaaggcaaccttgagggctgcat

SEQ ID NO: 61889 - DNA, 1024 bp, Bovine  19866880880193
  misc_feature (1)..(1): n is a, c, g, or t
natctcttgaagaaaattgaagatatcgtgagaacatttcattcaagaataggcatgataaaagacagaaacaggaacagaagagattaagaagaggtagcaagaatacactaaagaactgtacaaaaaatgttactagtaataataataataatttttttgagggtacaccaagagtgttatttgaaaaccatgccttggaatgacttagagaaaatgattccattataacacttttaaaagttggcatgtggacattttgtttttctttttattttaattggaggcgaattactttacaatattgtggtggttttgtcatacattcacatgaatcaaccatgggtgtacatgtgttccccatcctgacccttcctcccacctccctccccatcacatctctcagtgtcatcccagtgcaccagccctcagcaccctgcctcatgcatggaacctggaatgactatgtatttcacatatgttaatatacatgtttcaatgctattctctcaaatcatcccaccctcgctttctcccacagagtccaacagtctgttctatacatctgtgtctcttttgctgtgtcgcatatagggtcattgttaccatctttctaaaaatcatatatatgcattaatatactgtattggtgtttttttttctgacttactttgctctgtataataggctccagtttcatccacctcattagaactgattcaaatgcattatttttaatagctgagtaatattccattgtgcatatgtaccacagctttcttctccaatcatctgctgatggacattgaggttgcctccatgtcctggctattgtaaacagttctgctatgaatattggggtacatgtgtctctttcaattctggtttccttggtgtgtatgcccagcagtgggattgctgggtcatatggcagttctatttccagcttttaaaggaatctccacactgttctccatagtggctgtactagtttgctttcccaacaacattgtaagagggtttc

SEQ ID NO: 61890 - DNA, 879 bp, Bovine  19866880891616
  misc_feature (1)..(1): n is a, c, g, or t
ntgaccaacttccttcttaaaaatataccataggttagtttaagcaaatattaatatgacgtctatgcgcatacatgtcttgaagaggcccattgagaaaaaataatctgaacttgatggcttaattatgtattggggtcctgcattttagagggtgccagtaagcaccagcctaaaatctagatatgactatttcacatagtatgtatgtgaaagtcgctcagtcttgtctgattctttgcgaccccatggactatacgatccatggaattctccatgccagaatactggagtgggtaacctttcccgtctccaggggatcttcccaacccaaggattaaaaccaggcctcctgcattgcaggcagattctttgccagctgagccagtcaccatagtctccacaaaaatacaaagaaaagcaaatactgcacctcaggaaatgcagagcaaaagcagcatctccaacacatgacgcagcagctcctggaattggggcccgtgagcattacagtcactgggtcccccttcaccatccttcgcccctgatggagctccctggtggagctcagcctctgagcctacaaagtgaacactaatttgaaagtcaaagtcctttttgcaaaagaactgacattctgagataaagttcagacttaatatactgagtcttggcgatactgtatgttgacaggataagctgtctttaatatttctgctttaaaaattaccaacaactgttcaagttcagatcggaacatgttttgctctgcctgaatggtacccaagttagataaagttcaagtctcctcttcagagactcatgacttgcaggcagtgtcgtggagaggcgggggcctgtgtcactcagccctgccgg

SEQ ID NO: 61891 - DNA, 1717 bp, Bovine  19866880895393
  misc_feature (1)..(1): n is a, c, g, or t
nctggcttttcatatctgttctgctgtgacatcatgtagctgtcaccaccccttgagccacatcattgcagaggttcactctgccagcttcacacccccactggtcttgaaggtcctcagaaaccccaaggcaaaacccttccaaagaatccaccacttaagatactacaggacttcccttgctggtacagtagataggaatcctcctgccaatgtacaggaacacaggtttgatccctggtctggcaagatcccatacgccacagagcaataaggcccatgcaccgaaactaactgagcctgtgtgctgtggctactgaagcccacacaccgagagcccgcgctccacaagagaagccaccgcaatgagaagcccccacagtgagaagcccatgcacggcaacagagagtagtccctgctggccacaactagagaaaaaggccacaggcagcaacgaagacccagggcaaccaaaagtaaataatacataatttaaaaaaaggtactacattacccactttcaaggactatgaaatatgtctaggtgtctagatcagcacattttcttagaatccttttccgtgtgatcaatccagtcgaccacacagcccacattttgaggcctctgtaaagggccaaaactatgaaatcagctttcctccaatgaatgctttgccatctgccaccatcagtagaaatgagctacccagagtggccttgaacatggagttctcacaggagcacaaccccaggcacacagggccggctcctggtgagaaggcacaccctcctttgtctccagaaggaagcatcactaacagactttgttccagacgaccttcttctttgaccctggccgtgagatctcttgcgctccagtggtgatcccacatgtatggggggatgggggaaataggacaacatgcatgtatatgtgtgccaagaaccaccccgagtcctgctaaaccatacactggctttatggaacgttccagaagattttcagagagagtctcacaaaagccaagagagctgtgagcatctttgttctcccactggaagctcaactgtatataaggaagagcaaatgttaaatcatttaaagagagctatttttcatcgtttccaggacataaacgtgtttccgtgcatgttattgtaaaatagtgtttctacttacgtccttatacatctgttgtgtttactcatcctctagttctgacttttagaaatagcaataaatctattttttaatcccctctcctgatgactgatgattattcatcgctaaaagggatggagagaggcccatgtgaggagtgatccaccctctggataagctccactttcacaagataaacagggtccagggagattcctcttctgtcctgggtagtttatgcaaatgaaataagaagtcagtggcagctcaaataaatatgaattaccctcaggtggaaaccccgaccacttgttacagtcagtttcagcaaggaggagtcaatggtgacatctacacaaacagtacaattcattcttatactgtgttcctaatacagagatcacaaatggcttcgtgaaaagtcagtcatccctgagcgaaagccaactggatggaggaaggaggaagagaagcctccacttctgggccctgggaagaggggagaagttgtcaaaaccaatgcttagagagttgtgcaagcaaggatagcacaa

SEQ ID NO: 61892 - DNA, 1509 bp, Bovine  19866880902659
  misc_feature (1)..(1): n is a, c, g, or t
ntgtttttctggaactcttgttttttaacgactccagcagattttggcaatttgatctctgactcctctgccttttctaaagccagcttgaacatctggaatttcatggttcacatactgttgaagcctggcttggagaattttgagcattacctgctagcgtgtgagatgagtgcaattgtgtggtagtttgaacattctttggcattacctttctttgggattggaatgaaaactgaccttttccagtcctgtggccactgctgagttttccaaatttgctggcatgttgaatgcagcattatcttttaggatttggaatagctcaactggaattccatcacctccactagctttgttcatagtgatgcttcctaaggcccacttgacttagcatttcaggatgtctaccccctttagtaatgttgaatgcaatgggcatatgattgctcttgctcctggctcttcaaagtggaggttgaggttttttggtcttttcatatcttcttgtccagaatttgtcccaacatacatgcagttatttttagcccatatcttatagtttctttgtattttgttgcccaagaagaggtgggtccagctgcaagcactgcagcactgcaggaaagggtcccaggttccagcctgcctcagttgaagaaactgcctccagacccttctgtgggcacatccatcaagatgacctatacttccttttccccaggactttctcagggaggcctggtagcaaatcccgaaacctccagtgtttacagccccaagtgatattctgggctggctcctcctccctccactgctattagtgtcaattaagttcagcctgacaggccacctttgacgaaatgctggaggagcagggacataaacaacgccaaaggcttaggagttgatatatggttgcctttaataaacatttgtttgcatattttttatcatgctaatgaatataattactttaatttatgtcatcaagctatgattctgttctgatccatacgtcacttgaatgtgtggtgttagcattttgcacacactggcaatttgaagaaggggaaggatcagcccctcctacaagaatttggagcaaccttccacaatggatagcgcacttatggcagctaaacccagctccgcagctggggggcccctgctgaggacccccagaagggtgggtaggctttccactgcccagaagaccttctccaagaaacacacatttttacttccctgtaatcactccaaacggaggcctctgagcacttacccctgcacaatgtccaacccagttgggaagaaaagtattaatcatggttttactgattataaaagtaacgcaaatttattttagaaaatatagatcacaaagagtttagacgaagatgagctaaacttctaccctcaaaatacttatggaaaagattttatgtatatagatacagatataaatatatatgaaaatcaaaggtgaagtcgctcagtcatgtccaa

SEQ ID NO: 61893 - DNA, 1668 bp, Bovine  19866880909665
  misc_feature (1)..(1): n is a, c, g, or t
ntgctccagcagctgatgcaagagagatttaagggaatattttaatctgaaatctagcggcagggagataagagtggcgtggcgaggctgggctgcaatcgacatatttatcgtccgaggctgaccatccaatgagtgagttctgctcgtcagttcagatggatagctaatcactttctgtgtttatgatttcaatttctgtccttcgtggggttgtggtgaattagcttggtgccattttctaaaatatcaagcatttttatacattaggtatagtgaatggcaaatacttgatgtaaagtctgcagttttactccataaccagattgtaaaatatgaactgaattaatcataactgcgaaagctaatggtacgttttctcttattttatctttagtgcctttcagatcatgttttaaaaccttcccccgtctggcgttgggaacgcagccgcggcttggtggtggatagcaagaggcaaaggtcagaccggaggctgcacaaatattgtgtgctggatttattgttttaattaagagcgtggcagttcatcataaactgtttatggcgtttctgcacagtgcagcattttgaaatcagctgttttaatgaaaacataatgtcatatctgtcaaagttctaaatattttgaaagtgaaatatggaaacaagaactttgattctaggcttaccgagattagctcattgaattgcttttaaatcccttaagagggtcacatcatggggaccgtatggtttcatgtaggtgactggggaaaaaaaaattctaggaggttctcaagctggttatttaatagtgaaaatacaagttgaaggttaatgtatcaagaaaccaaaccattacggttggcgttggggttttagattaaagatgcaataatgggtgtgcagggcctggatgctgagctgtttggggaggcctaattgtgccgagagggagccgggaacctctcagggtaggagagaaatggaggcgcccctgtcctccttttccagcggtgaagctttgacatcgccatgtttgcaactaattatttataatgacctcaaagatgatgaggtttcacagacttttcaggctgagcagtttgcaatcctagtaattccctctcatggtcgccgggcatctgtgtagacatgtcagccattccagttacatttgttagggggtcggataaaatatttgtctaatctggaaattgtatttttagctgtactctcattggaaacagaaattaagcttgtcattagatgccgggccacaggagttgactgaacagggtaatgtatgttatattctgtgctatacttggtcaagtttcatatatatcgtattccacattattttattaactttaatatctacacttcctattaccagacatgcccctcattcaaagcacagaggcacagttctctaatcagaagtgacaggctatatactttctctcagccattacttggtagcctagagcaaagaactctgtttccttgaaaatgttttgaattgggttatttttattgaagtattaaagtaattcttcagattttaggctattatttaagtacttttgggagaatacaataacctccggattctataggctttgttactttaacaatccgagctgctaaatgcatcttttt

SEQ ID NO: 61894 - DNA, 1670 bp, Bovine  19866880930347
  misc_feature (1)..(1): n is a, c, g, or t
nttggagacgggagtggcgtcactgtacatttctgcaggcatcttttgtgattggcttaataaaagacaaccgaacccccatatctgcttccacagtcagtctgttgcaatatgttgtttttgttaaagtctatgaagaaaatctgatctcacacagatatgtggttggaaaagggaggtgtgtgctaatagccttttcacataatggtggatattcttctttgatactacaccaaaacacagacactgggagtttcttaaaggttagttacaataaggaatttgaaaatacatgaactttttatattctgttacatttaaatccaccgggttatcttgatgtttgaattaatcttttaccctttcatgatttggtaacaacaagcattggtcgcttgaatattatctattcaataagctgtgagatcttccaatgttgacacgattcattgtacaatattaaaaaaaaaagtcacattcattagtctctctttaagttctggaaagctgtcaagctcatggtggctgatgtaagtatttcaaaattcttgaaagcttgaattttatcattggcaacaaatactgtcagttattttcctggaagtgacaggattcatttgttcattttccagaaaattctgccaaatagtcaagtttgaataaccagagttctgtgtatcagtgttctctcaagagaaaatggtgctctgtgaagaaaaaaaaaagcagggggtccagcttaggactcctcatataacacagctgcttctccttgcgggagctgtcagcttcaacatgggacaggattgctctgcgtgcatcatttcatcacacagggtatttcaaaggtctgtactcgaagactgagatagaatgaagtgaataactgttactgcctcatcaagtccattctttctttccaaattcaggatcttttaaataatctatgtaatggtacataaatatttttatgtaatggtacataaattatttttatttgtggcaaaagacataacaaagtttaccctcttcaccattgtttttaaattgatgagacatttttattcttttttatttattttttttaactgcatcatgcagcatgtgggtgggaccttaattccccaaccaggggtcgaacctgtgtcccctgcagtggcacagagtcctagccactggatcaccagggacgttcccatgttcactattttttaaatgtgtagtccccattgttgtgcagccatcaccgccatccatctctggaatttccgccacttacaaaactgaaactctagacctgttaaacaaagactccctaccctccctcagtctcctcagcccctggaaaccacctttctactttctgtctccactaatttggctattctgagcattttatataattggaatcatgcagtatttgtctttttagtgactggcttatttcacttaacatgatgtcctcaaggttcgtgtgtggcgtatgatggggtcaggatttccctccttgggaaggctgagtaatattccatggtatcccacgtaagagaggcttttcctctttctgcacggcgtggcagtgagcagcacagggactgtgagagcctcgattatgctaaggcaccagcagtttcactcaccatcagcacgaaatgaaaaggccaaatcat

SEQ ID NO: 61895 - DNA, 3658 bp, Bovine  19866880951212
  misc_feature (1)..(1): n is a, c, g, or t
ntccctaaaggtaagaacactccagctgagagacaagtggccaaggaagctgaaagttgtcaggggtgaggtggggtagtgagcccacagcaggctgcagatgctcaggccattttggtggagaaccttccacatgcctgtggctgcatgacctgcaactgaatcccacttctggagacaggcatggaaataagggaatcagcatactacattcagcaggatgctttttgggcaggtggctggaacctgaaatacagggaattccttaacatttataactaaaaggatagcggcagtgctgcctgtaggcccaactgcctcaggtctgggatagggttttcagaccaagccctgtccatttctcatctctgataacaggatggctgcaactgctccagcatctctgcccactctccagtgtagcctggggtagaaggagagaaagcctctgaccagcattcccacagacaacttgcttacatctcattggctctaactgggtcacatgtctaattctaaaccaatcactgtggagaggtgaatgcaaagtactggttgcctgaaacatggtctcatgattcacctctgagcttgtatgggacaacttcaggagaagtaccaagagtgttggtaaagggagtttctcaaaggtaaaactaggaaattgggtaacatttccaagcaaagggtgaatggatataaaggaggaagaacatgaagtgggcacccagggacatggctgtggtcccagctccatcacagagtgtccatgtgagccttggtgaccttctggacccatttcccatccaagatgaccactgaaatccctttcagctctatccctgactcctctcagatcccaggtgaaaattcatgagaacactatgtttagcaagggtggctatgttatacttcaaaggcctcttagaaagtcattcttaaaataaaactttaaaaaaaaagggcaatggatctctcccaaactgtaggaaacatggtcctttgttctttaagagaaacaaaaggctgatggattactaatgaattgtggggtgatggtgatggcaattttttcaacaccaaaagtcagcaaggactttgggtgaaactataagtctgtgatttccaaatctgttgagaataatggtgtgcaagtaatatagaacagaacagaaataataataaatgctcttttaaaataagatttctctggtttgctttcatctggggagatggcactctgagaggggatcttatggcctcagctcctccatcaggtccttggtgcctagagaagatctgaatcctgccggtttcttctgcagacactgtttggtactggaaacaaaggaaacgagccttgtgcttctgcagcttttagtctaacacccatcaatcaataattcctctaagaagagtgtgatgagtttgatgggcactgcccttcttgcgtcaaagggacctaagttagactggagaatccatggtgttctccccagggaagtgccatttaacctgatacggatggaaagagattgaccagagaaagaggagagaggaagccttctgaaatacaaagggaatggaagggaaggagcttgggaattctgaacccaagttagtgtgggtgggtgtgatgagtgtgcagagagagagaaagtgatgggaagggaggtggagacttgggtagaggcagtattgttgaggcccttaccaaccaagcaaaggactctgaagcttatcccaatagtgatgggaagccagagaaaaagtttgttttcttacacctattttttgtgtaggggagtgacttgatcagaatagcattttaaaaagattatattggatggagaaatgcaacctgatttatgttttaaaagactgtgctggcttcttggttgtagaggagcaagagaaaaaggaaggagaccagcaagaggctgcatcaattgttgggatgaaatatgaatggaagagtgtgtataaatcacttatctgataaggtatcactaggctgagcgccgaagaattgatgcttttgaactgtggtgttggagaagactcttgcgagtcccttagactgcaaggagatccaaccagtccattctgaaggagatcagccctgggatttctttggaggaatgatgctgaagctgaaactccaagtactttggccacctcatacgaagagctcactcactggaaaagactctgatgctgggaagaattgagggcaggaggagaaggggacgccagaggatgagatggctggatggcatcactgactcgatggacgtgagtctgagtgaactccgggagtttgtgatggacagggaggcctggcgtgctgcaattcatggggtcgcaaagagtcggacacgactgagcgactgaactgaactgaaactgaactgaaacttgggtctgcttgtctgatgcacagcaaagtcaatccactgacactggggtgtggtgaaggaaagtacaaagtttattgcagggtgacaatcaaggagaaaagacatctacagctcagaagacctgaactcctgatggcttttgaggaaggggttttcaagacaactgtagggatgagagacatggcgtctgtgatcagctcctgtacattcttctgattggctggtggtgaggtagtatggtgagattttgggaatcttaatcatcagttttctgattccaagtggcctgaggtctatgtgctggtggtcagcaagtgtcagcttccttcacctggtgacaaggggtgtggtctcagtttctgcaaaactactcaagtatatgcatcaggatattatctataggttgtgagatggaactaagtgtctttgactttgtttcatggttaaactattattattttgtctttcttaactactttcctttgtttctgtattttcttacttctctagctattaactgattaaattttctcttaggaaagggaaggtgtaggaggctaaagtttttctataaataagaagccatggaccaagggggctgtccccaggaaggtcctgcagaatcctgcttagtttcaaagagaattgtatcaaaaatatataaaaagccattataattcaataataaaagctaactcaattaaaaataggcaaaggatctaaagagactttcctccaaagaaaatacaagtgactgacaagcacacagaaagatgctcagcaacctcagtcactgtgtggttggcacggcttctgtgctcactctatccaactctttgtgaccccatggactgtagcccgccaggctcctctgcccgttgaattttccaggcatgaatactggaaggggttgccatttcctacttcagggggtcttcctgagtcagggattaaacccatgtctcttacattggcaggcagattctttaccactgtgccacctgggaagccccattagtcactagggaaatgcaaatcaaattacagtgctttccaacccaataaattgattatacacttaactctgcccagactccctcagtgattcagagtaccgagaggataaagtccagattccctaaaacattagactgtatggacgctacctctgcctttccaggtctagcttccatcccttccccataaaaccactccataaattcttgataattcgctgg

SEQ ID NO: 61896 - DNA, 2057 bp, Bovine  19866880976658
  misc_feature (1)..(1): n is a, c, g, or t
ntttaatttgcacttaaaagtttaatttaatgtagaagaaattacttgttcccttctttgttcaccctggctcacccatgaatgattaaagagaagtttgaggactcctgtttccattttttttttttccccaagaccatctccacagtttcccaagtctgcttcccattgaattctgagcaatgactggctactttagcaattaaaatccaggggcaaagacacagcagcttcgttgggctgagagactccgccattcatcatctcggctgccataaaatagcactagatggaatctttgattttagctttagaagaacataaatcaaaatctaaagcgtggctgtcacaggcatcaccaggattatccattggagaggggcttggagtgcagggcatccgcgtgcattgttcccactgaactcacctcctgatgcatggagaaaactcctagccaagcacttgctgttgtataagtactttatcctaagtgacccataaaaagactctcaaatatgaggtttataactacagtcacagtaattgtatgcttgatatgtctgaatacaaaataaatgggtcgcccggctgggaccctccctatctagtcccctgcccccgtcgcctggtcagctctcttacccatatgcctcctgaggcctggggaagggtgttggcacagtagggcctctgagcaggtgcatccactctgtttctcattattgagatgactgggatgtcaaggatggtgaccgtgaaagcagagatgcagccagagggagtccatccctagggtggtgggggaggtggccttgcacttataaccccaaatccatcttccgtgttcaattaacaggccaaatgagtgtcgctatgccctgtaccagtgaccaagaaaggagaggagagaagctcaagatgacccagatgaaaaatgcagagaaagacctccactgactcctgcattaaaggaagaaaggcccgtggaccaatgagcctccacccagctttccaaaagcatgttaatttcatgtagcagaggaaacagtgatggaacctctcaaaccagatcatgtgactccagccagtgggaggtcagaatgaaaaggtgtatttcctctttgtttctgaggatttgggctaatggcccagaacatcacatgtcagttaggtgactgatagaaaagagaaagcagccataaccctcggccaagggcaagctatcagatgggtgtactgcaaatccaaagaactctccccagctcaaagtacctcaagatctccgactggtccccatggccaggtctggtctcttactctgcctgcagcaccagaggttccaggcttcagagtcagtttttaaacaaacatcccatccaagtgatgggggcacacagaagatagagtgctcctgttgtaaggacatctggactgctaatctgaagtagaagaaagaggtgtcctaatgaggcaacttgtttagtccctaattcaggtccaactcatcacaaccccattggatttcccaggcaagactcctggagtaggttgccatttcctcctccagaggatcttcctgttccagggatcgaacctacatctcctgcattggcaggtgggttctttaccactgagccaccagggaagcctaatggggcaaactaaaaaaaaagtgaaagtttcagtaactcagtcatgtccgaccccatggattgtagcctgccaggctccttggttcatagaattctccaagcaagaatactggagtgagtagccatttccttctccaggggcgactactcctacttaaatctggatagcacacctgccatctgtagagtcacttattaactcaatacacagaacacggaccaaatcaggagtcaactctgtaagatgggatggatctcatccaactgtgctccatcctctccatgggaaccaggtggcagctacataacatgatttctagaccaaattctaaggtgtgactgcataatacaatcccccgggaagctttgtaaaatgcccatgcttgaatccagttaccaaagagt

SEQ ID NO: 61897 - DNA, 1894 bp, Bovine  19866880986412
  misc_feature (1)..(1): n is a, c, g, or t
nctatcggctggacccccggcactcctgctctgtgggtgggcacggccccagccctccggcatgcacccgccttgtccctctggtttgaaggggcggctgtgctgttctacctcagaggatagaaaaggggagaagaaccccaattttcagcattggctccccagctcctggaaaaatgcccagctggataggtgccagagcatcagccccgatgtcagccacccagtgctgctcctggggacccaggccaagccagagaccagcctgggctcatggctgaggagacaaggatgaagagggaaaagcaacacgctgtttcaattctttgtttaaaaattcaccagccctggcaaagggtcagtctctcttccagaaaggacgttaggcgccgttttcctcctggaagccccataaatccccacgtctcctcgatatacaattcaaaaaaggcctcaaaattgccactgctgtcatgctaagcactggaaagttctgcttgaccttttattaacatttttctaaaccaatatgcttttttttttgctacaagcaccctgaggaattatgaaaaatacttttttctgtagtttatcccatatgcacttaataggctcacaaatataataccattataaaaaagaaaaactgccaactcggctaaaaaaattgtcataacactaaattattatataaatataaaaggagtgtgtctgtaaaatattcactcaatgaacatcccaaggtgatggttttgctatgttgtttttattcctgagagatccataacgcatttggatatgccacatgtcaccacatgaatcaggcagttaatgcatgtgctttttagaagcagggatgtcttcccaatagaatgtgctataaaaaaatgtagagatccggctgctttgtctgataggcataatttaatgtcttgcttataatactgcatcttaaggaaaaatacacagtgtcctatgtagttatttacaatatattgctaagtctatgcaaatatgtttccccaagcctgggattatataacaaaggtcaacaatgtttgaaatattttgaagcatattcccaatatgcttagtgtatgatgctaatgtccaatatatgcacatatatcttaatatatttccagatatttctgttcattgttcttgccgtagattcccacagaatactattagaggaaggttttcttctgaagaaagccaaacatcacctatccatcttggaaaaaatttattaaggtggctaattatgcggtccttaatattgcattagtatgaaggttgctcagtgcccctgcagaagagaaaaagatggaagccagttcaataatcctgaaaccagagatttgacacatgtagaatgagcacacacctatgggatcttatttttctgtcacagatttccaaagctggcaatgacacagaggcatcacacccatgtgtgcgcatacacacacacacacacacacacacacacacacacgtgcttgtgatctggtgcacacaaaacaaagacgacaagccacacagtctgcctctcatttctaaatattgcaaattctggccttatttttctgaggggaattttgtgatcccatgtaaatttcattcagaccactttcttaaggaaataaaacctggttagttgcacaaggatcggggggagagccgtaaaaaccatacctccatcagttacccacttcatacatagcagtgtgtgtatgtgaatccaacccttccaattcaccccgccctccccttctgccttgggtccatacatttgttctctacgtctgcgtcgctatttctgctttgcaaataggttcatctgtaccatttttctagattccacatatatgcgttaatatgcaatatt

SEQ ID NO: 61898 - DNA, 1377 bp, Bovine  19866881014438
  misc_feature (1)..(1): n is a, c, g, or t
nccccaaacaaaatgtctaagaatgcaaaagttcgccaatgctagggttttagcaatttttgggagggaaaacatcacacggcttgcttaaatctgtcatgatgcacgccccctcgattcccttcttttttactcagaaaagctcaattgaatcagggaggcttgaccgtctgttagagaaatcgtttccctctccctcgctaggtagatttgttcaggtgtttactcctgaacacccgctgctgtcttctcccagctcaccagtcagaccgtgaaacttgctgggctctggaaaatcattacagtcccccagtcccttggccacacgggcacctgctcttcctctgggccaaagtgccaccattttccactcaaatttcttcaaagctcccaggcaagcatgagctgatcccgaggactcatcacggactcttctgtgaacatgtccctccaccaactgcagtcagccacctgtgaactcacccctcccacctgccttccccacgtgttattggatgagagaggctcatcgggaaaagcaaagacagaaccccaggaccaacagggagaggtgggaaaactcaaatgaggtggtgagaagtgacctaaccacgagtttaggagtgagagatgagacaaaaaagtagagaagagagaaggatggaaatatatattcaagggagagggagggagggaaggagagatggaggaagcactttgccgtggcttccgcagtgggtcccagatctaaccatccatcatcaggtgcggggtggacgatctctgcccctttacctatgaccagcggtgatgtttttccagcgattccacaggagtcaaaaacccaacaaagcgcatcgcgggcgctgtaaagggagcatgctgctcgtgtctgtgaccactgtatgcaaagcttggcattagtcacagccaggctggctgtgacaggcctgaagtgagggagattaatgcgaggctggggcactttattattgtcattctgttctttcagactctgcctctgactttcaattttgctccagaattaattgtctgctccctgcagtatgactgatggagaaggaaacgcatagcccaggcacctggctctggccttgacagtctgaggcccagcagaggatgtattgtgtgcggtcagagcaggggacagacgggcatctctcaaagaatcagcccacgccacaccggccttcaatcagacgtgaccgaagatcacccttggcgaagcatcgtctttgctggtagagtctctcacatcttacccgggttcctgttcaggaccctcccaaggacccagagctcagtcggttggtggagtccttctcagctctcagctctgtgattctcctccttgct

SEQ ID NO: 61899 - DNA, 885 bp, Bovine  19866881049732
  misc_feature (1)..(1): n is a, c, g, or t
ntgcagtgatgccacttggaattccaccttccctggcacgttggatgaggaaatgactggaaacctgacagtctatcagtaccagggagtgataatatatatataaaaaaaaaagattccagttatgagtgtaagtttaaaaatgtaactaaaagccctcatcaaagtttaaagagcttcttgcgcttttagcatttgcttattctgatttattgacaatgacacacctaggaaccgtcgtctcagctgaggcagtgaagtaatggacttcagggggagagggaagaagagagagagggggaaaaaaggaaaaaaaaagagagaaggtgcagctcacagaagagagaccgctgattacagcccactaatttgttatgcactccggcaaatcagcagtgattcatatgacaaataaggagaaaaaattaacagctgtcacgttgtgatgtgttaatttcctgacagtctctgcactgaagccaattactgatttaagggcagggagagagagccctgttcaagcttctaattaggcttcttcaagactaaaaggataaaagcaaaaataagagtgagagaatgaggcaggtagctgggctccacaaggctcacatgcttttaaagccccagttaaatagctttaagcttaagtgtgtttaagataagaatttagaaacatttattcacttttatccctgacctggtgctttaggcttttgtggagtaattgggagtcgagtgaggcccagggctcttgttggcctctttctgcacgagtccagcctctcagatgtaatctactaataatacctttgtttagtcgtgtcaacaaccattcatcaccatggtagacaaagggcggtgggcgctctaccagcatctcta

SEQ ID NO: 61900 - DNA, 1167 bp, Bovine  19866881051596
  misc_feature (1)..(1): n is a, c, g, or t
ncttgtattctgaaatgcctgctgcagtaaaggaagggtagctgataacattcttttttcattgtcatggatcataaaaactcccacatccctgctggggtgactagagggacctgcttggactagctgacctggaaggaagatggctctgttttaatttctaaacaacatccaaactttgccagttatatatctggaaggaaactatcaaaggttcctagatgctgacacgtggacatattttttgcacaattattgatttattttgtgcattttaagctccatgacaagtcttggggggtgtttatatcccaggaggcaagaggcttctggggccaagatgaccagctatgaccagcttctgctgtgggcacctcactgggcaaggctggctcagggcctctgtgagcatccctctacagagcatcatctgcgaagagctgtgtgtgctgctcctgctaattcaccgagcgctcggctcagcccaaccaggagctatgcactaaccttcattactacattcatattaaaagacaacgctgcgtctttcaatcatgtacttccctctaattaaggcatattcacttttttcccctaattaggtattctttgttgcataatgtttgctctaatcttttggaatctttctcaatatccagtcattacaggctcccctcgaattcaaccaaagcatgttattttttctgctaattatatcctcatttacagattggcgcctcttctgattggctcggtacaccagttgctatgacttcattagttgcgtctcctgaccctgttatttcttgtgacaggacttgctccttgtgtcctgtggctccagatcccagggtcacttctcgccagggctgaaatagtgtcaaacacacagaggtttagagggtggacaccactgctgcagttgctaattactacacacagccaccgtacaaattaccaatgctgctgggccatcccttcctctttttttttttttcttttttaaaatgaatgttttaaaggtgtcattaacaggttagtttcatttttaaaaacctgcctgatttttaaaaaagctaagcacgtctgtctccctgcgatggttcccaaagaaagtatcttccaagcaccaaacctcacaaccttcagttttgtatggggctgcca

SEQ ID NO: 61901 - DNA, 823 bp, Bovine  19866881068041
  misc_feature (1)..(1): n is a, c, g, or t
ntgggggtgggtgtggaaaaggccattcgatttttttctaggtcttgtcagtttacctgtgaagcaagttatttaattttatatactagctcaaagtcacagtcagtatctcaaggacctgaggggtttctcggagccttcctaattttgtgcaaccagcccctggcttccatctccacaaggtgagcatcaagataaatgagtgaatagagacatgacatcggaaagccctgaatagacccagtggtcaggagacattaatcctgaggtgtgccatctcctttctccgaggagctaacgccgtcacccttcctgaccaccgcacttcatttgtctggttaatctcccagaacttgggccttacgattcaccccagaagtgagttctgctctggtgggcctttgcttctctgagttttcaggatggcacagatcactgatatctcttctccttcctagacatcaggcttctctggaactgtatgatccttcatgtcatctggggtcatctctcccctatgttatttgaccttaaacagcccagtagctgaggtcaatgccatgtacaaagggcctaatttagtaagcattctctgacacctactgcatgccgagttctaagcaacatgatgtagggattacagaggtgatgaaaacgtggcgtctgcccttttgaagtttatgcttggttaagggagacactagctctttcacctggcagaacatgttctgcagttgaggttgacactgggcaagcacagcagacgggggcttgctgcagcagatgggatggcgggggggcactgatcaatagctgggacagg

SEQ ID NO: 61902 - DNA, 3282 bp, Bovine  19866881163933
  misc_feature (1)..(1): n is a, c, g, or t
ngaagaaaaccaaaaggagcccaggaaaaataaacagtccccaaatacccatctctgggagggagaagaacattcaggccaaagaattgtcttagagattgtgttgaagtccactcaagtaagctctcaacatccctcatgacatacaatcatactaggacagctagtgctatcaggatttcaggattcagaagaacaggcaggaaacttggactcatcgaggtcatcaaggagggtgatcagatcaagaggtgttcagaggcaagagacagtggtcttgcccaggacgcaggcaccccctctctccatctgtggggtaaatatatgtgcatgtgtgtttgctaagttatttcagttgtgtctagctctttgcgaccctatggactatagccctccaggctcctctgtccatgggattctccaggcaagaatactggagcaggatgccatgcccgcctccaggggatcttcccaacccagggatcgtatccatatgtcctgcattgcaggcagattctttgccactagggccacctgggaagcccataaatgcctcctggttggcatagcacaggacccacaatcctccaaaacgtggccatactggcaaggatagcattcaagaaggcaaaatcatcatgtcctttaatcaaagcttaaatgatctcttttgcagtagccatgtgatgtgagatgtgagagtcggaccataatgaaggctgagtgctgaagaattgatgcttttgaattgtggtgctggagaagattcttgagtctcttggactgcacaaagatccaaccagtcaatcctaaaggaaatcaaccctgaacatccactggaaggactgatactaaagctgaagctccaatactttggccacctgatacggagagctgcctcattagaaaagaccctgctgctgggaaagaatggaggcaaaaggagaagagggtggcagatgagacagttagataacatcaccaactcaatggacatgaatctgagcaaattccaggagatagtgaaggaaggcaagacctggcttgctgtagtccatgggatcacaaagcatttgacatgacttagtgactgaacaacaaatgatctcctaggatatggttgaattcagatgcccaaaaagagcatgccctataagccagaggtacgggactttcaattccctcctggctcttagaagctactgacaccttccccaacttcaacaaccccactttctgggtgaggtggctccacttcctgtacctgagcattctgcttcctggtggaaggtgggaacaacaacaggtgtgtttatgccatagactgtccttagaagtctagtagcattcacagagggaacaagctcaagggtggacatgaagttacctccacatacaacccttcccatgtcaggctgcatggtagccggccagggatctctggccccagcacacaccccacccagaactacctttgtacctccctccttcctgcacagcacaccagcctttaaccttttctgaagctcagagacatcgctgggacttccacacaactgctgtcaaaacatcgagccgccaactataaactttattgtgatgtcttgcttttcgggaataattactcggtacctaaaatgttagcctatttactgcttgtgcaaaaagatgacaataaaatcaatgttgcacaattccccagagcccatcaaagtcttttgcaatgttaatggatcggtgagtctaagaggtgtgatctcatgctggcctgagtggacgcttgactccagtgagggaacattctacctcttatcagcccacgaaccctcatctgccaaattcagtcattctgaaaagttggctccatccctggggtgagtgaatgggtggaaggcaagggcggagggtgacagcagattgataagtacatgaaatcacaaatcctgtgagctggccagcacttagaaggactgatgggtccaaccccattatctcaagacaaggacacagttccagagagggagaatggtccacccatgaaaccagacccagactcatatcttctagtttctggtctaaaaggctactcaccactctgctcttggattggaactttttttggggggggtggggatccccttgtggccttctctcttagatcacaggcatgtctagagcaaagaaatgccttcagccgggaggataggttcttctgtgctcctagtcatgtgaatgatacacgagccagcaaggcttggacgctcagagaagtttgggggaaaccgcataaaaagttccattctgggcagtcagtgtatgctggcaaatcaaaggttctgagaagtctcaccaaaatcatcatgttcacttcgctcacccagcatttctagaatgtctccaagccaggcacttggatggaaggagaggtgcggagtatcgggaggagaatttactgcggcacactgccttcagcctactcccagtggcacacagggctgttggtggctgcagagaggcaggaatggggtgggaaaggcttaatggaacagaggcaggtgatggcaagggacgagaagagtgatgcaaacagactgcagtgtatctttgcagccacagcatagacccagggcaaccggggctctcttaccccagcatgcggtgggggatgacagtaggggggcagctaggttggatggaaaccaggagaggggcacagagcagatgtctgaagagacaaaaaacagctatgcagagcagcccccaagtctgcccccccagtgtaagatcgcttctgactgacagggtatcaagggacatcagaaagcagagaatgagacacaaaaggccatgtggaagggacaagtcctgcctttgcactggtgctctggccattctgagctgcccactcggggccaactgtggggcctctctgtacatgtaggggcctgcactgccccgggcatgaccacagtggtcactagggctacatggagtggccattctgcagcaggctctgtgctatgaaaatgcaacctctttaggtactaaatcctatccagaggccagtcccgtggaagagggacatacctgaggtcttgccgaggtgacattacgctctccctttggcttccaagccagtgatttgtttcctcttgcagctacatcaagggaacgagctgatcacttccagaaagagcctctctactgggccctgggcctctctgtttcacccctcaaagcccactcacaacagtttatggggatttcctgcagctcttccca

SEQ ID NO: 61903 - DNA, 779 bp, Bovine  19866881170152
  misc_feature (1)..(1): n is a, c, g, or t
ntgggcattggatgcattctgatggccagagaatcaactgcagactcttcaaacatagcttccaagtttgcttctctaattttcaacttgtggtaacgtgggaaatcctacacccccttgctggctagggagccagcccttccaccccaaaaccatctctggatccttgacatcagctgtcaacatctcagactgggccttgggactttgccgtgtgggatgtcttttgttagtgattccacacaccatggtttgggtggatttagggcagtctataagggttgaggaaactgttgatggagattaaagagcctgcccccattaggcaaccagtccatgcctagccaagaagaaagctaaaagagtcacctctcctattgcatgttctaaccactagactgagctcctgttgcttgacaaaaaggatttgcttttaattaaaataggagcataaattatttttatccctgtattattgggcggtaagtaaattcacagtaactcactggatttttaaaaatctattttaaatataaacacactgccatattttctgtgggtttgaaagcttatgttaagtttgcaaataagtcaactccataaagataacatctttccctaaaaaatgtgttgtaatctaatggcatgctatggaaaattaacatcttattaacaacatacatgaaccatccctcagttaaaaaggttcagagtcgacttgagttcctcactcggccctgaggccaggatgactgacacggcaacctctaaaccatctc

SEQ ID NO: 61904 - DNA, 1227 bp, Bovine  19866881192051
  misc_feature (1)..(1): n is a, c, g, or t
nccatcctaaaggacatcagtcctgaatattcattggaagaactgatgctgaagctgaaactccaatactttggccacctgatgtgaagaactgactcactggagaagaccctgatgctgggaaagattgaaggcgggaggagaaggggatgacagaggatgagatggttggatggtatctccgactcagtggacatgagtttgagtaaactctgggaattggtgatggtgggctgccgtctatggggtcacacagagtcggacacgactgaagtgacttagcagcagcagcagcagcagcagcagcagcagggaagcctgacatgctgcagtccatggggttgcaaagagttggacacgactgagccactgaactgaactgaggttctcccttcatttaatgggccacattctcctctacctctttgggcttcatctctttctttgcatgtcactgccatgccccagggacccagcatctcacactacagttggagcagagcctccacctgtttcgggccagtgtgcttctcaatctaccctaacgtgccatccacaagctagcacgctagtcttagtgtgcaaacgctaccttagtctaaaagtcatggactagaggctgtgctcaacaggacacatattcgttgtaaaagagaggatcttctagttttttgggggagtgggtgtcaacattttgtagatgcatgtatcagaagacttgatgatgctggatttgtcgtcttgcgtgccaatacttatctggagcaagggaaggtacccccttctagtttgtccaggccaggccactccccgctgggtacacccgacccaccccattcgtgaatgtcacccgccatctgtctgaaggcactcttattgcagcccctacatgagtcccttcacccttgttttcaaggaattgaaactcatacattctgcataaaactgaaggacaactattaagataaaagagggcagttaagctccttcagtgctttagtaaaccaggaacagccctccgcctccgtttccctgtctgcggaatggggctctgacccttttctctggagtcagatgagacacaatgaagaaatgcattttttgttttaatgctttgagttccttggagagcaggtaacatcaaaattcaaggtgttattattagagagtaagaaattttgttctatgctaattaaactcacaccttaccactttacacacagggga

SEQ ID NO: 61905 - DNA, 1344 bp, Bovine  19866881195647
  misc_feature (1)..(1): n is a, c, g, or t
ntcatatagggtctttcctgcccactaaatcaaggtgtgctggagggccagtgggtggcactagcagctatccaccctggtattttccagccccatttcctgacagagttgactaaaagtgaacttgaaccctgatttactgccacgatcacaaaggacctgaactgtgtttaccaagctgtgtcctaatggtgccctttgagaaagcaggcaggcgcccatcattctgaaggacttccttctttcaaccctgcagggaacactctccagtgtgggggactgaggcctccccagatgctctgctctctgatggggctcccacccagcctagcacatgcacaccactctgtggccaacacagccggccagaggagggctggcagcctggcctgcagaggcttgaatattgcgtgtacttgacttttatgtaactggccaacgtggcatgtctaactatacaaatggaagttttatgatgataagatcagttgttactggaatatttatgtgacaagctgacagatataaaactacaaagcttgcttttatgcctcccatcctttcagagaggaaaaaaaataaatactgagatgatgggtcactttgaagagaatttatgatccaaattacctaatacctggtaaacttctaatatgcaagatgaagtctctgtatgctattaaaaagaaaaatttcatttcctaagactgcagcacatgaattcttcctggagaggaatctgaggctcttgccttctcctgccccagataaacatcccgactctgccacgaggaagagtcttcacgtgactgcattgcccaaggatcaaccccgcctgttgcaaaacatcggtccatccttagaggaaaacctaaaccctgaaatgaatatttgttgaaagcctgggtgataaagcccggccttcccttgccattgcagagttcgtggcatcaaactggaaaagatgagagggagtctgcaggagtcctgggtgatgggagagtgaccgctgccaacatctttccaaagatgcactgagaacccagcatcttacctggtacccactgggaccacttttcccaatcagatggggttggaagttgataccaggctgatgctgggctgtctgcaattaaacattagcaacctgacaacttaaccttgcctgttggcttcgggtgaaccttgttaccaacttccggggagcacagccaattcccggagcacttctcttatgccaaagcagtgggatgtggcatcccacggatcccgcctcctttcatgctcacatcttctccatagatagacatattagctgtacccacctgtggagggaaaagtcag

SEQ ID NO: 61906 - DNA, 2490 bp, Bovine  19866881224513
  misc_feature (1)..(1): n is a, c, g, or t
natattaattaacatgttggaaatgttttctttattaatgagaaattccccccattcctatttaaattaatttgtatagtttaaaattaatttatcgtggcctttgatgacctcaaatctactaagacaaaactggagtattgtactaactgttaaaccattcattaaacattttatgcaaatagtgtttgtttataaacaaattaactgcaaggattttcaaaacaggtgctgtgttgtgaatgcgtactaaatgatgtggtactgaaagaattaattagaccttcagatgtaattagttgcaataatttgcgtgattagcggcttggttaagaagtaagacacacacattgtaatgcatgggagagtcactgcagtggttttgtctttcatagggtgaggataagccttctccatgtttaggaaatttttcaaaaaaattgctgacatagctggagttaattgccaagtgtcctgtgggggagaacgtggtggtggttgttttttctccctctttctcccttggcttcttcccgtgtgtagccatcggctgcacggctgtttgtttgcacctttatgaatttttaaaagagaaagttgttaaccccagatctttgcatccccagaggaaatgacgacacttaacactttgagggttaaaagacagaacgcaattattataaggcaaaggaaacatgtcccgcatttcaagatgggctgttatcgctcagggaatagctgcagtcatttttttgatgtcgcagtggaagtgtctcgcctcttcttggcagaagatgggcggccacggtgagcagtttcatctgatgggctgcggaaaccgggactcgtcactgccgatgctttgtttacatggatgctggcgttctgggggcaagggcactgagatgcctggaccacagtattcagctaagttattctctagggccatgttgctgggacatggttctccaagttttggggacgcacagacccctgccttttctgctggggggctttatgacatgatctagctttggagaatcctggtgaaaaacagatcataattatttcattcattcattcaaagatatcctttgagtattctagggacacagtagtgattgatacagataagattattttctgatggttcttggtgtagggcagagacaaacagatgatatttcagttaatttcagtgatgaggaaatacgaagaaaataaaacacgataatccaatggaaagtgacccaggggagtgaagagggacaaagtctatacaagttttcagagtttttaagtgggtcccagttccttcaatttctttccaatctattttaatatgaaactgctttgattataatacacatgaatttctttatgtgtggctgtattaaatgacacaatatacccatagataacttcaatgggacctcctggcaaagtaggtgctcactaaatgacttctgaatgtgaatctgaatcctgcttgatcagacgcctgtggacacggttgggattttgacaagctctagagaggaactgggatggtgctcctcactcaagcatgcagttccttttgcagcccctccgagcagctgttactctgtgtccttccgtaggcaatggtggcctcccatgccgaagaggcagggtcgaggtagcaggtgattggtgacgggtcgcttgaggtctacataagcctgttaggtaaacgtgtgtgtgtctatgtgtgcgacatgccttcctcttcctgaagcctggtaaataacagaaagacttgaaaggcttgggttttacaatttactaaaaggctcctttaccaagggtttgttagctcctgcacgaccttgctgaatgacctctggaagggctgggatgatatctgagttcccttctgactcaagagatcagcgattctccttgacctgggagagatggaggatttagagatgaaaacttgtgagtttccagaggaccagagctttctctcctctgagtttcttggtggtgtttgattctgttcatcctcattttcagctggtgtttgccaagcagtctttaaaataggccctttttggacgatgtttgaacttgagcaaaattaacatttgcgtgtcatcagtagctgcagtgcatcattctgggcagtgaaggatgaaaagtcaaagaatgtgggccgcttgattaaaatgaacaatcagggcaagttctgaaagatggatacggagagccggcctgttaatttatgtggactcgattccaattgcacaggcacatttttttcccctttgaaacttttaagaaattaggttttaaagctgaaccggtgcaccactcaacttaaaatagaaaagaatttgattttatgcggtgcctttcccatcctggcactctctaatattgcatatcaagagctcctgactgtaaagtggcggggaggcggtgctggtttgaatgacttctgagaaggtgatgaacaacacagcc

SEQ ID NO: 61907 - DNA, 1555 bp, Bovine  19866881226789
  misc_feature (1)..(1): n is a, c, g, or t
nctggacccttcctggttctgtttcgcctcatgctaaagctcttgacaaaagtctatccctaatagcatcttgaatgtgctggatatttcttttatagtcttgttccgctcaccattcacaaaatcccaatcagttgtgagatattcacaatttcctttacctgttaaaagacttggagaagtagaaaccaggtcaactttgtttatctccctcaactgaccaggtaattttttatttatcccatggagcacctattaatattctaattgatccgtggaatttactttgggaaatgatttaagttcactatgaatttattctttgctttaaaaatgaggattaacatctcttgatcatttacttttttaagagacaatgtgttaatttgcatggaccagctactttaatccttataaaaatcctgggattcagggattggtattgagtccctgtctcaataaggaaagcaggacttggagagtaacttgcccagggtcacaaggcaagggtactatacagccagggtttggttcagaaaggtctgctgcagagccgaagcacagtgccaccacattcttctgagtccgaatgggcagttccagctcattttcacattgacctgaaacccaaagttctgcttaacaggcttgggacacacggtggaatggctgaattatattatgaaatatatcatagcacggccctgacagcatgttcctcctctgcttctagaggccactcaggatatactgagtgtctttcatcactgcatgcatttgttcatattttcagaaatagctagggcaagtgatgacaaatgcatgccgcagtatggatgttgcatcattgtgggcaccgaagtcctgccatcttttcgtggctgttcagcatcaccttcatggatatgggtagtgcgtggagactgtttggtggccttaaccttaaatagtttctttaatctcttaaatgattatagtacacattagactttcattttggcttttgatgtgtcgtcctttttatcaggctatgtagaatacgacttttagtctcaatgtgtgtcttatatacatgttcagaaaacacattatgttatcgggtgctggaaagaaaaaaaagctgctagtgatcttaactacatccaactgtctttatgagatgcaatcaaccatgtatgaattccctctatccatcattagttgagtgtcaaaaatatatgcaaaagaaaatggaacctgggtaggaaggtagtgaagaggtttttacaaattagattatttgagtaagcgattcctcagacagaaggatatcgtccaaagggccctttatttattattcacttcctttggcacactaaagaatattgtcagggcagcaagagcacgtccttgggttgaattaaaaggatggctgtcaggcttagaacccggtccacacctgatgcaacagaccgcaagggcagcatctctaggactcagtcggagagtccatgcccatcggtggctgggtgattgatctgaccttctacctctggagggggctgagcaagctctg

SEQ ID NO: 61908 - DNA, 746 bp, Bovine  19866881337187
  misc_feature (1)..(1): n is a, c, g, or t
natacatttaataaatggcaaataacatcaaagacaacatattacatgtgaaatgtagcatgtgtgaagctgaaaatgattttcctgagtgctgggctctaatcaagttctccagtgttgcattaacatgggtccttaagcttcatagatcctcttgatatttcttagacatttaagaaatggaatagactcagccatatcctagcttcgaatgcacgcaactaatttccccctgaaacccaagaacatcttccaaaccatgatacggattcctggattcacaccgacaaaagaaataagagctctgtggaggcgaacaagacccgagtttcccattgaacaccagtgtcccaatttccaagtgcacaccctcctcctaactcatctctgaaaaatagacctgtcaagtccttggcattttgttccggtttgtctgatagtggttttactattttttatctgtggaactgcaagacacatttttctgtcttcaaagttattggatgttcctttctttgctaatgttggcaaaacatgaatgctcaagggaggtgcatggggaagtttgtatggacgatgtgtttctttcaaagctcatggaaaaagaatgcatttactgggttcctttgaccagcctcaggctctctgagattagttttagatgtatagaatatggccaggcattgcccatgtggttctgggctctgcacttgcaggaaaatgtcctttcccccaggcagggtttt

SEQ ID NO: 61909 - DNA, 889 bp, Bovine  19866881396051
  misc_feature (1)..(1): n is a, c, g, or t
ncgaggagcagcccagctcctggagaccctgaggcctacagaagcccctgcccagctggcagactccctgccccctcttcccattgcaatttgcctgttggtccttcatctccaggatcccttctcggtaccacgtgactgggtgttccactgcgggacagccaagtttatatgctgtcaggcactttatatcccccataactctgcctcccaagccctcctgtgcatgtgtttaatttttacaatcaagaagacgaatggggagagtgacagcccagacaccctggaggggtgggctccggccctgccttggcagaacctgggcatgaattccatcagtgacccgaggctgtattttctgcataacaccccagtggtttttaaatctccttaaacttttgatggctgagataaaggagaaggcggaggctgtataaatatggagccactatttgggcagagctgcccatacctctgtgggggttggggtgttgggaggctactttgcattgtcacttggagttcattcccagctcccttcccatgcccacacgctcttccatctggcacccagtgggcagaacggtgggagcacccatctcccccatgcccttatctttccaagacacaccctgtgatgacagcagtgacaaggatgaagaaaggacacataaaaagaaaatattccataagaataaatgcatctcttttcaatggtgttattttattcatcataaccaagaatctaataaaagcaatacccttgttatgaaaatacagctataagccaagtcccctagatgccacttccacttggatggcagcccaatgaccctcctgcaaggcaatgctgcagcccctgcaccagagcaattgtctaaaactgcag

SEQ ID NO: 61910 - DNA, 1457 bp, Bovine  19866881414822
  misc_feature (1)..(1): n is a, c, g, or t
nccaccctggaggtaccatgatgggcattatgtcacaaccacagaatgaagcctagggcagctgcggacagggcatttaccccttccctgggccttggagcgagcttcccaaacacccagtttgggtggcagcagaagtggtcctgagtagatggaaatgtcctcaggatccatcttgcagtagtccctgggagctaagaaagctaacatgtttgtgaaacagaaaagcagagcaagagatccctatggcttcccttggaaatagttctttcagctcaagacactttcaggcttccaacaacacacagccccctcatacccacccctctgtcccctggggaagtaagccttaacacgcagagatctagcccgaggtcttgtagtttgagcccaagggacaagacgtctcctagcctggcctgagtactctgcaagagcttcctttcttcctgtgaccttccaggggatttttgaaccactgatcatgagtcacagcagaaaggtgagtttcccttacttcttcttggctgtgattaatgtatgaattgttggcattgtggctgtttttttcataaaaaaaaaaaaattataacagctgcaaagggaacatactatgcccacccgcagtctggctaccgtcatctcacataaccagatcagtttatttggttaaagcaatgtgaactgtaaccctgaataatttattgaactattgaaccacttggaaaataattgaagcttgagcctagttttacataacagatttaaactggagggaaatgtattagcaagatctcaacctctagaaagagaaaaggcagccagggagctgacagtccttatcataacatacagttgtataaagcatttctaaccagccactgtctttggcgatgactcaagagcatcccctatcccactccagctgggcctgaccacagaggaaagggagctgaaatgtgagaggaagaggggcactgccaaaatgagaagggaccccagaatttgaggagttggggcacagggaatgtctctcatccatagcattccatctggacaatgacctataatctaagggtctcctgaagatggcctagggaatgttagttgtgcacaagtaagatgggctccttttacagggaaaggaggtgtcagctccacctggttctgtgccttgacgagacaatgtctggtatgccatgtgtacatctgggcccatgtattaaaagggcatcaataaactaaggaacccaataaatagcattcagagtggaggaggagttccaactgcacgcaagcacaatcagtggaggaacacactctcttctcattgcaaaactttcctcatagtacaagtattttgatacatatactatagttaagaaaatatagaaaatacagataaatctgaaatcacaatctcaaaggcagaggtgtatatccttcaaggttttaca

SEQ ID NO: 61911 - DNA, 819 bp, Bovine  19866881448882
  misc_feature (1)..(1): n is a, c, g, or t
ncccgcctcactcccgtcaaccactctctttaactcaaatgcccatcaatgtccctgctaaatgggagtcttaggcacatctcatcttatcataatgtcacgaaacccatagaattacaaatcaggtttaaggcagaaactgtgacagccaaatctaagtacaccaaaagtacattaagcatccgtcttcatttagcatccctattctggcccacctctcagctcagacccactccgtgcagagctcagcttgacacagtcttaagatccattttcgagtggactgaaatataaatgacagttcaccctgcacacgaacacagaaaactgtataaaatatttaaataaagacagcaaagaacagaggattgctgcaaagcctttggcagacccagccttggggaatttagcagcttgagattcattacaaatttcatctttaatgttatttttagttcaatattttgtagcactcagaagtaaatcttggtactactgtctcctctcccctggcttcctctcttctgttgtctgatccttcagttttactgaaacctaatacgttttcaataaaattgatttgtgacgtcgtaatgctgtgtgttgccatctcccattccttgatgtaatggggagaggacgattgcatgatttggcaaagtgaggcaggttgctcttggtggaataaattggagtgaacttggaaaccaccctgcagcaacacggaaactttgcatgtattcttgcctcttatgctctgccattttgaaggtctagcctccagtgtcactcctgagtgcaaagtaacctgtcctctcg

SEQ ID NO: 61912 - DNA, 690 bp, Bovine  19866881488495
  misc_feature (1)..(1): n is a, c, g, or t
ncttccctgggatgatggatttatgttgatgctttggtgaaaaacttggcatacagtggttgtccagtgatgctgacccctcctgcagccctgtgagaagggcagccaccgggtcagacttcttgaagacaaaagcttataaaacaggatgaggtgggatgccccagaggatactgcaagcaggtgctgtgagtgggacaaggagaaagaaggcggggaggtgcggaaggcagggcagggcacaggcctcctaacttcctgggaagagtgggcatatgcagggcgagtaaggtggattctccaggcctttctgggagctaattaaaggaatgggtttagtgaggagcctcgctgatatttctattttccctgttagtagtgactggaatttgtaccatccaggtcagatggaaaatagaagcctggaaaatctgacactctcattgatttgctcaccttgccatcgctacttgagagaggaagcactgtgactgcaaaattgcaattaggagccagcctgttaagggttcctcacatgagctcccgtgctgtgtagctcccaggcctaccttgtctcctttcctgaggaggtagattcattcatagttctgaatgaagcagggaatgcaaacgtgtcacacctcctcatggtaaggctcacatgctgtctggcactttgctctcattttt

SEQ ID NO: 61913 - DNA, 703 bp, Bovine  19866881603898
  misc_feature (1)..(1): n is a, c, g, or t
ntctgatgttctcttggccttatagcttcctttctccctgcaccgccaagccgagtgttatcagcacagctctgggaagcagcttcaaatgaaaggtgctgtgttgccacaaagctttcagatgatggagtggccggtgctgaaagacacatcgagatagcaggaatcctgagaatgttctctgtaagattaaacagcaagaacaggtcaaaccagggacccacaagcaatcatgcagggagaggagaaatagacatgcgtgatgtcctcagtgatgacagagtcagagagctgtaccttcggaccctggggaggatcttctcagtttagagatgagtaaactgagcttccctggatttcagctaggctctgcacctgtctaggttcctgaagggatgttgtcagaggcttgcaggtgacctgaaggctttaactcttcttctcaagaagtgtaccctaggcgggcaggtggggagacactgacagaacgggactatctaagtgggtgttccagccatccatcactctcccagccctctcagatgcagggaagaccaggtcctgtcccagcactgtgagacagtgctccactctctcgagctccacttgggcccatttcaaattctggtgatactcggctggagttcaggaggaattcaggaaggagggcaggaacagagtgggcaggtgccatgtctggcag

SEQ ID NO: 61914 - DNA, 617 bp, Bovine  19866881939691
  misc_feature (1)..(1): n is a, c, g, or t
ncctcctgcattgggcaaggctgcagggctgtggtgcatgttgacagaaatgacttgcagagaaatgggtgagatctaacacaatttgggttttcatctgttcaaaccaacagtcaactggataattaactgattcaagaagtgggagattgacagcaattttgaaaagcacagcaactgacagaagccaggctcagatgaatggaaagggaacaagctttgttgaacacttcccaagctattacagagaagatgcttaaaataattctagaaagctctccactgccaggccaagacccagccctctggatcatctgaaagactgttgattcttgagggagcttttatccgtatccaatgtgcccctccttggaaaacaaatgtattacaacagacttaaccatggagcagcaggtggtaggggaaattagctaagatgttacacaggaaattctgagccttataggtccaccaaaaaatgaccaatgagaggtaatcttcatagttgttatcatcactatggagacccactggaggatgctcaagccccgctgctgaggagggaccaccacaggacagccagctccgatccttccctgaggtgtgttttctgtgca

SEQ ID NO: 61915 - DNA, 1580 bp, Bovine  19866880508231
  misc_feature (1)..(1): n is a, c, g, or t
ntcctgggataaagacatctttaagtcttccccaaatgacaatatatatatatatatatccaaattatttggtaataaaactattttgtttggcaaaacatttagtaaagctctaagaaaggcaagcctgcaaaataatgcccaaactactcagtatggtatcttcacctctctcctctgctggacgttgcctcccagttccagttactgtcagcagagttaataagaaaaagagggatttgatttcctcagaaattaaggagagtctacactcttaaaatgctgctgctgctgctgctaagttgcttcagtcgtgtccgactctgtgcgaccccatagacagcagcccactaggctcctctgtccctgggattctccaggcaagattactggagtgggttgccatttccttctccaatgcatgaaagtgaaaagtgaaaatgaagtcgttcagtcatgtccaaccctcagcgaccccatggactgtagcccactaggctcctccgtccatggaattttccaggcaagagtactggagtggggtgccattgccttctctgccacacagtcaaagacacatataaatgtcatcaggctgtttgttctttgacgatagcacaggtttctaattttggctgatattttaagaggacacactggattatattacagattcatgaagattgtgtgtgtgtttagttgctaagtcgtgtctgactgtttgctaccctttgggctgtagcccactaggctcctctgtccgtgggatatcccaggcaagcattctggagtgagtttccatttccttctccagggaatcttcctgacccaggattgaatctgtgtctcctgcattgcaggaggatactttacctgctgagccattggggaagccatgctatggggataacagatggaaaagcctatctaacttatcaagcctaagtgttgttcatgtctcaggcacacacatggaggaaaggctggaattgtgtcactgacagtttcaccaagaagtacagaagtttacaagattgagagttgaagctcattaatgttctttgacttttttttttttaatactcaaaggacctgaagatagtttgataatgagactgttcttcatttccagattgaaattagacatgattaggaatgctgaagtactgggcaggtcaattgtgcaccattattagagccatttaatgcattttaatggtggttgataaggtacaaaatgctacgtaagccaaaagaagaagttttattccatgatatgtaagcatagatatggatgagcccacatttgcattttttatgcattagttcaaaaaattaaacatattctttgagatatgagtggtagaatatgtaatttctgagcaatgagcattgctgatgccagcatatcaagctccttagacactgattgtcctttaacagtgaattcaagaaaagatgtcttcagcattttgtgttgctgaagaatcatgctctgagttataaagtcaattgcttgtgtgactagcctgttctacttattttctcaaatttattaataaatatggaataatagctca

SEQ ID NO: 61916 - DNA, 1282 bp, Bovine  19866880516934
  misc_feature (1)..(1): n is a, c, g, or t
ncttttattattagcagcctgagttttttggggagtagacaggatatgaaaagatctgcaaaaccagaagtgatatatttttggtttttgtttagcacggagaattggaaatggaatatatttattgcttaagtgatgccatgcttttcaaagaaagaataagtttatttcctccaagtcacagtggaggagcattatgtaatattggctcagtgggtaaaaaatccaactgcaatacaggagagagaggagatgcgagttcgatccttggtttgggaagatcccttagagaaggaaatggcaacccactccagtattcttgcctggagaatcccatgggcagaggagcctggcgggctacagtccatggggtcacaaagagtcggacatgactgagcgactaaacacacacacacacacacacacacacagatacagaatcattttaagaaaattggttttcttcccttctctctcctttgttgttgtgttcagtctgttcataaggggttaatccttatttccagcccataaaggtcaatcagctaaaccatgggttctctactgtcctgctttgggtcgggttggacagcagctgtggtctgagagctcacccacggaagcatatgctcacaattgccctccagggtcatggctctgacaactgcattcagactgttcacatgtgccaagcgcagtccagcctttaacatattaagaagtaaccaaatcattagggtttcatacttcactggcaccatgcaggttacggacttttctcaaagggtaaaagcttctgctgctttctttagttcagtaataaatatttataggattaccagcccattgtcgatgggataaccaaatgcattctaatgcaaaactactggctgcttatctagctgtttgacagaaagcaattacatgaccatttctcttttttgtgcccttctgttacagctccctggatcactcatgatgggctctcagtaggtgttattattatttttttttcaacttttccaggcatttgttgtaatcaaggttagatgcattcactgttgtggggtataccataagtactaggatatatattattactggtttatgtcctgatacgaaaacatttttttttccaacaccatagaaaatcttacttaaaatccagagaattctctaggcaagaatacaggagtggatagccattctctttgccaggggatcttctcgactcagggattgaaccagaattctccctcactgcaggcagattctttactat

SEQ ID NO: 61917 - DNA, 1089 bp, Bovine  19866880517631
  misc_feature (1)..(1): n is a, c, g, or t
nccaagcagagttgacacataagctgggtcttggacacgtaggagttagctggagcaggggggcagtcaaggggagagcaggtatgaaggggcacaaaccaccccagtactttaacagggctatgctgagggcttggaaggtggggagagaaggggacaagaggaagctaggggagtgagcaagtggatctctgggatgttaaggtcttcttttgcacaagatacctggcacaatgaggactgctttcatggcatgtggttattttttccccagaaggctgagcagacaggaaagctctgacataataatcacatcatctctttacacactgaaaagggaaagaaagaaatattgctacccattgattctcatgctttacttgtaataggacttgtcttattatgggcattttgatacatttaagcttattaaaaggtaaaggaaaacaatgtctgaaataacaggttcattaagcaagaaaatgagaaccataaacaaggcaaaggatattaaactattttgcttttcattgaacttgcgaattctgtagaaggcaatgctgggcttagtgagaagtaattcaaaaagtaaattattttagtaatggactggtcgactgacactattttctagctgtactgcactaaacgtcatttaactgttctaatgaatgtttatgccacaggtacaactgacaagcagttctctatgtgtatgtatgtgtgtgtgtgctcagtcatgtctcagtcgtgtccttctctttgtgacgccgtggactgtatgtagcctgccaggttgctctgcccataggattctccaggcaagaatactggagtagagtgccattcccttctctaggggatcttcctgacccagggatctaaccagtgtgtatgtactctgtctcctgaattagcaggagggttctttaccactagtgccacctgggaagccctaagagctctctgtctgtaaataaaataagccagcataatagatggatcaatgcacaatgcaacactgtattatgcttggtgatgtgctaaagtaaagtaaagtcactcagtcatgtcaactctttgccaccc

SEQ ID NO: 61918 - DNA, 1950 bp, Bovine  19866880591777
  misc_feature (1)..(1): n is a, c, g, or t
nacatcttaacaggaaaaacccaagccatctcatacccatgctatctgaaaaatggatgacagcgctgaaatctttatttttgagataagaaaactttgtggagaaagataatacattaagctttgtgtgtatgtgggtgtgtgtgcacaacagaaagtgaacttgctctttatgattccctttatgtgctctctgtgtatcccggtgttttctttcatagcacttctaacattggtaatttgatgtttattttggatacattatatctcaagacaagctatccactcttttttttttttaattctctcctatattaccaatgtctctagtcgatggtttggaataagatgaaagtgaaagtgaaagtcgctcaatcgtgtctgactctttgcgaccccatggactatacagtttatggaattctccaggccagaatactggagtaggtagcctatcacttctccagcggatcttcccgacccaggaatcgaaccagggtctcctgcattgcaggcagattctttaccaactgaactatcagggaagtctcatagtccatggtttggaataagataaatttgctaaatcaatgttgcaccagtgaatgagtgaatgagttttgactgttattgggtggaaataatattcagcaagcatctaccatgacaaacactctactaggtaattatgcctatttatctcctttaatcttccttatgattctgaaagattcatattatcagctcccttctaaagatgaagaaatggaagttcacagagattatctgaaccatctctgtctgtttgggtccaaggttactattacttggacaatgacagactttctctgatgctgccctgagtgaaaacagatgccaactcagtgtaaatgtgacttttataagaagttcggtaattctgggatgcactctcatgaggaactgaattctctggcactggaattatggagtctgcctgaccacctgtcaggaacatataatagagaagacaggaaaggaagttgaattggaaaaactctaatgttcctctccgtgctcaaactttaatttactgtctagccatatgctgaagtggcagaataatacagttcttccccccatttggcatttctccctttttcttttccttttaaagcagatggttgctattgtgcttgttgccccaggagaaggatacgcagaacaacaattggaaagtctgctatcttttggcttttctgttttcaaaagcctaagcctttaggggaagctggaagcttaggggcacagatgaaatatgtgaaagaaaaaaaaaaaaaaaagatcacagctccccgactggtttgaaaaggataatccagactagtgaattagaattagatgaacaaagtgtagactgcttaatgaccagcgaggtacttacttgatacctcaggagaaagataccctgcagcttccttcttggggtagatccacgtggaagcagaaccaccccaaaaagggcttaaggggcttgagaatacaagagaccacatccgttttcaggtaaaattgtgaggagataggaaaacccagcaaaatgttgtctgtgaggagcgtccaggcatgctagctgaagaaggcactgggtggccccaggttgaaagggacacagccccaagcaggtgttgaactggtgactactggaggcagccggctaagtggcttctttaaggcaaactgtctcttgaaaggagagctgagtggttcaccactaaggcttccgtgaccgccaatgttcttttttttttttaatgtaatgaattcttagaatagtgtggttatggatatgggggtaggttcctgagcagagttctgaagaaggggaacagaagaggcgaagggattataatactgacaagaagcgcctgggttaagtgagcagccaagcatgggaacaggttatcctaa

SEQ ID NO: 61919 - DNA, 1789 bp, Bovine  19866880596631
  misc_feature (1)..(1): n is a, c, g, or t
ntactgtgacctagcttacttgacacataaaatgaaccatcccagatcttgttcctgtgttctggtggcctttggggaaatcactagtggaactgtattattgatttccttctatgtgaagtacagttctttatatctcaacaggcagaactataatacaaactagtttaaggaaaaaaaggagggggtgggtgtgagtgactcagtggctcaaactgccaaggattctagcttctagatcaagttcccctgatatgaggcgccctccctgttttgtctccattttcatgcacgtgctcttggcttaaaatcttcacagaatgtttttcttctcaggacttccatgggaaatcctgcacctgcatctcattggctcagttgggtcacatgcctgcccctcaacaaatcactgcagcaaaggcagtgaatgcactgattggcttagactgggtcagggagcctacactggagctgatcttcacccaagccaagtgggctgtagtgcagagaaagaacaattcccccgtgggaatcagttgtttgcaggaggaggatgacaggttgacggaagggctggaacatcacatgactactccagcctcacatttaaagctctcctctccttgcctgtcccattgccctcctttcagtctttgccttccttatcctcatctgtgcctcaaccattttctatccctttaaaaacctggttcttgctttgctaattttgcaactcccaattcgtcctaagaaagcagatgcctcagaagcaggctgcctcagagagcagttttgcgcctgattctgtacgtgtgatcattgcccagggacagtctggtacgagcctatcagtcagtgcagtgcgtatgttcctggcgtgggtggatggctcagagtgacttagtactaactggtgctgggaagaaggcaagttatgcctgttctgtttgtccaatagccagagatctgcaggagggactttggaagggaaactgggagcttacctgtgagttgtagctgactagaagacatctcacactagaaggattaacattaggggcaaagctacttgcaaacccttttttatttttggtcctaattgtgtgggtgtgggtgtatattttaagacagctttattgagatttaattcacatatcatacagttcactcatttaaagtgaagaattttttttaaaaagcgtattttcagggttgtgaaactatcactgaaatctaattaagaatatttttatcatccctgaaagaaacttcatacctattagcagtgactgtccatgttcctcttcccctgggcctctggcaaccatactttctgaccccacagatttgagtattctgaacatttaatataaatggaatcatgcaatctgtagccttttctgattggcttcttgcacttagcataatgttttcaagcttcatacatgttgttgcctatgtccatgtgtcatttcctttttattgccacctaatcatccattgtatggatgtaccgcagctgatggacatatgggttacttccactttgggacttttatgaataatgctactgtgaacatttgtgtaagtttttgtgtgtatgtgtattttcattcctggtggggtatatacctaggaaggattgtaattgctgggtcatagggaaactctgtgcctaactaggcaggaagtttgcaaagcagctgcacaattttgcattgttaccggcattgcataaccttgccaaagcttgctgttgtctatgtttttgattatggccattctagtg

SEQ ID NO: 61920 - DNA, 1729 bp, Bovine  19866880637628
  misc_feature (1)..(1): n is a, c, g, or t
ntggtgatatttacctgtatgttattctctctgaaactctagacatctggctttgacctgtctgcacttttaattggaatgaatatgaaactctcttttcaaacatctcaggagttttcctacttcctattcaaagtgacattttcttcccctggtggtaacttattattctgctgtttgctatacttttacccactgtccttgtgcttcactttttacaaaagcacttttttctttccctgaaccacacagtatacggatgcattttacaatttatctttttttcctacagaacaatttttgtttcagatctcaggagcatcttagatctaagagaggatgatcacaaaaacttgattatttcccatcctttctcttattatatcatccacaaagtacaagaaagcatagaacatgcctccatttatccttcctgtttatcaatttcagattttgtcagtacaataaaagtatgatattcatgtttattttttattctgtgttttctatttaagatgcctctattataaaaatgatctgtcatttatgtatcagtcttagctcacagaagttagtatcctaagtacaaattaggttctgaaaactatttaatatacatatttttctaatatttccttgatctcctttatttgagtctgtctctctgccctcattcttagaatgttattcctcttttcctcaaccgccagcctgcgttatgttacattggccaaaaagtttgtttgggtttttccataaggtgttatggaaaacaaaacttttggccaactcagtatttcatgggagtcacgactgtttctttttttactgctgaactcctctttcccatcttctttctctttcagactctctaagttctaaagtatatatctctcaggagttcccttcacacaataaggcaaatacccttatctcccagaaatatgattttttccccccaaaggaaactcaatagatgaaagtatacaaggaaggggtgtaagcactgttctgttgggagaactgtctcctgggctctgtggctgtgatgggagagctgctgtgccctcaagagctatgaaatcaatgaaaataacagctcgagatattctttctcgaggtaacttgagtcagcccacaggtctcattcatcccatcaccaggcaaaggatatgctcttgtcactgtccttggcaagaggtccaaaagatactggagtgcgcgtgtgtgtgtgtgtgtgtgtgtttgcgcgcgcacgtgtgtgtgggcatgtatttaagcccatccctgctctcatcccagtcctggcaagaagcctgtgctctcatggtgctcatctccatgtttatttctccacatgatggatactcagtatttttaaccagctgtttcctccccacatgaatatttcctgcgctgacttttccctctgcccgggagatctttaatagtttcctctgattgctcttgtatctctcctatgtttccccagtcaaagctgcctctgtatttgcagtcaaaccacacatatctttccatcctaaagtaacagcgcactccctcccctctcctttccctttgtcttggtggactgattcatttcagaattcctgtgattgctttacagtgtcagagaacatagaatattattcatgaaacaagaaacagggacagacagatatatgtaaaaaaattaattaccccaaatgttttatgtagagagagggta

SEQ ID NO: 61921 - DNA, 824 bp, Bovine  19866880686959
  misc_feature (1)..(1): n is a, c, g, or t
naaacactttaggctagaaaatgaatatcctttctgcagataagtgtgaccatttaacaactgaagccacagaatgtctgattgaaaggtgtcctcttcacatttcacattctgggtgtgacactattttagcggtagtcaaaccctcatttgcagttaagtgtgaaagtgattgaacccccatctcctgcatggcaggcaggttctttactaagccaccagggaaacccatttggagtaaaactcagtgctatctcctgatcaaatgttcttttgctacggcaattttaaagtagaattgaaaccataatactataactgtggccatagcgtccttgctaattttgtcattagacacagcttcagtagcaggtgttaatttctaggtaaatttcagctaggcttcttgaaggatgattcctaacagctgctatcctctacgcttattttttttttttccgagaattccagttcccaggccaaagggagcagctttccatgtgtctattagtgttccgatgccagttcttcaggatgatattaatctctatgccacagattcatgtattttttaatctacttcaagaacaaaaaggatataatggcccattaggagacattaaatcctgatcatttcgttaatgttctcgctaatatgtgttctataaagttgctcacttttataaccaagattctagtgtcatgggttaatgagccacatagcttctaatgctgtacatctgccatcaatccattatcaggaaaggactcatccatcgccgtagcagaggattagaaatcctgcaggggtaataacccccatt

SEQ ID NO: 61922 - DNA, 831 bp, Bovine  19866880734528
  misc_feature (1)..(1): n is a, c, g, or t
ngagtacgacatgactgaacgactttacttcacttctgaactaaatgcacatgcatttattacacgagttaaagctaagctgctttttctcagttagtaaatagttatggctaggcaagtttgttttttagtgttagtgacacacatgattgaaatgatagttaatgcacatttacagatcatctaacatcaagaccacaggtcatcctctactgaaactcatcttaaatttccttgtgaatcttgatttcagttacactatgcatctcacactcacagtcacgttgtttgctttcgttgtaaacattcactgagccttcttccccacagataatcatctctccacagaattcagtaatgaaggccagtacagccaagccatattatatcagaaagaacaactgaaataattttttcttctcctaacagttttacagtgtttatatgaaaacacaagttaaaaataagacttaccaccacaatatatcgaggtctgtactgaatggttccaaacaaacccaatatgacgacaattatatgtagaaaattgccaagaatgggcgcccactggaagccaaggaagtcaaagatctgcctctctaatgctgagagctgcaacaaagcaaagagagtccatgagtatataacttgtgcaccatcagaccacattaatgttggcttcatggttggagaaggcagcaaagtcaatttcaattgcacttatggacactgttatcactaagattgtgacacccatttcatgtaccgctttattcaatgtctctcagaaaatacactaaaattacttgaatatcaggacttcaattataa

SEQ ID NO: 61923 - DNA, 1702 bp, Bovine  19866880762596
  misc_feature (1)..(1): n is a, c, g, or t
ncctccccatcccatccctctgggtcatcccagtgccccagccccgagcatcctgtatcatgcatcgaacctggactggcgattcatttcacatgtgataatatacatgtttcaatgccattctcccaaatcatcccaccctcgccctctcccacaatgtccaaaagaccgttctatacatctgtgtctcttttgctgtctcggcatacaggcctttgaaagaccctacatagggctttcctggtggctgagtggtaaagaatccacctgccaatttaggggacacatgagtttcatccctggtccaggaagatcccacttgcagcagggtaactaagcccgtgcaccaccactactgagcctgtgctctagagcccgtgctccacaacaagagaagccgctgaaatgagaagcccacgcaccacaaccagagaaaagcccctgatgcagtgaagacctagcaaagccactgaaatgagaagcccacacaccacaaccagagaaaagcccccgatgcagtgaagacctaacacagccgaaaataaataaaattttaaaaagagaaactctacaatattaacacaatttaaaattgtagtttaaattatgggctgattctcaattcagtaccaagtgatttgcagaaatagccacctgcttgctcaggatagaaaatgtggtgtcatcattggttcctttctttcctctttcttcccccacatacaaacaagcattaaaaactattcattctacacttctagtggtcttttcatccccaccaactcgtgcaagactataacactggccacatttgcagcttctccatcaagaggtagaaccgactgtattgcccccatcctcgaatctgggttggtctttggccagtgtgatactgcagaagtgagatttgaggtaatacattcaaaactagggctcaagagaccttgcagttttcactagtatgctcttggaaccctgtgactgccttgagaagatccgttttatcctcacaatgacatacaagaagcaggtactactattatccccgctttaaagatgaagaacctggagcacagggagggtaaataacttggctgaggtcacagagctcaatattgatcatcaagaccaatcactgcctagaatcagacccaggtgttctgactctagaacctacagtcttaaaagccacacttcttggcagagattaaatgctgtggtcaaccaaggatgaatagtatctccttgctattggtcagaggaggagcatggacctatcacgttaggtaacattttccagagttgcaattacttgttcaaaactatgtctttctcaagcagagcaagaagaggacccccttatattccagggatatttttatgtatccctggaaaggtactgggcatagagcagatgtttgagagaactatttccctttcagaattcttacattaaaggtcctttaatttgagaaggtaccataactttttcaaatacaggatcgtggtatttatttagtgagttttcctcttcattctggttgctaaggaagttcttaattatcatgcttagttattgcaggttttctcaaccagtagattttgatctctctgattctttattatttcctttgttttattgatagctgtttttggtctttttatttttgtgcttttattattagcagcctgagttttttgg

SEQ ID NO: 61924 - DNA, 1267 bp, Bovine  19866880780546
  misc_feature (1)..(1): n is a, c, g, or t
ngtaaagaacctgcctggaatgcaggagaggcagaagtcatgggttccatcaccaggccagggacgtgccctggagaagggcatgacaacgtacttcagtatccttgcctggagaatcccatggacaggagactggcgggctacagtccacatggtcataaagagtcggacatgactgaagtgactaatttgtaaaatgtgagtaacaataaccttctatgcttgtaatattatatgaaacaacccatataaaatatttagcataaagaaattcagtggttttctttccagctaattttttatcttaatcaaaataatataaatacgacatagaaaataaaacaattgctaaagacttttaaagaaaaagcagtcctttctattttgagttaaagctatcttaggattttgtttttcttagaaaaattatatacactaaaaaataatactgtcgtcatttaagtaaaggtttactccttcaataaaccagtctgaatacaaacttcatacttgtttttaataaatgaaaacaaattatggtttgtgcaaactgttacataagaaatgccatactatggtatgaaaaattggtctatttctaaaataaaaaatggggacatatctggcaaattatattgcttgttgatccataaacttgcatagatcaaataccccaatacaagagttaaatatctaatactatatttctaaggaaaaattacactatctggaaatattgaaactgtgatctgtcaagatctagaggcttaagtataattctgctttgaaataaatatttataataaccacctgatcctaaaaaattccaaatacattacaattagctttcaggctctctcagaaactgattaagctttctatagaagcaataaactaaaactccatttgcattattaaatttagtaatagaaagagagcttctatgtaacaaaatcttatttactgacacacataaactgtaaaactgtttacttcaatctgttcttggtttaggagctaacagattttaacctatgaaatttcatttacaggatattcctacgaattaaataatatccaattcataatatatgtgctatgttaccaagtgtgaatattaatctcagtagttattagtgaaattattagtgaatctcagtaactatttaatagaaagcagtgatcaagaccatcctcaagaaaaacaaatgcaaaaaggcacaatggttgtctgaggaagccttacaaatagctgagaaaagaagag

SEQ ID NO: 61925 - DNA, 929 bp, Bovine  19866880800533
  misc_feature (1)..(1): n is a, c, g, or t
nctgatcttctgagaaaataaagtgtgtaatgactagcagtttttctttgatgtgatggggattcatgacagcaccattttacgggtcaggaaagtgaatctggtctgttttaacagagaaactcctaggaggataaaagcagaagacatgagatttctacttccagaccttttaatgaatcatcctgagaattttagcaagtcacctttcccctccaacttttcctcgacattatgcaatactaacttttgttactacacttgcctttaccatcacgtgccatcaatttcatctacctaatattaatattagaggcttcctgagggtggggactgtgtcctcaacttttcttgtgttttctaggttttggtacaaagcactacatgaaatattgcacagtgccttttttttacccttaggaaaaatatgttgaccctgcacattgttaaagctgttaaatattagaatttggatgctaaaatgaatctcaaagattgactaggaaatcccgtcatggtagaactgacaaagctgggagccaagcatcaatgtcacttctaaatcctgtatctagttagcagacaactatagcccgaatctaggtcactagaagatttgcttctttatgctgttttagcaacagcagagataatttaggtggacatttaagagcaactcaaatacacaaacaaaaatattttaaaatctctcattttagttttaaagaactgtgttttaaaaagtccagtcccattacttcatggcaaatagtggggggcgggggagtggaagcagtgacagactttattttcttgggctctaaaatcactgtggatggtgactgcagccatgaaaggaaaaaatgcttgctccttgggggaaaaaagctagacaaaccagttcagttcagttcagtcactcagtcgtg

SEQ ID NO: 61926 - DNA, 1363 bp, Bovine  19866880821349
  misc_feature (1)..(1): n is a, c, g, or t
naaatagtgcatgtataaaatattcatgcaatattttaaattaggttcccatgattattgcaaatctctgtaaacatactaaaaacattaaactgtatcctttaaaagggtgacccttcttacacataaattgcatctcatgaaagcttttgaaaaacaaaactcacatgcagaactgaccacacagatacagcattccaggcaagcccctctgactacagctcacagacgcccacgaagaacagggttagaatggattaattctctgagctggaagaggtgtggttttttcattcatttcagaaaagtaaagtagtttatgaaaaagacagagaacatatttagaaaatgaacttagaaaaacatagaaaataaatttaccatgaccaaagaagaaagggagggagaagaataaattaggagtttggaattaataacaaactactatatataaagcagacatacaacaaagaattactgtatagtacagggaactatatgcaattttataataacctataaggaaaaggagtctgcaaaagaaaaaaatatattcacagacacacatatacatgtacaattgagtcactttgctgtacacctgaaactatcacatattgtaagcaactatacttcaattaaaaaaaaaattagttcatgacaaagatagaaatctccaaaggaaacagggtctctattctctttttgctccttttaattctttgttccttctttccacttttttatctggagaggagtggaataaatgagcatgttttagtgtcttgtctactggctttttaagctatgcctatttttattatttttataatcagccctctagggattacaacttatcatgatcaaccttgaattcatattacatataatgtaaaaaattttaattgactttttaaaaatttaagagagaagataatcttttatattaaccctttattcttccctgtatcaaggttatttactccttattgtagatataaatatccatctggcatcatttcatttcagtctgaaaaactctctttagcatatttgatagtgtgaatctgccaacaattatttctcttatcttttgtttacctgaaaatatttttatataaccattattttagtgatttcttttattttttttcataaaatttgttgttgtttaatctctgtcatgtctgactcttttgcaaccccagggactgtagcccgccaagctcctctgtccatgggatttcccaggcaagaacactggactgggttgccatttccttctccaatatagaattttagatagacagtattacacagtttttgtgtttcagcacctcaaaggttttttttttcccacctc

SEQ ID NO: 61927 - DNA, 2631 bp, Bovine  19866880923400
  misc_feature (1)..(1): n is a, c, g, or t
nttacttttaattcctatgcattttccagttttactagatatacatttaggtgaaaatcataagtgccttatattctagattcaacaggtggctgaggtaaatccatcctacagtatatacatgcaattgagctattatggaggaagtaggaatatcattttctctctaatctctatagtctactgccaaaaggtgcccagatgctatcatgatataaaatccattagattaactgatccacttaatttgattagttatgatagtgtatatgtgtgtgatctttacattctacatggctctacttgaaccacttaaaccagccaattgaaattgtgatcaacaaggggctgccagtcagaattacccaggaatgttttgatagattcttgagtttctgagtctcgctctctggggaacttcatgactgggtatgaaatgaggtccagagaacagtgtgtgaaaacctcctccaggtaaccctttgtgtagccagctgaagaaatcatattgtgatgaagtgtaaggtgacagagtcgatcactccatgctgctactatagagcgtaaagccatcacacccactggctcaagtcccctgactgctggtcaatttcagacagccccatcagttacagagagttctggagcaagggaatgaaggacacaggtgcagtcacaccatgaaaaagcacaaagaacaaatattttgcaggcatatcaataacaaccttgaaggtgaattgtagcaaaagattcttccttcatcaaaatacatgatcctgtctcagacctcctcctccacaaacatcaccacgctaccaactcaaacccctgctctgcttatctcccatcatcaggttgaaactgcctaagtagatactgcacttcagtgacctgcgtcacttaagcctcattttctaacttaagagaatgatacatcattgaaaagagcttacagttatttgaggccataaggcataaataaaataggtattaaaataacaggagacataagagatgtgagttcggtccctgggttggaaagatgccctgaaggaggaagtggcaacccactccagtattcttgcctggagaattccatggacagagaagcctggtgggctacaaagtccaaagggtcacaaagagttggacacaactgaagcgatttagcacacattagaataacagcttatctgtaacaagtgtctgtgtgtatacatatatatatatatttaaaaatcttgtctaaagaataaaaaaaaacaaacttctctatttatttaaactagttgaatagacatagtcaatattgagtatttataacgatagcagacaaagccatactcaaaaatgtgagcagtctctctactgacttctctgttctatttaattcagaattatgaagttctctacggcagtgcatattaaaatttccttacagcaagggtcttttgtctctaactttgttaaataagattccccatgtagaaaaattctatccattccatagtaataaggttgcttttagatggatgaacccagaaaaattgagttgtatccctaagcacttcataattgctgaataacaggacctgactgctccaagacaaaaccctgatctcattaggacctgctgtttcagtacagagaagacaattatatgtgaagggtactatgcttttggaaatgctaattaattatacattatttattggaaatacaatgctctcttcgtactgtaggtaaaacagaggaagtaagtgcgaatttgagtagctgagacttgcgaaattgtaaggagctagagtcctgtgtttcaagtctgggctccttggctgaattgcatacaagtctactatgtctgaagtccagtctttcccctttatctttttgaaaaatatttatttattttggactgcactgggtcttcgttgctgcatgggctttctctagttgcagtgcgagggcttctcattgtgctggcttttcttgtttcagaacatgggctctagtgctcagggtttcagtaattgtggcgcatgggcttagttgctccacagcatgcgcaaccttcctggacaagggatagaatggtgttccctgcattaacaggcagattctcaaccactagaccaccaggaaagccctttccattatctttaattgaccatcaaaatctaagaatggaagggaaagaagaacggttatttggtaggttttagccaagcaaagggcttcccatgtggctcagcataaagaatccatctgccaatgcaggagacacaggagacatggattcgatccctgggttgggataatccccaggaggagaaaatggcaaaacactccagtattcttgcctggaaaatcccatggacagtggagcctggcgggctacagtccatgcaattacaaagagttggacacgattgagcacaagcatgatactctttggaaaaaaaaaaaaagccaaactaagctgatccaggtagtttagttttccttttacagcaaaaattacagggaaataatagataaataaataacagtaaatagtgtgtaaacagtttcccaccccaaaccagtacagtaaagaagtcgaagcaggcaggggcggtttcagacaaa

SEQ ID NO: 61928 - DNA, 707 bp, Bovine  19866880963202
  misc_feature (1)..(1): n is a, c, g, or t
nacaacactctgttgcagacatctggtatgatcattttctttctttaaaccatctttgttcagtggaggcaggagaataagagttggggattaacttatacaaattactacataaaaaataatcaacaagaacttactgtctagcccagagaactctactaaatattctgtaataacctacatgggaaagaacctgaaaaacaataatatatgtgtatgtataactgaaccatgttgctgcacacctgaaactaacacaatactgtaaatcaactatactccagtataaaatttgaaaaaatttaaaaggtatttttaaaaatctttgctctactttaggctcaatttgattccataaacattaattatcagcaggataccaagaacttggctagacatttgggatgcatatataaataagtaccttatcttgcatttaaaaagtgtgtgagctaccacaagtcttggaatggaagggtgtacaccataaataaatacgcccacatgcagaatacacagattcaattttctaggagaaaagttatgtctaatttagtctttctttccaatatgcaagtatagaaaattgagttgataaatcatgtaaaatcctaagtgaagaaaactgcaattgctttcaagcttcctagtacagatatttccatgggggtgtgtgttaaccctcgtctatcaagtccagatagggg

SEQ ID NO: 61929 - DNA, 2419 bp, Bovine  19866881062752
  misc_feature (1)..(1): n is a, c, g, or t
naataaactcttgtaatagccacaaactgatctgcctgcttctggcaccccccagtcagattaatcttcctggaacactgcatgtcaggagagcaagaatgtctgaggggaaagatatttcattctgcctttatttcatggtccttagtactggcttgatacaaaaaagaaaggagagtgtagccactagacagttactgaggagctagggagacttttatatacatatacatatagttatacttatatataacattatatatacctttatatataattacatataatagtttatttgtatatttggttatatatatgtacagttgtgcatgcatgttaagctgtttcagtaatgtccaactctctgtgacaccatggactacaaacctccaggcttctctacccatgtgattctccaggcaagaatactggagaggtttgccacaccctcctcgaggggttctttccaacccagggaccaaacccacgtctcttatgactcctgcattagcaggcaggttctttggttaccactagcaccacctgggaagccccatatatgtacaattatatatatatatataattttatatttatatatataggcaagtgtgtgtatatatatatacacacacacacacacagtaagttccctacatacgaaagagttctgttctaagagcgagatcataagttcaatttgtttgttagtccaacaaagttagcctaggtacccaactaacacaattagctacatagtactgtactgtaaaatgtttataacacttttcacacaaataatacataaaaacaaacaaaaaataaaacatttttaatcttacagtacagtaccttacagtgtaccaggtacatcactgctgcctttatgcttgcttccagatattctaggcttgaaataagcatactctactattgtcctctgcaaaggactgtacagtaaagtacacaaaagtaaaatcacttgtagacgacgcacacatgtgacaatggacaccagacatgtaaactatcttatgagtttggacatgtgaatgcacatttgcatctttgaaagtttacaagttgaaggtttgtatgtagggagcttagtgtatattcatacatttgagcatggacatgtatgtagggaaactcacaatagaagaagtctgtagacaaaggagatatgatgacagtgagatggaaaggattggatcaagagcagtttgagactatgaccaaggacaggaggcaggaatcttatttcctaagacagagtgaaagtgacactcctgtcaatatattggctcaactggtccctcgcatatctactgataaaaatgctgccttgtcagctgcaaaccctgtctgaatcttgaccagcttttcatcttcagtgaaggttggacacagatcctttgattgacattaatttctgagcgagatcaaagaaatcataaaattcacacctgaagggcacctttagttggggctggattttgtcccactgtttaccttctgggtccttttggtgtgcagtatggaaggtaactaagaagactaacaaatcgatactggagataatgatgttttcctaattcaagaactgccctgaccttggacttgtgtgaaggagtaaataaaatgcacatttcagggaaggcagagcattcaatctcagttataaagaaggaggcaaaattcaatgaaaaagtgggttctgaatttcttttcattaaaatcagcattgtagtgtaagcaaaacactctttcttctcatattaatatctgcttcccaacagagtaagtaaaacaacaaaaacaaccataaaccaagactggaacaacagctgatctgtgcagaaaagtaaaatgctttccctgtatgaatgcatgttcataattcaacagcaaacaaacaaacaaaaatgtgtctctgttgactgcggctcaagttggtggcaatggttgttctatgcaaataaacgaatgaaaccgtgaaatgcgaacatcttcaataacatccgcctgcaaatgttctgaacactcagtgtttgaatccagtgcagctaagtacaaatgttaacacttctgccttaaatggagtggagtactgagtcttccaagtctgacacagcgagtgatgtgaggcagagcagtctgtggtacgtgcatctttttcttctcagaatgaaggctgaaatatggagacacttgaaggaaatctattccttcgccaaaataatgctggtatttgtcatttgcttccaggctcgaacacctgctaagtttaatcttttaaagaactgaaaagcatgggctggcaaggatcaaaattatactaacagagaaacagaggcgctatggtacttaacagtcttctaagagcctgcatctcccttaaaatttctgaaccaag

SEQ ID NO: 61930 - DNA, 1318 bp, Bovine  19866881123524
  misc_feature (1)..(1): n is a, c, g, or t
nctaagtgaccattgctgtcctttatttcctagactgacccccatagttctgaggggttttgtgctatttgaaaaagaaggcagaggcctcttcaattccttagcatgttctgcgtcaccttggaaactaattgtgtatatcagaaattccactctccaatctcaagctcatcaaatgctacagtcctgccccaagtacagcatgcgatgccaactgcctgtcagaaatgcaggtgggtcctcagtgtattgaagataattattgccttttagatattgtaaatggttaagtgcttattaaaattaattacagagaattatcttacctggcagggccagggaatgggatattctggctagtggttcaattgaaagaaagagaaaataaaagatgattgtgctcctgagattcagtctgggtgtgtgtgaggggactggatttttccagcatgttctctttcatcaagaagaccatcacaggataccatcagatatttaagtagcagcaaaatatttttcaggattgttgtcaactttggtttaaacgatcctccaaattctttgtcaggaagatctcctggaggaggaaatggaagcctgctccagtatccttgatgggagaattccatggacagaggagcctggtggttacagtccgtgggattcctccactgtgcctctcacctgcttgtccacctatcttgcttttacagcctcctccactagttcattttctttatctcatctcttaaatagtattgtccctaggactttgtcttcagccctattttgatatctcttctgctctcaacttgtgtgacataatcctttcatagagcttcaattataaaacaaaaaaatttcaaatctgatttgatctccatttgtgacctctctctgcaatgagaatccctaatgcaatcacatactttagctaaacagcacagacattattgccaccctcaacactctgtctccacttagatttcataaatcaattgatacgtcataatcacctggtcattcaacttagaaaacatttccatatacatcaaaatggatttgttactaactcttgtcagattctcctccaaaatgcacttcaaaccctattccctgtcttgctttccagtgataactggcctagcttgggctttggtttctttaccctgagtttattctaaaagttaaggcatatgctgatcttgctgactcctgtctcttttgtttcttagctatcttacatcctgcttccagcccatcttaatgatataatccctgagatagggctccccaaactcagactaaagtccaaatt

SEQ ID NO: 61931 - DNA, 2037 bp, Bovine  19866881250342
  misc_feature (1)..(1): n is a, c, g, or t
ntccccctaagtatgtgtggtacttcccaatctcctctgtcatccaccgccaacatgaggcccacaggcacgctcaggatccatttcaagaactggaaactcaggggtggccgagaggaaggaggaggaaggtggtcggggacccagtctgccaatgaaacccccgtgttttctctcttccctgtgttctcctcctcccccacaggaaagaggtgtcagacttccattcttgtaggcacgtctttacagagctatttccttggaactttccttcctcagatcgagggaagcaaagtacctcttgccccatcccttccaatctctgctctcctgacaaggtgatcgttctcccttcctgtcaccttgttaactgcatgtaggacttggtgggaggaggagtatagactgagttctgtggagccaacccatcccagcaaaactttaaatggggatagctggccccgcagctgacaggtctatgagagacggatgtagggctacctgtacccacttttattctcaagtgtgcagcaggaaggcaacatactgttctgtactaaccgcctcaagtcccagtgtactggaaaaattggtaccagggtgtcaggctgctgtaaaggctcctacctccagtgagggttttccttccaggcaagcctaggcccatcattagtgagatttatgacaacatgtgggaaaggattttaatatcctctccatatggggaatatagagtttaaactcaccagagctcaagggagcaaaatggactcatgaagactgatacttgggtgagattttctattgttgtttagtcaccaaatcatgtctgactcttttgcaaccctatagaatgtagtccaccaggcttctctgtccgtgggatttcccaggcaagaatactggaatagggttgccatttccttctccaggggatctcctgatgcagggatcaaacctgcatgtcctgcattgtcaggcagattctttaacactgagccaccagggaagccctgagacttttttgtgagtctctattattatgccatttagtttagaaaaaaatcatattaaaaagtcttcagtcctcatttttagtcactgacttaaaaagtaccctcctttttattcagtttcattaactttctattccttgccatggagaaaattgaatttaataagctttaattttttatttctgaagcacctctttggttcactcacttttgaaaattgatcaataacaatcactttaaataaatcactgagacttccctcattctttccttttaacacagcaagttcaagaacattaatttctctttgcttatccttttactcaagtgggaaattttatttttttctaagcgtccttgctatttcgcggtcatacgacattcagacacttgtcctgagaggtttgattgagtgcctaatgaaatcagtacaaaggatatcttcaaaactgtatacaagttcccctgttctctgaaactagaggcttactaggaaacccttcataaggtaaaatgctgtaaagtgaagaagctatcaccttaggacacgtcttgctaacagtggctcaagattgccttgccttgctaagtcactttagtcagttccgactctgtgtgaccccatagacggcagcccaccaggctccctcgtccctgggattctccaggcaagaacactggagtgggctgccatttccttctccaatgcatgaaagtgaaaagtgaaagggaagtcgctcagtcgtgtccgactcttcgcgaccccatggactgcagcctcccaggctcctctgtccatgggattttccaggcaagagtactggagtgggatgccatcaccttctccatgctcaagataaatcaagataaagcacaggtgctcacaggcgtggttcaaagctctggcagctagatgccgagaggctcagtatggtcccctggaagggagtgtggcagagccatgctcactgctcggggtacccactgcctctacaacagctcttgttcttgtgctcagtca

SEQ ID NO: 61932 - DNA, 1226 bp, Bovine  19866881346816
  misc_feature (1)..(1): n is a, c, g, or t
nctcctctccagtagggttatatttctgccttattgtggttttcaacagctgctaccacaggctatcctacaaacagtctgaataccactccttactcagtctgagtgttctctcttgcctaattaccctacaaggcttccaagatgaataaaaacatgttcaaggactgcccccttgccatgctcagaattctctaacgaagctattcatggtggcatggcttggcggtgtttctccgtcaggtttgccaagtgggtagaccaggggcattcatgtgggtcatctattcattaggaagaaagcactttctatgctttgattagtctcttctagtcccctaaaccacgtggataaaaggcacctttcttctttcctcagctgggttcccaacttcttctgccatcctttttatcaaaggaaaatctacaggttgtatttcaaagactaggcattatttttcggtgctaagcagaaaagtaattaaagtccattacacaaaagctcggtttctctttcgcttctctttagaagctgtatcagtaacaaggaaaatataatcatgaattttaaactatcattttaaccaactatatcctctgttagagttgcggagtggcccatgtttgagccccgcagggatgtcaatattgtccactggaaatttgatagcgatttctggcttttgccctagtgccaggcgcacagaaagcacttaatgaatattcgtcacctaaagatgtgaatcctgtcccctgcattgtttcagaggtgagaaaagctaacagtacatctccagagaacatgtcacagagtttattttcttcttagtaaacaaatgcagtagaggaaaataatgatggttgggtttagtctgatcacaagaaaacagtatctagtacatctttgtcagaagattgatgttttgttttgctcatcatccctggggtttcttttttacagtggggatggtacacagaggtttggactcttcacccctcccgcttgtgcctctgaagaagcctggggtttcttttttacagaagggatggtacacagaggtttggactcttcacccctcccgcttgtgcctctgaagaagcctggggtttcttttttacagtagggatgggacacagaggtctggactcttcactcctcccgcttgtgcctctgaagaagccatggcatggtaacacgttcatgtcgcacatcacttgagctgctg

SEQ ID NO: 61933 - DNA, 1860 bp, Bovine  19866881384987
  misc_feature (1)..(1): n is a, c, g, or t
ntggtttggtcccttgctgtctaagggactctcaagagtcttccacagttcaaaagcatcagttcttcagtcagtgccctctgcaaacgctattattgctacattgactcagtgattaaaatgcatgtgtcctaggcagattggactggtataggagttattggtagactattgtgacctgtttcaagaggcaatcaggttttcttccccttagacatggttgggaccgaggatgctggttgttgaggacctttcgctgagcaatggaaagggtggtgggaagagtgtatctcttaaagtatggagaacttgagatctggggtgggaagcagtccagagaaaaagatagcagaattcttctagttttgtatgctttaaagggaagctgacacagactttgatatgactgctcatcaagacgatgacacgatcatgattgcagtgattacaacagcttgccttttcacagctcttgacaaatttaaaaaactccttattactgaaaaagtcatatctctggtaaaatcaagataggaaagggcatgtcttttgtcatccttaggatgctgctttcagggagatttgaaggaaagacctgttttgtgggaggtaacagggcccagaggacaggaagaagattctggaaggcagaggggtacttccaggtgttgagtagccatgagcacttggacaagcccctgagtcccacagaaacacagattcctcatcctttaaaatgatagtgtcacgcaagtgtatgttctttggtttttgtctcgtcacaacaaagatttggagtgacggacattaaagcccccttggcgtgtcacagctctcagatcttggatagaccgtgttatagctctcaggtctcgaatggaccatgttatagctcttaggcaaatcagtgttacagctcagtgttacagctctattttatttagaagatagcaggaaaacccatctctgaggcttgagggcacgttgatccaaagacacgaggagaagagcaccccagcacgcaggagagagagagagctagctctggctcctctttttatatgtttatctctccctgggcctgtcttatgtaaattgggccagccaggagtgttgtttgttttacctgaggtcctcactctggtcctcggaccttcttttgtctattttcgcgggcttttcccttccttgtcttttagccaccgccattttggactccttttccctattctacctacctaacaatagcacccacttcacaggctgtgaaaaggtgaaataaaatggggtgaacaagatgccttctaccaggcactcaatacacagagtcctttagtaccgtagcttcccggatccattaggcatcctgccctctgaatcactgtgggccctctctaaatgcactgtgagcctaggcgtgcttctgcttcacagatggggatgctgaaggccacaaaggtcaaaggacttgatgaagaccataaagctctctcacacatccactttaggaagccgcctcatgagtagtggggcctggagaggaggctgtgcctgaattcaagttcatgtcactgaaatgctaaaatgtcatcatctcaatgtggaatgaagtgctcgtatatgtgactgcacaagaaaatgcatggttaatattttccccactgggcttacatgtggtttgcatagcagattttgcacattttgtcattatctgtatttgaaaatagaatgtttctcgataaattatcccattatctaaccaattttatcatgaccagttttttgtttgtttctcatttcccatctaaatgtttcattctttggatgtggcatgtctcttcttactatgcaatgctaaat

SEQ ID NO: 61934 - DNA, 1048 bp, Bovine  19866880498565
  misc_feature (1)..(1): n is a, c, g, or t
nggtggtgtcatctgcatatctgaggttattaatatttctcccagcaatcttgattccagcttgtgcttcttcccagcccagcgtttctcatgatgtacgctgcatataagttaaataagcagggtgacaatatacagccgtgacatactcatcacagcattgaaatgaaaggatatcatggagaagagtgaccatgacctaaggactttactctgcttctcgggaaaggatattttcagctatttgggatggttttatcatgttaggtgggagtatgcctcttttattttctctgtttagacagtaagtacaatttaaaatgagtgtgggtgccaagttgacaacgggtggtctatgacggtcttttttaatatgccaacttggctaggctacagtttccaggtcattaatcactaaactaaggtattttactgatgtgattaaaatccattaaatcttaggtaatctagatggccctgattcagtttcttgagaagtcttccaagtagagccaaagtttccctgaaaaaaaaaacgtccccagagaaggttcagcccatacctaagatttccagtttgcccttcctgacagcctgccttcttgacttcagacttgccttagccaacccgtgcaattcatctcatactggttctgcttctctggttgaccctgacctatacaatcctttaccatgccacatgatacaacaaagaaagactctctttccaccaagtagccaagggttcagattcaaggttatagggttaaggcttgtatacactatttaccaaaggagaacatgccaaatagcaaaaacaacacagaaatcaatcctctttaccacaggggcaatgagaaaaacaaatgagttcaacataaaaattttcactttaggtttatcaattagcaccatttcatatgaaatagcctgttcttctgagaaaggcatccacctactgcaaaccaccccaggataattaagatcacaaccatatcctcagacactttatgatcaaaacatatgctcagaaatacaggctttattt

SEQ ID NO: 61935 - DNA, 903 bp, Bovine  19866880608395
  misc_feature (1)..(1): n is a, c, g, or t
natcagaacagcaggagaagctcactatgtctgtctcagaacttggtgctgctaaaatgcaggaacaacaggtaagtgtcttacttcttaccttgttttttaatgaatcaaccagatgtcagaagagtcatttggcctcttactttaattgtctcactgtatacattgtctttagacgtgcaattacagtgtgtgattgagttggtttaatctacttccctattttcttttcctctcctgttctggggcctggaggtcaggaatgattccttgaccaggctgtgcatcaggagggcagctcctggttgtatggaagcactgcaggagtgaaaaagaaaacccagtgttctgttacttagtgacaatcaggtgggctcttttttactcataaacctcttctaatttatgttcagagttttagaataataaaagtgtcttggtgactggtaaaagctttaattagagaaactggaatagttaatgtaatttagtgtttgtatatacttattaatcacataagtatatatgagtgtttgtgtattagagtttgtatacgtatcatcaaatagtacatattacataattaaatgaaagttcagaaccctgccagctgtgatgtgaaacaagctctgaaaatcgacttctttctctctagcaactaacaccagatgtctttttcacatccaaacgaatttaaatcttcaaatggataaggataccctttgtattgaaacactgtaggaaaaaagctatatgtatagtagtgtcaaagtcactcatattagtattaagacattgataatgtacctattatcagagtagattccatcctggttatggttcagtaggttgagcacagctactttattactaattgttcattacccaggttcattttccatt

SEQ ID NO: 61936 - DNA, 808 bp, Bovine  19866880666277
  misc_feature (1)..(1): n is a, c, g, or t
natactatatatatatacctatatacatatatgtatatacactactacactactaaaaacaactactttcaaggcactagaggttaaccagaaggaaaactggaagataattgccatctggaaaaagcgaatgagaataatgggtgagtttgctgtttttaaggctttttatcagagtgtaggggcttccctggtggctcagaggttaaagcatctgcctgcaatgcgggagacctgggttcgatccctgggtcaggaagatcccctggagaaggaaatggcaacccactccagtattcttgcccggagaatcccatggacagaggagcctggtgggctacagtccacggggtcgcaaagagtcggatacaactgagcactttcacttcaaagggacttcggtggttcagacggtaaagcatctgcctacaatgtgggagacccaggttcaatccctggatcgggaagatatcctggagaaggaaatggcaacccactccagtattcttgcctggaaaatcacatggacggtggaacctggtaggctacagtcccatggggtcgcaaagaatcggacacaactgagcaacttcactttcacatcagagtgtaagttccagtagatgctcagcaaaaaggctagatttgaagaaacagtcttagctgctgttaagttagacaacagaattaaggatgacaatggcagctggaaactgaggaggaatattctaggaaggagaaaggaagtatacaaattctatgtattaaactatgcttaaatctctgggctgacaactaaactacacat

SEQ ID NO: 61937 - DNA, 1348 bp, Bovine  19866880738777
  misc_feature (1)..(1): n is a, c, g, or t
ncctgttcacaaccattaacctcaatttcctccttgtttacctctttttactgggctagctagcactgtccactgctagtgttaaccaaccaatttctcataatctctctagtcactctcacatctatttatttaagaactgtacagtgctttatgaggtcttcctggggcttccctggtgacttagatggtaaagaatctacttgcaattcagaagacctgggttcaatctctaggttgggaagatcccctggaaaaggaaatggcaacccactgtaatattctagtctggagaattccatggacagaagaactgcagtccatggggttgcaaagagtcaggcaccactgagcaactaatactttacttttatgagatcttataggtatactactccctgcctttcctcatcaactgccagctttgtcacgtttttggttttaattatgattaatctagaaaccatttagtcctctcccagataattaaaagaaggtaattagtccaagtttcaaaagggagactatccacagtttgaaaaaagagcaaaggtacatttcatttgatataggacaaaagttctgcatacctctactgttttaggacaacttagaacaactcttgtctttttagactttgctaccagaaacagaaatgaaactgaggagactttgtatctgagatggaatcttatctactttgtctattagtcatccttcagagatgggacattcttacttttggcttcttctgttctgagtcactgcactttggagagtggagaaccaatcgaaatcgctgtggcggttacactgcaaggctcaacatagtcttctgttaaactgacaacaaacttgtgttgtgtgtcggcactaaaataaaatagcaatatgagaaaaatttagtgtaatagcaaagggacaaataacttgtgttattggctgagaccacagcaacattagaaagctgcaattgaaaaggcactttgagaaaaggtgtcatcaggccagccccgctgtggaggttaatctctcccaggcccagctacagaagccggaagtctacaaagggcttgtgcccaccccccaaaaaaatcaatttctaatttaaaacaaaatcatttttgactaacagggattcagaacccattactttttgctgtgtagtctgctgacatttcagcactttctgttgtgcacaatgaatcctaatagtcattttataatgttactagaccaatcaatttaaccaagagaaagctgttacaattctgcagtttccaggcacagttcactcatggttttatttttttcattactcttttttttccttcccccttttttgagg

SEQ ID NO: 61938 - DNA, 1659 bp, Bovine  19866880753966
  misc_feature (1)..(1): n is a, c, g, or t
nctgtgtaatactactggacttttacttaataaattatggtgtgagcaaacattacgaaaatttctgatccacacaaaacaagcccagtgactctgatgggtttatgtcatttgaatcctggtcaagggcctcgtggaattcataatggatccagtaatactccatcaacttgttctagtctagggattgcctctccttctgggaagtttaaacattctagtttttagaatattactctttgaataaattatttttcttcattttaatttccacattgtttatggtcataggcaagacaaaacgaaagtatcacgagattgcggtgagcttcgtgatagtcagaaggaagggactggtagagtagtaagagatgcacatcatgataacatttctctctaaaaaataaaatgttccaagaggaattgtgctaatggtgggagcatattttactagagagaaaaacatatgcatgtgtgtttattttcattaaaatttcttttactccatatttgccttgttgactttataatgaaattatatgaggacagagaccaattctcccacatgcattatagtactattcctcatatactctgagtacataataaataccataacagtcgaaaacgagaaacacaaatgcattttgaagcaaactggtgatattttaatcccttatgttcatttttagtactcagaaacattttagttatgcaagtcttgttttagcacactttttatttctacagatactctggttcttagtcatagtctgtggctttattagcagtttcatgagtctgactcttatttccccaactccagatataaacttttgaggataagaaccacaactccagagttgttttggcaggacacagaacaggtcttcagtaaaatttttaaattatatatcaataaaaaaataagaaaaagtttctactgccatgaattgtatttcaactcatgctaaatttatatgctttttgtgtgtgatccattcccccttctgtgctctctatagctcattcatgtttattcttttcagtttattgaagtcagagtgtgatgactggacacttggaacatcaccgtccagcaaaaagtgccaagactccactaacagtggagcaagtagaagggataagaagacagttgggtttcagtcacagatggaagatgatgccctgtggacaagtcagaagaaagatgcatgtcgatcccaaagaggtgagctcagcatctgcagtagcaaaatgggaagctttgggggccaggttgctagtggttgctagccatcaactccagatggtttcctgtaaccctggagcaagagttaaacgtgttacaaaccagcatgcacctgcaaggccacaggtggcacgtctcctggatcagtgaattgcatcaacagttctcagaggactcacgagaaactgtctaatgtgtccctctttttgcaagcagccaactgtaagaattattcagcagtaaatatggtcatcaattcagttcagttcagttcagtcgctcagtcgtgtccgactctttgcgaccccatgaatctcagcacaccaggcctccctgtccatcaccaactcccggagcttactcaaactcaagtctatcgagtcggtgatgccatcgagccatctcat

SEQ ID NO: 61939 - DNA, 1078 bp, Bovine  19866881250396
  misc_feature (1)..(1): n is a, c, g, or t
nactaggacggtggagtcccgatttctcagctagtgtatcgggctgttgctgcatcccaagatttgactcttctgaaaacctgaggaaaactttgctatgtggaaaggatactggcataattatcactagaagactacatggtcttagcttatgggactgactgcttttgagggaccagctgcttttattacaggggtaacaaatgctccttagagggatctggtattcctagagcagacttcaacagttcatcaacctttctggtagaaatatgtgagaatggaccaactactctactctctgcttcctcttccagaatcatccccaggtgtgacagaggtgaccatcatagaaaagccacctgctgaacgtcatatgatttcttcatgggaacaagtaagtgtcaacctgttgaatcctcacctcccaacaaagagtggtcaacttaaatgtccctgagaaggaaagactggacaggaaacttttttcttatctcaggccacagccttcaagttagagttcatctttctctctgtttctgttcagggcttttaacgctccccttgcattccataccatctccccaacacagagcatctcctctgagcccgtcttaaagaggcagtggaacatttgaagttgtatatatacacggcaaagctgaaaatccagcaaggaaagaaggaattaaatattcataagcatgctgggcagaacgtggttaagtgttgcagagaagtactaaccagattaatagcgaatgctttccaaccctcctctaaactttcattcattcgtttattcagtaaaagatttaacctcctaaaatgggccaggcattgtgcttgatgttgagtcctagagattcaagggtaatcaataaagaacacagtttcctacctcttgatcttgtctgagacatagtataagtcatcccaagtataattacaaagcagatcaagctctgtgaaataaaggttaagggagcattgtcaggaggcctgacctagtctggaggttgcagaatatttttcccaaagaagttatgagaagtttttaaccagatagatgagatat

SEQ ID NO: 61940 - DNA, 1315 bp, Bovine  19866880221645
  misc_feature (1)..(1): n is a, c, g, or t
naaaagacgcttactgcttggaaggaaagttatgaccaaccctaggtagcatattcgaaagcagagacattactttgccaacaaaggttcgtctagtcaaggctatggtttttcctgtggtcatgtatggatgtgagagttgaactgtgaagaaggctgagcgccaaagaattgatgcttttgaactgtggtgttggagaagactcttgagagtcccttggactgcaaggagatccaaccagtccattctgaaggagatcagccctgggatttctttggaaggaatgatgctaaagctgaaactccagtactttggccacctcatgtgaagagttgactcattggaaaagactctgatgctgggagggattgggggcaggaggagaaggggacgacggaggatgagatggctggatggcatcactgactcgatggacgtgggtctgggtgaactccaggagttggtggtggacaggggggcctggtgtgctgcgattcatggggtcgcaaagagtcagacacgactgagcgactggtctgatctgatctgatacataaaataaaatgcacagttcttaaaggtattgttaaatggcataaacttgtgtaaataccaccccaatcaagaaaacaaatgtttctatcttgacaaaaagttccgtgggcctctctccaatcaatcctcctgtccctttcaacataatctatcttttaacttaaatcatgagttaacaacatattggagtattagaaaaagaaaaaagaagagaatcttcataagtgatcatgagttacacagtcaaaaatttgtgtcaaaacttcaaattaattactatggctatgttgttttatataataccctatcttcaagtgacctttttatttttaaaatgattaatattaacctgaagaataaataaaatatataccctagtcacaaattcaggtggaaatatgatcactttctagccagactggatcagataccatgtggtatctcatttcagtttgggactttttcactatgtagatttacttaccacatgactgacttagtattgtgtattagctataataattactttaaaattcatttttatttgttcatgatatagttaagtaaaataataactgtggactactattccactttaaaagttactgtctgtatgaaactgtgggacttcattaggagtaatccactgtttcctttgtccttttgtgctttctttattcctctgaatgtgattcacaggtaaagacatgggtagtaatctacttgtttgatgttgatatatataaatatactcaaggg

SEQ ID NO: 61941 - DNA, 1318 bp, Bovine  19866880374308
  misc_feature (1)..(1): n is a, c, g, or t
nccattctgaaggagatcagccctgggatttctttggaaggaatgatgctaaagctgaaactccaggactttggccacctcatgcaaagagttgactcattggaaaagactctgatgttgggagggattgggggcaagaggagaaggggacgacagaggatgagatggctggatggcatcactgactcaatgaacgtgagtctgagtgaactccgggagttggtgatggacagggaggcctggcgtgctgcgattcatggggtcgcaaagagtcggacacgactgagtgactgatctgatctgatctgatgcattagtactagataatcataagttaataaacatcagggaactcactgtaccccccagagctaggcaccttaaactctttggggaaacagcttccataaatctaacagtcaatgggtcagcctctctggcagaagtctaagaggttatttatcacttcctagatcccataaggactaaggggtcaaactcccttttagtgatgtcactgttggagaaatgtgtcctttcttaggttaaaaaaaatagtcttcctcagcagccatacagcccaacactgtacctgcagtataagtatttcatacagccactctgagatccttcttacattaaatggctcattcacaaccatagccaggctaaaaaggatgcaggtcagatttcatccagtggaattaacactgggacaagaaaatgtctatataaggctaagttgtccctggggtcctaatagaaaactatttcaggattgttttcagggattctcccctacccccaccccagtctgggcagtaagatacatttaatcacccctttccccaacaagttttattaattcatccattcttgagttatacacaagttcaagttatatttcaaaggactaacttatcccccaaaatttaaccctgaaagtcttaatatgggatgtttttccaaaaaattaaacctgatttttgtgtgtgtgtggacacataactagtatctacaatacattagttttattgtctgtgggatgtgaatttctcatgaatataaactatggtttgaaaaagcagagtttatgattgaagacacttaggaaaacatgaagaaagagaggtttgtttgtttgtttgttttttactagaaccaaaaggtctggttcacctttgctagtaaaaacaggctaatccatttccctttctgctgaactcaacagcactcctaacaggtaagcccacagaagagaacccttgctcatcagtatagtaatgatagtaattagtagtagcagtagcatatacag

SEQ ID NO: 61942 - DNA, 1683 bp, Bovine  19866880394242
  misc_feature (1)..(1): n is a, c, g, or t
nttgggccctgctgttaagagccacttattggaaaagaccctgctgctgggaaagatttaaggcaaaaggagaaaagggtggcaaaggatgagatggttagatgacatcactgattcaatggacatgaatttgagcaaactctgagagatagtgaatgataggggagcctggcatgctgcagtccatgggctcacaaagagtcaggcatgacttagcaagtgaacaacaacaacgaattaagatcctctggcaaagaaagaaacctagcctttcagcaaagatcagattaacggtgctaacacttacttattttttaagattacctcaaagtagccaccgttaaaacaatgaaaagaggaatgggtagaccatagaataagctaatttaagagctaggtccataaaagaactttggcatcatttttgacacataactggatatgaatagtacaaaagcctaaaagttgtttttttttttaggaaattgcattactaaagaaaccataaatctgccttgcaaaagccatttactgtgttctcaaggagtttctgggaatgctagtctccaaggtcctcttcagtcttgatcctggtgaatggtggacatggaagaacctcccaaagagtgaacccaggggtctgcaggcataaccaaaggcatccagatgggttcatcagggaatgtcttccatggtcagggcaaaagtttctgtctggagaggaaactattaaggattacaggttgctacgtgtttcccattctttcatttttcacatggaagtttgtattctattcctgatccaccattacagattgggttgaaagtggggatcaagtgaatattttttggtttataagtcattggactgtatgtagtcacatctggacaagaaagaaaaggctctactttccccagagagagtagactttgaactggctatggaaatgaataggcccacagatggctcctgttggagagaggttgagctgtatgggaagaagggtgcactgagacatcccggtggtatgagggattggccgaatctctttgtttacctttacctgaactaatacagtcttgcttgaggttctgatttctttattcagaaacctatctcctgcataccgacagctttcaaatttgtatgcccaaccaggattctcttttatattctaaacctatattatatgaatagtagacagctttgcatggatttatcactggtaaaaccttagtcaccagatgtccaagactgaaatgatttcatttctccttaaacatgtaccccattggtgatagattgcaataaatggtcacaaactcatcctgtccctctacacacacctctttgcaactactgagctgctgccctagagactgtgttccacagcaggagaagccatcacaatgagaagcctgctcacagcagctagagaaacccgtgcagccaataaataaaaaatgcagcagaagtaatgatgtggcaattatgagcctagacctcaagagccttgcaggctttgctatcagtctcttggaaagcttctaccattatgtgaagaaacttgggctagtctctttaaggatgagaggctacgtggagaaagatgcccagctgacatccagcaccaaccaccaaccaccaacagacggcaacataatggcaaggcccaggaaggc

SEQ ID NO: 61943 - DNA, 2490 bp, Bovine  19866880447400
  misc_feature (1)..(1): n is a, c, g, or t
nctgcggcggagccgggagggcttgctgcgctccctcccgcgtccgtcccgtcctgttgtttttcaattaattttcttaccacattgttcttcagttgctaagtcacatctgactctttgcaacccttgggacctagggcatatatagcagtatgtatatcttaccacatataaattttaactcctgctttccaatgtttaaattttgaatttttttcttttctattactaaccagtcttaacaccaaagaatctgaattgttttgaaagaaaatgctttctgaatttttatttagtgttttcaaaaaataagatcagataaagatttcatgtcattttatttgtttttccccaaacagaattctccataagaccctaattttgacaacgtggcttgttaactattgtgctttttaggcatttaattgccctatgctgattccatcttagttctgagaatgatggagggaggcatgtaaagtgtggatcatccctggtaggttgcggaccagccagatgcatattaatgagtacgtcattggctggggcagggggtgtgtctattggtccacaaacgctggttttttccctgcttctgtttttcctccccaaccaggaaagccactcaaatacacagggaactatctagaaagctgattgtgtatttagatgaccctatacatggaatttattcaagcaaacaatgcagtgacatgcacaggctcctatgtgagaggctagaaatagaatttactagagggaaaaacccaagccttttagattttaaatctaaaatctaatggggggtggggactcaaaatacaatattacattggacaccaaaaggaaaaagatatgcttgcttgttatctgcagtatttttttactgctcttagcagcttgttcctaggtatacaaaccttctcaatactcagtcattgctccaaaagggtatgttatacctcacatgatcaaccccgaaagaagaaacaattggtttagtcagagagaagtatttagaaaacgttctttggctgtatggtcacacttctcatgttttcaagcttttcactcttggcactgctcttccatgataaaatatgataatttccatcttaaaacaactacttgcttgtgtaggaaaaggaaatggagccctcaaggctactttttatctccctaactccatccaagaaaaaccagtcatcagcagttttgtcttcacttgaaaagctaagcgttggaaaggtctgcacttaaggggtgaaaggactaagactggcttgggacatagaaaagatggtgttccggggacacaggtacaggaccaaccccgccatcccctccccagcttgctgtgagccctttaggctatttgccagacaaaatacaaccaacaaagacctgtttgcttagagttacaggaaccaatgtggatgcagtctgggtttgaatgccagctcttccacttgtataacttcaacctgcctctgcaacagctttctcagccataaaatagggatggaaatatctacaacacacaagttttatgaggtcccagtacattaacacaggttaagagcttagaaaagtatatggtaatttttgggcaagcatcagactcaataaatgtttgttattatcaccaatatcaagatataagcttcccagggaattacagtaatcatcccattgatagtaggaggaggctttattcaactatggttaaattacagccttaaatattctattcgctttcaattccttcttcaggcccagaacacaaatagtgttccttaaaaaatccttctcaaaagacaaacactgcatgacctcatttatatgtggaatttaaaatagtttatctcacagaagcagagaacagaatgcagtacccacagggtgggggtggaaggggagatgtgggcaaagggtataaagttgaaaaaaaccttctctccatatattaaatcatttttgtttgagttactggaatatgttagttttttctggatttagttatgtttcattgagatatgtttatgacatctaataagaaatcagatttttaaaaataaggtattacaggtattctcctctggaaataattctctcctctttcaattacttataacacaaagtattttggaaaaggacacaaggacggttacctatattcttccccctgttctgttaaaatctactcatttgtcttagaacctgctatctcagcatttttcaagctgttagaagattataaaatatattactttttaaaaaactgaaacagactaggaactattagtaaggaagaagtcttgttttgtgagactttatttgtttccatatacatcagtatgtatgaagatatgtgtatactggagttgtgatgtaatacatttcttaccgggaatcctgaccacaattgatgaacattatccgaggagctggcataatgccttggttctacttaaattgggattatcttga

SEQ ID NO: 61944 - DNA, 4026 bp, Bovine  19866880469697
  misc_feature (1)..(1): n is a, c, g, or t
nattttctacaagctctggaagttccaatttataatttttggaaccagtatttcaagggatggttgggtggtaaggcttgagccagtaacacttggcgactgaaaactgtttccaaaagggaaaaatgcagttggagctccgggcacagctgtggctccctgtgtctggggacaagctggtggtggggcggctggctctggaggagccaggtgctttctctagggaggacgaccgggagggagaaaggcgcactgaggggaccagtgggaaaggctctctttcctccttccggctctggagtctcacatgagactcacgcaaccccactgagaaggtgggggtgcgcgctgctccgtaggccttgcttcctgaccctgctgtgcgcactccaaggtaagtcccttacctttccagggccggtttcctcgtctataacatgactactatggtccctttacctaggaatcccatttacccgtgggctggtaatggaagagtgtgggtctccggcagggtgttggaaccactcacagttcctctagcacacaggagagacggccggctgggccagaaccagccccacccagggcctgcgggcgcccccaagctgcagctctgcgctaggttgtttgcacacagaggccatgtccgcttaaataatagcagccttgcagctgagaacttgatttgacacgcttacataacagtagctttgcagtctgagaacttagaattgacaaagtctaaatgtttaaaactctggtaaatcagaaatatgttttctcacattcaccaaacttaagattcaatatatttaggaggtaagcatccttcctaaaatcttcttttcactacccagaaacaaagtgtctactaaggtaaacttcagccctgcctgcatttgtggaattagtaactttcatcgagtggaatctgatttgacaagtttggccataattgtaattattacctcgacttctaaattcctctcaatctttctttgtatatatacaagcatgtatgcatgcacacacaaattttcttccctgttggcttggcaatagttgtcatgaagttgatgttggaaaaaaaaaaaagaacatccgcttaaaagacccactccatacttaagagctgcatttcaaatgctatacaagacttggcacaagttaaaacagcaaaaaacctttaattttagtcagcgacatgactgtaccttctataaggagtcttagttaccatagctgctgtcctctacttaataagatctctaccaagcctcctagaatatttcagaaacaaaaaacttgctaaaaccaaaaacttgatggtgtattccttccctgctcagtgagtcacggatttgacctcctccaagatcacgtatgcaacggaattttgaatcacgaatccaaagattaatgaatcaaacactgcttaagggcaacgtatgcgtccgaactcctccctacctcttctctaacatgttagatccagctggcagtctagacagcacggaaaaggctgtgtgtacttagagaaatgaggtatcactgatccacgaccacatctatcagtgccaccatggcttgctcaagaaagttcacatctccacagcttatactcacaaatttccccaatcatctccgaaaacaaaacattctatcagtttaaggtctgtcagtgttacagacttgatgagtatgactcaggccagcaaattaccatgctgctactgctgctaagtcgcttcagtcatgtccgactctgtgcgaccctatggactgcagcctaccaggcttctctgtccatgggattctccaggcaagaacactggagtgggttgccatttctttctccaagaaattatcgtgaatgccctcttattctttgttatctgttaaataatttcatccatcaaccagctttaaagacatctgtattcagcacaggaaagtggaaacaacaaaaatcttatttttctttttttggtacctagcttaccttatctgaacagtgtagacatgattgatgggtttgggttcccactccaaaatggtcttgaaattagttgacttccaagttatattatatgctaccactacatctgtagtgcctttaaacaacagagaaacagttattaatgtttacatgaacttctcagcatacaattttatgttaatggtataaaacattcccactccgtaacatcatcataaacctcacattaatattttcctaaccacaaaagctttaactcaattatcataagaaaaaaaatcagcaatattttcctaaacccagagtttcctcatggcaagacgacctggtgatctaaggaaacacacaaggatcttgaagtccttgtttgaaattattcatggggaaagccctgtgagaacgaccgaagcacagctcaggagccttcagtggcccagggtatccacggaccaactggagaagggggaagggcaggattccaggtttaacttagcagggaaagccggctaggatgggtttctgtaaaatatgttaaagggcaaagcccacacgtgtcagaaaagttaggactgcatccaataaaaaaaaacaaatcttgacttttttcacttttatctaatccccatgaataatttcagtcactatactgaaacttccacagacacccaggcagacaataagcatgtacactgtcggctgtattcggttaggataccttattgttaaggtcttctttgccagttctcaggttagtctctgcctgcgtctcacatagaacaggcttacagggcatgcaaaatgtggcgcctgctccaatccaaacgacattttggaaggactgactaacccaatctaaaacactgacgatcaagagaagaccgagagccgtttctcattaaggaaagttcacatacaatgaaggataacattcaaacattgcctgtcgacccctgcaggtgcggagccttgtcccatcactttcaaggtgtcggctccctgggaaactaaagcgagattcccaaaggcacttaggcaacaatggatgcccagagcaagcatctcgagcagaaggggtggcgggtccctggcgagccgcacctcggggcggggagagcccgcggtcagccagacctgtcttccctcctcccggtggctcgccccagggctctgcgaggcgggtgccactcaccggcgactccggccccctggatgaggactaagccgaatagaagagcccgagcgactgcggcctgggggcagggcacccggggcccgttgggggtcgccatgtcccggagctgacggcgaggtctcaaaaattccgctgagccccggaggctggagaggtgaggatgctgcgaggttgggctggaggcacctggggctgcgggatgaaccgggagggatgcggggagcccagagtttgtgggagctcgtccccgccgcgctttaaagagcggagctcacgtttgcgcctccgcctgcgctgagtccgcccccacctctcctcctgactccccgccctcggcccgccttcgtcgcctcgggggcggccctcagcgagtccacaccccgccccgcctcctgcgagtaggaaactccgggaccctgcaaggactgattcacccgtgattcaacccgtcgccgagcgtgagtgtccttcggctgctggccggtccaggtgctgagggcaaccagggtcccagctgctcagatcccctgacgccccagcttcctgaccccgggatcacctatccagatgtcctgcctgagtgtgcggcaggtctgtggggaaggaataaagggaggttggatgggagtttgggggaggaagagagggattccctcccttccatttggcgatgcaatgtccaggccggtgggagcgcagcacctaccaaggttaatagaaagtagtggccgggggctcctctctggccccagagagcatttctggggcgctttgcccacgtcgggcgagcttagaatctgcagccaagtaacagcatgacgaggagcagagc

SEQ ID NO: 61945 - DNA, 1686 bp, Bovine  19866880578680
  misc_feature (1)..(1): n is a, c, g, or t
nagaagctaatataatagaaatgttgtttgttgttgactacattgtcctgaaagtttgctcaaatgaatcactatagatatttgaccaggtagacctgtggttaaacaggaagtgtaaaatcagcaactcacagactctgtgcataccctggaagtgtgcctactaaatcttattcagtgtatgtcagactccttacatttcagttttcccagaagatgactttgggatgaaatattagagctctttcaactggaacagaacattcttctatttgttatacccataatgctttaacttcctgcattttactagtgttctccacctgagttctccctatccacctaaaaaagcaaacccagcaataattcagccccctgaggtacattatgaaaaacatgtgcagtaggatgactgtatgctaaggtgggtgcccggggtaaaagcccgagttttatttcccgaggtctcactgctactctgtcatgtgaaggatggttcacgctaccttttactatgcttcagtgtttccaatcaaggagaggcaagtggacaatgtatctggcaggtactttcataacggcattttgggaatgtagaggattataggaggaatgctgcttgatgcttgctgtgccctatttcagcttgggcacaagttctaaaagtcctgatgatgaactgtgacctggaggcagtgatctgggatgctttcgtgagcttaaacgttagatttgggattctccctaaattatagatgtttgtacccattcatcagtcttgaaaacatccttggagctgtaactgtttgtgggtagattttctttctgctctgaagcttttggcttcccctgcgattgttctattctctcacctcgcccaacaaatattttggtgtagggtatgagagaaaaactattctatgagagaaaaaggtgataaatggcaaccagtggcactgcctggacagggtatagaatggattctcatcagtaacacagggaaacgttagagctggttggtcttccagcagaaggagaagaggaagatgaaggggagcggggcacagaggcattactgaaacctgcaggtgagagtcagccctctgacctgaaggcaactctaagtaagactgataaagactgtggcatgctttgttccaggggctgccctggtgactcagtggtagagaatctgcctgccaagctttgatccctggggttgagaagatcccctggagaaggaaatggcaacccactccaatattcttgcctgggaaatcccatggacagaggagcctggcaggctatagtccatggggtcgaaaaagagtcagacacaaattagcaagtaaaacaatagcaatagtgatttgttccaagaggctgcttaattgaaataatgaagtcagggctggaaaggggaaagaatctactgcagtctctttctggcaaacgataactctgtatgcgagacagcaaaagagacacagatgtatagaacaatcttttggactctgtgggagagggtgagggtgggatgatttgggagaatggcattgaaaatgtataatatcatgtgtgaaatgaatcgccagtccaggttcgatgcatgatacaggatgcttggggctggggcattggggtgacccagagggatggtatggggagggaggtagaaggggggtt

SEQ ID NO: 61946 - DNA, 1872 bp, Bovine  19866880615090
  misc_feature (1)..(1): n is a, c, g, or t
naatagaatgtattattatatagactctatgactgcattgactatattcaacatagaacagaatgtgataaacagaatataatgatataataagtagactagtaaataattgagtcttgatggaaaattgtcacttctcccacatagtcatgacaaatcatctatagtttaagaaaggtatttaaaaaaatgattcagagcacagacccagtagtcaaactgctgtctggctcaaaaatccagctgtgtgactttgtgctggtcatccaacctccctttgcctcagtggccttatctgtaagaacaaagacaattacagagcgcccccccccaccgcccaccaccaaaggttgctgagaggacctgaagtgctcagtgtagcaaagacctcctcaggattgcttgtggaagtcagtgttggaacacagcaccccagccagaaaacagttaccttgttggatgcaaatcacaatgttccatttctcttccttcctttcctcagccctagattaggaaactggaaaaacaaatgcttttacacaacaaacacggagtgtgatgtcactgatgagattgtgaaaaatgtgagagagacatatttggcgagagtcctttcctaccccgcagacactagcagttccacagtggagcctccgtttaccaactccccggagttcacaccctacctagagagtaagtagctcaatttgtagtaactgttcattcttgttttcataaacttctaaatattctgtgagcttgtgacccttaggaatgattacattaaaaaaaagtttatccataaacacatcttgttttctcagaaagtagtacgtgccacagccctcttcgctcattctggatgtggtaggaggctcatgggacgtgaactttggagttgataaaaatgtcatcaagtagctttctccaccagtctgtccccagaccctaccagtaactggctggatagggggcagagagtaggaaattcacaaaggctggcagttccagtatttccccatatatattggtgaccaaaaagttccataagatcttatggaaaagcccaaatgaaatttttgactgacccaatatttaggagattttatacatcttctgaattttgtgtcccatcatcagaccagaagtcccaattagggtttttcacagaaggttacaaatccatggggcaagttcggtttccctcccatcccatcattgggctgctgacctttttccttgcttgaccaggatttgagtcctgtgatgtgctggcacttgccaggccagctcccatcctgcttccttcatgctggtcttgaaaacagaatgcttttctccctagcctttgctaagggagtacaaaggattcctgccaagtaggagatgcagaattttcatcatggctatggttctgaactaagtattttaaataaacaaacatgtagcacattgagaagagtgacatcagcggctctagtagaagatttagaatgaaagtgttgtgttgtaaaaaaaaaaaaaaaagaaagtgttgtgttattggtgtttttatgtttaccctgctgataccccacggggagcttctccaggcaggggtggagagaagggggcagagaaacaggcagccccctttccccttagtgtgtactctgagggtagaaacagggggcagcctcacccaggtgaatcggacgacctaccctgagccatctgccagagcctgtcttcaaactccttagtgcttttagtcgggtgcctctcccagttctgagcttagaccccacccatgaccacctatagtaactacaggttcattgatacttattctccctcccatgggcagcatcctcatgatttctttttatagtt

SEQ ID NO: 61947 - DNA, 1188 bp, Bovine  19866880682676
  misc_feature (1)..(1): n is a, c, g, or t
nacttcaagagatgtcttagggatatgtctgcttgccagaaacctggaagcagcttcctaatttgttcctgtggcctttttttttttgttttgctatcagtaggcaggtgtgcaacttctgtgtgtaaataaataattgaaaatggcaagcactcacggaatacatactatgtgctagaccttgttctatattcccctgaaaacatttaatcctcttaacaaccacaagtggatgatgcgaactagagcgcagagatgttgggtagcatacccccgacacaggcatgcaaccaacattacgtcacttacaagaaatggacctctgactcattcaggcccatcaggaaaacatttactttgagctatactttgtgcttccttccaaaagattcaaaataataaagtggtgctctcaggagacatatcattaaaaagacccaaggatgtggcaggatgggttagtagaaagaggctgggttcctgttaatgctgcccccacagactggctcaacagccccactgagtaatgtcacttcacactaacacccgctctcaggttctcgctagagatgcttcatgtttgtgcaggacttcagagtgaaccaggcaccctcctgctatcatcttacttgatgtgcttctcacctcaactcagtgaaataatcaccatgggtacattattcccatttcacagagaattcttattttttgaagagaaaggaaagagattaaagtgtaattttaggcaacagaaaagttggattatttctttgatttactctgagagttgtccaagaatgttaattgcagttttacacagaaagcatattttccctccttaactcaagccggaagccagcccagtccactccacgtccttcatcagcgaagggcagctattagtccgcctatgaaactgaagcgggcccttcttctggtggcggaactgtgaacccgagcttctgttgactcttcagaaaggtaaacagtttccctctgcacaggaggaaaggcgtttgccaaaagccctgccgtgaatagtcagctttatttctggagtgccttcctcacaaaatcctgatatttattaactcaaaataaaacaagaactatgaaaacaaacctgagacactggatgatgaataaataacactggtgttcatactttcctagggactgaaagaaata

SEQ ID NO: 61948 - DNA, 951 bp, Bovine  19866880761520
  misc_feature (1)..(1): n is a, c, g, or t
nttattattgtcattcatgtatttaactcctgttggccttcattttttcttgcattttcttgcattccatctgggatcattttcctcttgtctaaagaaccccccttcagcatttcttttaatatggggtctgctaacaacaatttttttctgatgcctttatgtttgaaggatattttcattgtgtttagacttctaagttgttgataatttctttcagcacttcaagatgtcattctattttcttcttgcttctgtggtttctgttgagaacttagttatcattgttgtagttcctttgaagatactatgcttttttatctggctcttcttatggcttattctttgtcattcggcagttttactatgatgtgactggtaatgtctttatcccacttggggtttgatattattcatctattttgaaaagttctcagacattatctgttcaaacaatgcttttgcctccatttcctctctcatctatttctgtacttctgaacgtccagtttcacttagaaatttgccagctcccatgtgtctctttcattcttttctctaattccttttttccctttggccctttggtctgaatattatctgtggatctatcgtgcagtaataatcttacttatttctatctaatttgctattaaactcatctgttgagttcttaattttgatcattatatttttcagttctggaatttatgcataattctctttttatggattttatttctctggtaagagtatcttttcatcttttttaaaaaacatattaatcccctctattatgactcaaatatttgtgtcacctatgaccttatttctattttctttctttctgtgatctgattccttggtatatctagtaagttttactgaatgccagacattttgtatgaaaaattgtaggggctgcagatgatgctattcttctctagagaa

SEQ ID NO: 61949 - DNA, 1268 bp, Bovine  19866880766972
  misc_feature (1)..(1): n is a, c, g, or t
ntttaatttttaatcaagtaaaaaaataaatatcagattctacatgtataccaaattggaaagaaatggaccatttcaacctaatacactgcctccttgcctgaagctgaagctgatttaattcaccatgacaaatgtagatgtatttattacatgtacactcatgctttgtatgaaagaaatccattcttttacttagtcttttttttccatgttctatatccagtttgagctgtgaaatgtctaagttcatagcagtagcaagttgatgatgtgcataatgggttattgtccataaatggaatactatgatttttttttaatgaagtattttgggtggtaaaccacaaactgggtggtattgagattaccacttgtttgcatagtatataaaaattttattggcctattgattgacatgtgtttcagacattaggaagagtcagttaatttcttgttgatatgccagaacctttacaggaactttgtttttccccttaatttgtgttggtttgattctttgtataatgaccttcatctggtattatgtttttcggtgatgagaacctttatagcatgttcaaaggaaactaagctagacaaagaaaaggtcagctggcccaagatgcctatctgtaattggagttaagtgagaatatgatttttcaagccaagtcaaataagaagcaattagctcacagtcgtctgttgcttcttgttttccaagattaatgaaatcatacttggagccatttgtttaagtgtgttcagttcctgttcctctgtcgaccaatcctctgtagcacattaaaataataccagtgttacttttttccaatgtctatttcccctccatacatgtactataaatttagcaactttcatagagatacagttggtattgtgtgtgcatttagcagctctgataaagctcagagcccacagtgaggagtgactgtacgtgaacattctcccacgtatctggtttcttagacctgaggaactgctttcccagctgcgagtgaaactaccagctgtgccactgacacactggataggcgacaggctatagctgcttccatccccaaatgaggtatttgatttaaatgttatggtttctgattcacattttgagtgcccttaaaatctatgtcaaaattatgctgtgtattatcagaatttttgtatttatttttgaattatcagctttgtattttttttcctccactttgggggattctccaaagcttgaaaacagtttttctttt

SEQ ID NO: 61950 - DNA, 1683 bp, Bovine  19866880807922
  misc_feature (1)..(1): n is a, c, g, or t
ntccttattcccccaagggattgtaatgggaaagacagccaacaaacacaagttgaaatcaagtaaaatattgatgaaattaggtctgtgaaatcagtgggaagtgccataaaagtacagaggaagcactgaacattaccccagccactcttagactcattgcccacatttcatcactggttatgcaaaggaaatgcaacctcttctacttaactccacgcatgtgtgtttgaaggagaaaccatcagaatattcctgctggagaacaatgaggtccctaaactgcaaatattttatacgccaactgcagagcattattggatgcctatggatgaataaaataaagtgagccttagtttacgacctaatctcacttccatgctttgagagaaggaagtgtggttgtggaaagaaagctcctggggtcagagagcagatctgcattgtgagatgacacaagcaggttcacgcaggccagctaagcacgggatcttcgtctgtgaatgcatgtctgtgaggtcccccccccaaatctcaaataagtggattggtcaggccagcctgactatcattatagcttaggaacttttctaacttctgaatttcctaggtgtatcatataggagaaaactttggtaactgctgagctccactttattgaaggggataaaaatattgttttaataatttgtctctgtgcaaaaattatcaacagtgaaattttaggaatgtactttgtgtagagcagcattggaaatcatttggccacaggctgatcaaccaggaaaaaaactttactatgcaatgttaatttaccatagccagttttcttcctcttcttcttgaaaatggtaaatttttttagcattttctgaatcttagaaaatgtcattctatattcactcaaaaacccatgctaacacccaacaaattcttcttccctgcctagtaactttagtgaatatgcaaaatatatattcatctaatttaccaacctttatggcaacttttgtatcacaatataacattgaacataatttttcttatcgaattgctgatcttgacattgtttaaagcctttcatgatttcaggagagtcggtggctccaaatacaatccaaatacaactccaaatacaattacagtgcagacagagcaacaattccttgcatcttgtatggcagtggtccccagccttttaggcaccaggggatgattttgtggaggacaattttccgctgattggggtcgtaggtgctttcgggatgactcaagcacattgcatttattgtgcattttatttctactattattacatcagctccacctcagatcatcaggcatgagaccctggaggtggggaccactgttgtaaggcattaggttgaatgcaacatttcctcccagctgttttcaaagaatcacaacccaggtggccaaagatctgttaggaaaaatgcctcaggccaaagactgcaaaaaggagacttgcatggcttggttttgcaaatataagctttgtgggttttagagttggaagagagctcaaagaggaaaccagcaagtgcagctttcagtttctaggaaggaaggactctgctaaaccctggacgtgctatttcagttcaaggataggagaaaattaaattttgcaaagttgatgtcttttaaagtgagtttaat

SEQ ID NO: 61951 - DNA, 1709 bp, Bovine  19866880815121
  misc_feature (1)..(1): n is a, c, g, or t
naagattggtttggaaaaaattgtactgagaacatggcaaaggttaaaaatggtggcgcaggaagtctaccatcaccagattttcttttcaatatttataacttcccagctcaatgtgaaaagtgcagaaaagcataaagtaaaaaataatccttctaatctcatcaatctgtcaacattttggtgtattatatatacatttatatttcactataaaatatgttcatgtatgcacatatataattctgagagcttacatatacatattataaagttcttttcagttatatttttgtgtgttgtaaaaagtttttaaaattcatgatttttaattactgcatatatttaatcctatggatatatcataattcatccaactattcctttattgttgaaaattcaggctgactcattttttttctttttgctattctaaatcatgctgttatgaacattttgtatataaatctgtgacccctaaggctttcattttgcattaaactatgttccagagttcttgctgagtgagaggttagaagaaacagcttcaaggacttaataaggaagttgtagaaagtttaataaaacaactgtcctgaattggggatgggccatgtggccttttatttcgcttttttgttcttgtctggaaacagtgatttcccactctaagagttggggcagcaggccgagcccagctctcacggcaccagtgagataccctgtctgcgtcccctctgcagccagtggatgggctgtgacttgcccgatgtttctgcctaggtccgaccaggatctagtggtgcagagaggcaaggccaaggagaatctgttctggtggcagaggaaccactggcagaatctggcatccaggaccgggggccagctacaccattcactgtccagcggtggtggtggcactgcccctccaaaccagccctgaggttctagctgctcggctcccccgcttgtccctccatgcttactaatcctccttcattagctttcccagtaactctcagcactctcaacagtctttcactgaattctttttctgtttcagccagccagagaggatttttatggttcgttaacaaagaacctgatcggtctggaaaaagacaaaggttttgagagcagcaaactcagagtgagagaaggaacagttcacgtcagaacagtcgcaggatttccgcgggcagggctccgagcgctggcccgtgtgcacaggaagaggcagagtgagacatgggtgaggatgcagaggtggaaaaggtcagggtgagtgctctggcatagggaaaggacactctcaagtcctcatctcaggagcagaggagggcaggagcagtggaataaaagcctcagaaaactggagagagaagcatctgagagtaatcaagaggataagggagaaaatgcagtcagagggcaggtggtctgtaacacgtagaggatatcgtcagaggaccggaaggccgggggcgggagtacagcctgagcaaaggcagtgctgagtgttggtgctcactggaggtggacagccaagaggaactggatgcagagcagatgggatgacgtgtctgcttggctcacactgtggtacactgcatttcttcttttttatgtatatttaatcatctgagtagtaacagttcaataggaacatgtaaacatcaagacccacatgaaataaccaaagaaagcca

SEQ ID NO: 61952 - DNA, 999 bp, Bovine  19866880822965
  misc_feature (1)..(1): n is a, c, g, or t
nttgccctaggacatcgcccacatgtccacctgtctcctatgtgtaatgtgctcctcaagtgtacctgcttacgtcattctgcctgggacctgggtattcactgtctgccaactgcacagctgggtcttagtaatagtagacactgctaagcctgtgataaccagaatcattgtgtgtgccagtgaggaaataaaataagcagacccacagcaaacggctcctaatatctcaattaattctagtgacaaagaaatggtgagtctgaattcggtctcaaactctcataaccagtttatatcttgggtgttttgaacccagtctgtttagaaggtttgttcacagaaactgaactataatccttagaaaataaatattaattttaaaagtcatttagaaatagtaatattttatacaaccaatgtatatcagccatgaatataagctctggaccacgttcccaagtctctaagataacaaaaaatagactgtgaggtttagatcactgtgccttttgtgcccgtcttacaggtgggaaaaagtaaaatccagagaaaccaaatggcttacatagctgcatccatgcacacacaacacatacattgcttctcactggaaggagcacgtgccacttttccatgaccacttttgattttaagacttggctaattcacaaggcctcaaaatccagtctgctttgctcttggattaactgtgctatttgaactaaaggcttaacttgttcttaatcatcttttggaaatgctgacttagagaattagtgcctggcccaacaggccccaggcacagatgaagcaaagacccagcacacacacttttccagcaacacagagtgcttggatgggagatctgggaaccagattgtcagggcgcctgtgttagagtcagcaaaccagggttagagatcaaagcaaagacaaggataatggaggttatctggggagtcatcagatatgatacgatcagagccaagactttag

SEQ ID NO: 61953 - DNA, 3825 bp, Bovine  19866880895208
  misc_feature (1)..(1): n is a, c, g, or t
nagtccttactgcttgtgcccaaggtggatcttctcattgccttgcctttgagatgactcagctctcacttaacagagcattctatcaggaatcttgaaatatgggtagggaatcactgacttttttatatattagataatttgattattttatgtactgtgtatctcctccataaagacagggatacatgtctgctttactcacagtcgtgtcccaaacatctagaccagcatcaggcacacagaaagtgcacaacgtgtactggattaaactgaacagtctctactaattctcagctattattactctatggatagattgtcatctgcattgaattaaccacagttctctccaaagagctataccaaagatccagcaaaccacttcttcagttttcagagcctcagaattgagaattcctgtccccaaccacagcgtcctgtgtcccttcccacaaccatagggctgtctaagctgattctccaagtttgctccaagaatgccccttctgggagacagtaataaacttttctgcaaaaggaggcaggaggaagaggccccttgattaaaatatttttggaaattttttattaaacaaaattaagggagaattattttgcttttttttcccactgtaacacttctcaggatctatgttatattgtcacagtgactctcccatattgtataatatgtagggtttctggaacttatttgcttttaattatgagattttctgagaaattctaaactgcagtgaaatggtcttctaatttccaagcacaatggactcttaatataaacatggatatgataaaaagcctcatggaacagttgtaagaactaaaaaaaacaatccacaggcagcacactgaacagtacctgacatatgatcaacactcagtaaatgctggctattgtccatgtaacttcctacatggttaccttaatctgaagaactcacagcaattttctcatgtcattttataaatggacaaaccaaagcatagaggaaaaaaatttgttgtaagataaatataagaaatattaacccagtgaagcagtgaaaatatagttttcccacaagtcttaacataataccttatagttatgcttatcacagttgtgttccccttgacctagggaaagacataaaatgccaaaataaatagggtccatcttctctgaagtaccagttttgcttcaagatttggggatcaaaaaatgaataacttaatttgtaagtaaatttaaataaatatatattttttaaaagaaaatttttcagaataaaatgaaaacttatgaaattcaaagaaaaacgtgaacactcaaaatatttcctgctgcaggaggcagctttgagcagagccccagcagccctgcaccatcctcgcccttcccctgacatgaggggtacactgacagaaggcctgagaggcactgccccaaactgagccctatgcacaaacgaagcagggagaacagaacatgtgctatcaaatatgattcacgattcaaatatatttcaatatcttattctcttcacactctgagaaaccatctgataatgtgattgttttgtaaaactcttcagataatggaaggattttatagctgttgcatagatttaataagcaaaagactagctagcatgaactaagttcaacccaaaccactgttcaatttaattcagcacaatattcctctgcttaaagtgcatgtaattgccaatttatatagttgccaaaaccaaagatttgttaaatagagttctgccaacaaatagagtatgaaaaagtttatccccaactaccatacaccaagaatgaatgaaacccatcactaatcaatcatgtatcctattcattccaagagcttctttcaactgtatgattattcaatgagtaaaatcaaacctacttatgttagtgtttctctgtatcttttcactataaagtttttaaaaatccttacaaagtgaagagaacatgtaaaatgaaattgacattatcttaaacagtattagattgttattccctactcttttataaagagtagggaataacaatggagagttcctttatggagactgattcttaaatagcactgattttcctgaaactctccaaatgctctcttctacttaaagttcttattgaagggatgaacaatatatagcactgctttgtgggtgtgggtttcaattaaagacattatactgtagaaattcactctgcaactttctttttttcaagttgagatttttgagatgcatacggccacatatagacagatctattgccactgacttaaagaaagcactgagcattcatgatagaagttgtttctagggagctgagaaggggacaaagacagggtgaggcagacaaaaagcatgtaagctgtgttaagtattgaagtattgccattcctgacaaaatggcaacaattgttaattgtggatgattacttccttgtgcttttctgaatttttaaatatctcaaatttaagtaaacgcactgggttagccaaaaagttcattccagttttcccctaacatcttatgaaaaaccagaatgaactttttagccaacccaatactaaagattttaaaacacattcttcttttgttacctaataaaaaaacattttcctttttttttttttttttttttgagcagggggctgctcgggatctttgctgcagtgtgtgggctcttcacagaggcatgtgagcttttctccagctgcagcccatgggcttcttgtcatagtgtgagagttttcctgttgtgctgggactcaatacgtgtgaatttttcctattttttataagaaaacctgggtttactgtagagcacagggaactctgctcagtgttatgcggcagtctggatgggaaaggagtctgggggagaatggatacatatacatgtatggctgagtccctctgctgttcaccagaaactatcacaacattgtgatataatcggctatatcccaatacaagtaaaaaaaaaaaaaaaaatctgggtctacaagatggcagagcccttgattcagcttccctccttccgtcctttcctagctgctggtgaatacggtagtaaaaaggcaaagatctatcttccgtttacactccagagtggtagacttgacaatgaacaaattaaataagcaatgatctgatattttagaaagtgataaataccatagaaaggtacagagacagaacactagaggtaggggtggtcaagaaggcatcactgcaaaggtaacagctgagaggctgagaaagagaaggtgtgagccatgtggcaatctaggaataaaaacattccaggcagaggatcaggaaaagccataaatatgctaagtaaaacattttgacctttaaactgattggttagaaatgatgtattttaaggacaggagccaaccaaaactgtatagattgatactggtaaggatatgctgtaagtcccacctctgtggggaactctctacatcctttcagtgtctatgctgagagctttgtaccttccttctgtttaacaaatcctattcactcgcaaaaaaacaaacattccaggcaaagggaaagcaagtgcaaagaccctgaggtgggagtgtgcgcagagtgctcaaaacagcaaggaggccagagaagccggaatgaaataagcaaggggcgtgtagcaggaaatgacgtcagatgtgtactatgcaagatggcgaaggttatcgtgggggaggtggcagaagggaagctcagtcgcacaggaaattgtaaagtcaccgtaaatttttgtaaagtctg

SEQ ID NO: 61954 - DNA, 936 bp, Bovine  19866880935289
  misc_feature (1)..(1): n is a, c, g, or t
ntattcctcattgctttagcaaaagaagtgtcctctccgttttcccagggaagattgtccagtgctagcttttcttgatcacacataataaatttattctaatatttttacctccttgaatcattggcatttttcctcaatactatgtcaaggcagttccagcatccccatctcatttatgttaatagtaggctcttaatgcacaagcttcaaagagtcatcttagcagcactatgtgagatgggctccttgtgttcttgccagaacactgagctctaagtcatggaggagtgctcccatgtcaataaactatactccaccgagctttatatccccaccaaccaccaccatccctgatccagtatcctcaagatccttgtacacgtgtcctcctgaaatattcatattcaccaggtcctgaaatttctttggcatgtaggctacttcctcccagaataggaactgtatttctgctctgggactatgctgagctcttaccatagttaccagtctgaaggcaatgagggaaataggtcagatcttgagggaaaaaagtataaccttaagaggaatctgcctcagttgagattttttttttcaagtgtctccagacaagggaatgttgatttcatttaccaagttcaagaactagcgaagagagggttggcaccagttgccactaaggaaaaaaccagtctatcccatttactatagatctgtgagaagttggttctgctccacagtacattggggcatggacatcttataatcctggtaagatttgtgcaatgtgggaaattaaaaaaaaaaggatataggacttccttggtggtccagtggttaagaatcgtcctgccaacgcgggagacatgggttcaatccctggttcaggggagattccacccgccacagtgcccatgtgccacaaccactgag

SEQ ID NO: 61955 - DNA, 1003 bp, Bovine  19866880986145
  misc_feature (1)..(1): n is a, c, g, or t
nctcctgttagtctgaggctctgggagtacagtacaattggaaattgttgtattccaaggtactcaataaataatttgtgaataaatgggttcttggctgtccaggaaggaaaagacaagaaccaccctaaaaatgggctttcccggtggctcagactgtaaagaatctgcctgtaatgcaggaggcccaggttcgatccctgggtcaagaagatcccctggagaaaagaatggcaacccactccagtattgttgcctggagaattccatggacagagaagcctagcaggctacagtccatggggtcgcaaagagtgggtcacgactgagagactaacactttcactttttcaccttaaaaatagagagagccctcaaaggctaattgatggagaatgagctaaagatttgtttgagctgttccctcaaatccaaaatctgcttctgaagcattttctgctatgccattatactttacagtgagtataaggaaacatgcaatggatcttccagagttactgatgcagcaaccaaagtcttgaatggtttcatttctgccttgatctccaaacttaatctgtttgccttctctttggctccttatctcttacctcatatcctgcttataggcttatatatagtgtgcttcatatttggtaaatctcctctcaacgtgatcttggcttgcctttccaaccattactcacattttaagtatcatgtggtgcatatattctacatgccaggcacacaggacttctctaactcaggcctataggacttaaccatttagtcctcattcaagcctcacaataatgttataagagatttcctttccttggtcccacttcacagttgataaaatgaagacttaaagaggttaagtaacttgacaaagaaacagaacaaatggcaaagctgagatgtgagagaagaaagtctgatatcagaaatcaagtttctaattgcataccactttatagtttctccagactacatctgt

SEQ ID NO: 61956 - DNA, 1329 bp, Bovine  19866881022604
  misc_feature (1)..(1): n is a, c, g, or t
ncaaaggattcagggaatcctgaattgaatactggcatctataccccattgactaccctgccaggctcctctgttcacggaattctccaggcaaaaatactggaataggtagcccattcccttttccaggagatcttcgcaacccagggattgaacccaagtctccttcactgcaggtggattctttaccatctgagccactaggaaagccccgggacacccatacacgtattctaaggcatgtggaatttacacattcagagatctgtggttggggccttactcccatgcagacaaccttcttagttttcctagagacaggagtcagaaaatatctgcataaaacattcttcctctcctacaaatcctcttaagtcaggaatcaaggatgtcaaagaaaaaaaaaaccttcaaaatttgggagcatttaaaaattttaagtactgtcatttaaaaagttatcttaaatgttttaagaaattttctgataaaatactacatgccaagaaacaaaatttcaagaaaaaattttttactgacattcaaattggtattatcacaaggaataaacccttcatttacagataaaagttaatatcacaactgttatttttgtttttaaattcaaagtcatctattacagcaattaataatataatatgtacaaagactataaaaaatatacacaaagcactaacttcagaaactgaaggaaatgccttataatttttgtttaataaacattcacaacattattccctgaaatgctttgatattttcctcacattatctcattaatatcagacatccaatttggtgacttaagtttccattacagaatttaatatacagcacatctcccttttttttttttttctttttggccatgtcacacagcacgtaggatcttagttcccaaccaggaaccagatcactggccctgcagtggaatcacagagtcttaaccactggaccaccaagggtgtcccataattttccatttacttgtctctgacattctataagctgccagctctgctagggtctctcctgttcactaataggtacatccttatctctgcctatggcacaagggagacaatcaatcaatatctactaaataaatgaacaaagacataatctgacttacgttatttatacctaattagaatctatttcttgcttaagataatgcttaaatatgacacaagttagtatttcatacaaaaaaggaggaagatgaaaagtacctttcaatgagcgtcccattttgaatcatccaaacgtcacagaatgttcgagacaccagcataacagcaataagtatca

SEQ ID NO: 61957 - DNA, 1520 bp, Bovine  19866881084583
  misc_feature (1)..(1): n is a, c, g, or t
ncaaatgatctctcagagaatggagacaccacccaggttcagacgatgctcatggccctagaaggtatgaccaaaacaaacggattccatacaaccatttacattggagctaagtacgcagaaaaacaagatgttctgatgaaggaaaattaaaagctggccaaagtgtaaccggtttgtagatgggagccaacaaatgggccaggcgagtagggaagacagcctgtaagacgaggaggcatctttgtgatccctaaatgcaaactgacaaacctttggatcagaccacaattagtctacaaatgggcaccaacaaaggagccaggcaggcaggaatgttagcactgggtacccaaagggacatctagaagctaacattacaacccgtgggcaactccacaatttttctacatgtaggtaccaacaaagtcgcttcccagaaaggaatgagtgtatggacttgggcagcaagagtacgtgctgctcccacagaacctgtcattcacaatggaagccaaggaacaggaaccaatgactcggaaatcagtgacagcgattatcaggcagaatacccagatgaatattcgtagtgagtactaagatgacgaccccagagattaccaatgtggtgagcaaggcactgattattagattcacagaggagctctgtgtttagcctattgcttttattcaatgagaaacaagctagccttgagtaatttttatcttgccgtccgaaaacactattatgttcattgtacctaacggaaatattgccttacgtgcattcctttttctgcctcttccctaaatagttgccttttagtattgtgacagttaaatcctacagcataaccaataactcgcatatgaagtgaaaaggaataatgtgaaaggggagtactcctgtacagtcaattcttttattaaacatctacacatttttacagtactctacttaaaccggtattttcaaacaataggaagcttttttctttacacttcagtatctggtttccacatggaagactaaactcacgcctatagctaactgtaggctaagttgtctgtgcacactcagtcgtgtctgactctgcaaccccgtggactgcagcccaccaggctcctctatctatgggattttccaagcaagaatactggactgggttgccatttccttctccatgggatgttcctgacccagggattgaattcaggtctcctgtgtctcctgcattggtaggtgggttctttaccactgagccactaactaactggtctttgccaactaaatttaagatgtgggactttagaaatttacatatcaatgattctacagtattgtttactcatttttaaataaagtcctgatccgtgtgtatgtgtggggggcgggggggacagaacagacctgtgtgaatagcagcttagtcaagaaaataaattagcaaagcctcccagagccctactcatgctgtttatgaccactaaccaccccccaccccaagggtaaccactgt

SEQ ID NO: 61958 - DNA, 1047 bp, Bovine  19866881109726
  misc_feature (1)..(1): n is a, c, g, or t
ncccatccttcctcctcctcacccatttctctcctctcctgaagtggtggtccctgcagtattcatagagccccagggtgggggtctatgaagcagtgaaagagggacatggaaagaacctgaatttactgacactgtgagggaacagcaactcagctttagggccctaaaggaccatgtggccaacacatcggtatatcaaaggttccactgctttcgtctttctaatccgtctatgtgtatcttagcttgattttcatgtatatgtattttatcacagtaaatatttgtaatgcatctcaatagcatcttcatagaataagttggtgtctggatgtgtacacagagttctaggggagacaggcttgtacattacactgtgacaagacattcacagggtctggcttgacttgctacgggacctaccattctgaaaggtgcaatagtattttactgtgctttatacatgcttgcttgatgtgatccaagtgaaagctaaacacactctaaaatgtatgccgagtgtcttaagaagagctttaaatatagggtttactacaagaagactacaatctcccccgaataatgaaaggttttcttaacaccatttataagacattaaacatagatggtctaattagtccctttacttctactggtacatttattaggaagaggggcaaaaattagaagtacttttctaagcgagtactgtgaacatttaaattataaaacagcctgctgacttacaaaaatactgctttgtgtaaatttgactaagggttattaaaatttcctaaattatcgacagaaaaataaaatacatatctagttttccaccggtttgaaagactcaggaggaaaaaaatctgaaattcaaacaatcacagtatataatttttctgatttttaaaggaatatttatagcttgaaagtgaaaggctggtgaaatacataaaaattagggaggcagtccttttcctatttcaggaaaattatagttcttgggagaagacattgaaaattagctctcagttgacacatatg

SEQ ID NO: 61959 - DNA, 1310 bp, Bovine  19866881177723
  misc_feature (1)..(1): n is a, c, g, or t
ntgcagttgctttactctacttttctttttattgagataaaatttacataaaataaaatgaactattttaaaatgtacaattcagtagcgtttagtacatagacagaattaagtagcacctgtattaggttccaaaacattttcataaagagttgctttattttaatgcctgagtatcatgaaaccacttagagtgttttacttttttttttttaaattgaaacgtagtgttttccagcagcctctggagactaaatgctatctttgtcatagtctgccttttaaatttctcatttccctccccccgaatcattgggtaaaacttacatttttaggctggcttttcctctttggtagcttgcttttcagtggtttctttttctcctggcctcctggtgtaattcttatattttgtagcatgaatacagcaaagcctcctggtcgtggatttctttttctagtgttagaaaaatcaactgtggaaagcttatcacttctctatatatggagcatgacatttgagattccacttataccaggagatgtaagcccagggtccttgctacaggatgaaaagggcaaactctgattttctctaagacacatggacaaataattataaaaatattcttccaaaggaccttataatcagggatgaggaaacttaggactaccctagatttactgagaaaaataaataaaaccctaaaaatttcaaacactgctgtggcttacagaataagatattttagcattattgcttagagcagtgaaaagggcccatttaggttagagagcttgagagctctgttaaaaacagcaagacattccctgctgataagacctctaaattatagaacgaacatatcgtgactgatcattccttttaagaaatgtgaatagcagatttataagtttcatatggttatgatgtcaaaatttccatattctgccgtaaagaatgaaatctgcagagggatcacctataaaattgcaaagggcagcaaattccatttgtgagcagaataccgttttgcattcttggttttcctgaagtcacacttaagccatttatgcaaatctttgacaaagcaacttttaaaaaatatttatagttgacagttcgtggaaacacatttgtgcttatgggctaaataattacttttctctaaagacaggtgtctcgtgctcaaatcagttgtgtccacatcttaaaagctccagatgctatatttcaaaagatttgcttatacaatacagtattttgtagataagtcttgttaggaagtcagtgcccagggctcagggga

SEQ ID NO: 61960 - DNA, 1338 bp, Bovine  19866881279194
  misc_feature (1)..(1): n is a, c, g, or t
ncagcaagggaaaaaaaaattctttttaggagcttacttaagcaaatacaacaggggagataatttcctgtagtcatgaagacagcgtatcagtattctgctggagagtctgtgtgtagcttcagagagggtagccagggagcagtgatgtttaagtggagacaaaggccagaagattcaagatacagagagaactggctggaggtcttgagcaagatggagaaggatgggcgtgggagaagtaggcagaggacagatcaggaaggtattgaaggctgcgaggagtttggcctcaaaagagtaacaatggtgatctgaggtcctgaaaaattctttcatacttattttctgaaaaataagtgaagtattgagatgacttaaaaatagaaattcttgagtgagttatctgataccttatccccaaaaatgacattaagtaggtggacccattttccagtcattctggataaataagcccctattatattataatgcttgttcaagtaaaattcttattacttaggggaggaatgtggtcaccataacaggaaaacatttttccactcttttttgtgtgtttagaattggccactctattagtttccatttctttctccaattttgcattttaaaatgcttggatcctgatcacagattttaaaaatattttgacctcacccagtcttttttctcaaaaagttttcaaagcaactgcattgtaaagtgatgcaagcactctttactttcagcttgaagcaggtataggtatgaattataggcattacagtcatacctcgaagatactatgagttcagttccagatcactgccataacgcaaatgttgcaataaagcaagtcacacaacttttttggtttcccagtgcatataaaggttatgtttatactacactgtagtctctgaagtgtgcactagcagtatgtctaaaaccacagtgcacatacattacttaaaaaaatactttattgctgagaaatgctggccaacatctgagcctttagtgaatcataatctttttgctggtggagggtcttgctttgacgtggatggctgcatactgatcaaggtggtgactgctgaaagctggggtggctttggcaatttcgtaaaataaaacaatgaaatctgccacacagattgactcttcctttcatgaacagtctctctgtagcatgcaatgctgtctgacagcattttgcccacagaagttttcaaattgaggtcaattctctcaaaccctgctgctgttttttcaactcagtttatgtgatttttgaaatcttttgctttcatttcaacattcttcacagcatcttaa

SEQ ID NO: 61961 - DNA, 1119 bp, Bovine  19866881339506
  misc_feature (1)..(1): n is a, c, g, or t
ntaatcctctataaaaaaaaaaacttgtaaaccttttattactgtacatacaatctgtacataaaggaaattatccaaggaaaactgctgagtagttttcagttcagcaagacagaaattttatacataggttcatgtaaaagaaattagggaaggatcatgaataaaatatcacttatctgcctgagagagggccttgacagaagtcaggaattatataattgctttgaattcaagccagtccttcctgtttaaaaaggatactcccttttcttttgaaaatgttaaccatttccaccactaccccccaattttatctgctgaaaagcttttgcaatccatcgtagcccaatggtatgttatagtctgtcactaatttctcaattaaagctataaaatatgaacatctattggcagaattttgcctcaatccagctccctgtgttgtttgtgccctggtgtctgccttgctttcagcccacttccaactaatgctggacctgatgagggacaagcgagtcccaggcttgtcttctaaagctggtttgagtctcagctgtctgatctttcataggtcacttaattgctctgcatttcagccaggttaaagtgggataattatgcagaatgccacacttaggctctgcacctggcaagtagtagcatccctgtgagtatcgagatctttcccttcccttctcaagctagagggcaaggactgaacctaagtgactcccgagactgcacccagcactagcaatcggtgcttctgagtatatggtgtgaggaaaacaagaggaaaaactactggattactaggacttaaaggcctccatgtaaacatttcagagtgttgaaaatacaatgaaaacaaaaaaagaccaagaagtcaggaaatcgtcaccttgaccattgggcccagagaacaggaaaactaaaagattcggtttcctcaactgaaagtagaatcagccaggaagctttggaaaacaatgtttggctagcctgacagtgatctttaacgatgatgcaaagaaggcacagcttaaccattcagattaaaaaaaataataataagtactgattttatctatgtatttatttatttaaaagaattat

SEQ ID NO: 61962 - DNA, 737 bp, Bovine  19866881427287
  misc_feature (1)..(1): n is a, c, g, or t
ncctgtccctcttctatccattgcggagatcttcttctgcctgatgatcatacttggaagcaatcttgttcttgacctcggccgaaagcccataggaagggcccttgttgaagtgggtcatgatgattcgcgcggcgggaagaggttgagttcgggtccgggggtttcttgcactcggtttccccgctcctgaccccgaagagtggccgcactacaagatgctcggagctcgctctcctgggcggcgcaggagtcgccgggaagcggcggcgggacgcgcgcggtgcctcggctactcggtcgaacgaggtcccccagacgctcccgctcggctctggagtcccgcacgaactctacttcatttttttgcacatgatgtctgtttttaccagcctcggttgttgaaaagactgttacttggcacacttgtcaaaaatcagttgacaaaaatcaaagtatgtaattattacttctggacattttgtataccattgatctatgtgtttatcctatatcagccccatgctgtcttgacttctgtagctttgtagtaatttccatatgaattttaggattagtttgtcagtttctgcaaagaaaccagcttggatcttcataagaattgtgttgaatttgtagttcagtttggggagtattgccatcttagcaatattaagttttctaatccatgaaaataggatgtttgttcactttttaaggtcttctctatttcctgt

SEQ ID NO: 61963 - DNA, 2350 bp, Bovine  19866881531482
  misc_feature (1)..(1): n is a, c, g, or t
ntcctatttttccccgataaaatttaactcacaactctcaaaaaaaaaaaaaaaaagtattttattttttaaatagaaaatccatggtcatggtccaaaacccaaaagataagagaaggatatttagtgacaaatcttctgctgcctcatcctcaaccagtgttctccccagtacttttcttcattgttactagtttcttttattccgaccagagattgtgtgtgtgtgtatgagtgtgtgagtgtacgagtgtgtcttaatttaggctaccctagaaacagaccttgacataaggattgaaatgcggctatttatctgggaagtgctcccaggaaacttctgcagggactggggcatgaagactggggagggaaggcagccaataaagggaagatcatgttgtaaatcccaccatagacaaacagaacataagttcactggggaactctgggagccagcataggacacgtggcccactattatttctcccaaagggaaatgaagctggtgttttataaccaactgcattgtttgaggtctgtggggtgtgggcaaccagccatgtggccaggctcaatgaacccgggtgggcagaaaaagttcttggtcagcgcaagagctggcactttggagcatgcaggtatggcctgaaatgttaaggagcaggaggtatctgtatagcctctgctacaacattctcctaaaaacatttagaaagaagttgaccaaacatttgcagcaattttggctcagtccctcaaatgccaggcttccacagggcctggtctgaaggctgttggcattcatgggagcatcaaatgaagctttccagggtgtggctcccatcagtgattcctggttctcgttctcaccttgctgctgctgctgctgctaagtcgcttcagtcatgtcccactctgtgcgaccccgtagacagcagcccaccaggcttccacgtccctgggattctccaggcaagaacactggagtgggttgccatttccttctccaatgcataaaagtgaaaagtaaaagtgaagtcgctcagtcgtgtccgactctagcgaccccatggactgcagcctaccaggctcctccgtccatgggattttccaggcaaaagtactggagtggggtgccattgcgttctcaccttaatcacagtcaaattctaacccaatgatagaagccatctgcactgacaggcctcggatatcatgtagcactacctcctgctctcttgacctgggagcaccctttccttcctctttcttgcctgatgccacttattctccagattcaggtgaatagaaagaattaattttcctttggggttagtagggggctcactgaggcattttagcccagagtctgagagacactatgctctcaggaatgattatctttccacctccccatctgtcagatgccttggggaatattccttgtcaccctcgagctcaactgggagtccactctgctcactgtcctagcaccctgggcttacctactggaatggtctgcttgcccgtctgtctcccccagtggtaccaggagcttctttagggcaggaagcaggctttgctcacctctgaatccctgtggttggcagtagggctcagtaaatgcttctgagtagaattcacctgagggcactgcaccacgccccttctttgcagcatttgtaggcatcctgagggagaaattgctgcacacagggtggcccttgcatgtgtgttaggtggccttatgtaaggtacacatatgtaacggaggttgctgtctccttcctggggagagacctgtagacctgctccttaatttgcatgcaagattgtttctgctctttcttttttgtatttgtttaatggataggcaggccctctgtccataaatatttccggagtccctactatgtgttgggcgctgttctaggggacggagatagaggggtgccacatgaccgaaagagagtctacctcaaagaacttactctcctgtggaagatgtagaattcatttggactagccttctgttgccgtcagaatctgaagaatctggaagaaggggagctcctctgggactgggtgatgaaaatctcaggcagttgtaagtaaaggcaagggaggcagacaccccagtaggaggagggaaccaaaggaggtcaaggacagctgtcatttagaagcatactgagcatgtctgtgttcagcatatggatgtcataaagagataaaagccccagtccgttcctgtaaagatctgctgtctatggtgggaaagtcacattaatcctgaggattatctactggtggggaccatctaggcaacaatttttaaagactttca

SEQ ID NO: 61964 - DNA, 848 bp, Bovine  19866881545564
  misc_feature (1)..(1): n is a, c, g, or t
nttatgtaacttgctctgagcctgcttttcgatttatattttaaggattaaacaagcaaagggaagtaagaaattcgaggcagcccactgcaaatttcatctgcctgagaagtggggtgccagatttttaaaaattatttgcaagactgggttaaaaatatcaagcctatataataaatcatcttcaaatcacttttgttaccaatcattttataacttttgaatttggcattttggggagaggaaaggagagaacctgatttgatcttaactggatgcttattgtttttgtctctaggacacccagagacctgttttctaaatctgagtggtttattctatcttttccaaagttgggtaaaatgactatggtttctttactagctcccctaaagagataagtacaatgtaggaaaatggtataggctgtgtgttttctgcttccagggtccttcctgtgtgtttataatttgaattccttcaactacacccagattccaaatgcagacttgctgtgccccaggctaccagttcccccaaggtaagagctttcaaacgttttccttatccattaacaaaacttattgggtacttggtgagagtctcttactcttctccataagaagcaggccttggggggcaaggccagatggtcaacacaccttttttctcagtgagaatagaaaacaggtccttctcgagaacatcactcagcaagctgctttcacagtcttattcatccctatcgactagggcaatccctggcacagaggagggctcctgtaattaaagctctcagggtgaagcagtagttgccctgccgtgattaatggctcacatgtgagcca

SEQ ID NO: 61965 - DNA, 1002 bp, Bovine  19866881626833
  misc_feature (1)..(1): n is a, c, g, or t
naatacactgttagcctttcacttcctgtgtgtcatgaacgggaatctgttttagcttgatccatattttctccctctcagtcccagcttccctccatgtgttgttcatcgttttgtatgacacctccttaatcacaacagttttattagttactgaagctcaaatggttaggtttgtcagtgagctccagtgaaggtaatttactgcaggtcacagatatggtctgaatgaataattaataagaaggaaccagcagctttgggtgctttagtgtgaaacttctaaagttaggtaacttgtatttcagattgcttccaagtatgatcatcaggcagaagaagatctccgcaattggatagaagaggtgacaggcatgagcattggcgccaacttccagctgggcttgaaagatggcattatcctctgcgagtaagtcttggccctgacgtggctgctcttccagtcctcccagggtcacctcccagggtcacctctgtcatgccctctttcccagtccagggtggcaaaccttgatattctgcaaatgtttttaatgctttcctttactgatgttgaaaggaccaactttacattccagtcctggtttgttccaataagtatgctgtcacttaatgcttttcttttcagactcataaacaagctacagccaggctcagtgaagaaggtcaatgagtcctcattaaactggcctcaggtaacagccaaaccagcaacccctgattctagttggttactctttatgcagcaagaacttgattacagtttttagacattttagtggaaatctgtgtacatgactatatttagttctctgatagtgttacttttcaaatgtttccataattacttagaattagttctgtgactcttagatatttagcttagaagttttcctattctgtatttagtctgtgtactctcaggagtcgacacagcttacacagagaaagacaacctagaccacaagagaataaggggaa

SEQ ID NO: 61966 - DNA, 854 bp, Bovine  19866882026992
  misc_feature (1)..(1): n is a, c, g, or t
naaatgctttaaaaatttgtgctgccattaattcccaattcagccttcactccctcaacaagaataactagaattccagtgtcttctctttattattttgactccaataagatgtcactttttagatccatgcttgccctcaagacttgacctgagtatgcaactgggcttcccaggtggctcagatgataaagaatctgcctgcaatacaggagacctggatttgatccatgggttgggaagaatctctggagaaggaaatggcaatccactccaatattcttgcctggagaacatggacagaggagcctgacaggctacagtccatggggtcacaaagaatcgaatacagctgagcaactaacactgactgactgaaatcttcaacaattcagatttctgctcaaaagagcaacaaaaacaattctaaagtatcattacgaatccacatgtaaaactttccccgtttactaaaagcacatacctatgcccaaatggctggactctgtcaaactctgaccaagtcaccaacacagaggtgggaatgggagggtggggaaactaacattgtgtgagaacagaaaagttgggaaaaatccaacctttccttatttggcaggccagaaataccacgagaacagctgttttcctggtgttttggtttccactggcattcataaccaaatgtgcatggaaataaaaaccagggagaagaaaaaccccgaggcacaaaagccccacagttttctgtcttttgagctgagatttaggtcagtttgcccgtttctcactattaagcatgaatgcacacacaggcacatgcaactacttccccgacaccatccaggagacac

SEQ ID NO: 61967 - DNA, 1573 bp, Bovine  19866880240148
  misc_feature (1)..(1): n is a, c, g, or t
ncatcaggcccccaagaccgggaggcaccttccggcctgtgtgccttcttccagtttgcagggtctgccaagtgctgccctgcaggatccctctcacacactctccgcttctcatcctgcttttagggggaccagaagcaagaagacacacagtactgtcaggaaattgaagaaaggccctcagggctgcctggagcagaaagggagaggcggagcccggcatgagatgaagctggagaggaaagcgggaccaggggctcagcagtttagagatgttagaccttctgccgagagcacagaaaagccttccaagtgtcacaagcaaatgggtgacacgattagacttgcctgttgaggtccttgtagctatagtgtagaaaagcagaggggcccagagttgatgaggaggggcagggtggggccagaaggcctggcctgagggaacgacagtggacacaggaaaggtgaccggactttagaactacttaggaggttatgatatgtgagttataaaggatatcggagaaggcaatggcaccccactccagtactcttgcctggaaaatcccatggacggaggagcctggtgggctgcagtccatgtggtcgctaagagtcggacatgactgagcgacttcactttcacttttcactttcatgcattggagaaggaaatggcaacccactccagagttcttgcctggagcatcccagggacgggggagcctggtaggctaccgtctatggggtcacacagagtcggacacgactgaagtgacttagcatagcatcaagatttaattgcttgttagaacataccttaaaactctacagaaaaaaaaaaaaacaaaaaacaactccattgaggaaaataacagaatcctgagtctccacaacttgtcatccacactgaccagaattcattaaaaaccgttagacctgggaaacgggaaaatacccataatcaaaagaaaaaaacagtcagtagaagatgattaatggatgattcagatgttagaattagcagatatggacttaaaatatttactataagtatgtttttaaaatacattggaaaagatggatgtgtgggggacaatatggtatattttagttgaaatatcaaagacctaaatgggaattctaaaactgaaaaatacaaaatatgaaatgaataattcattggatggattaacagaagactcagtactgctgaaaaaataatcagtgaacttgtagatctccaaacattattcaaactgacaaataaagagtaaatattgcatgactccatttaataaaattctagaaaatgtaacctaatctatggtgctaaaaagcagatcagcagctgcctgggatgatgtgggagtgatagggaggacaagagggccaattataaaggagtgcaagaaaatttttgacggtgacaggcaagtttattatcttgattatgatgatggctcctggtgtgtgtgtgtgtgtatgttaaacttatcaagttgaatattttaaatatgtataacttactgaatgtcaatcatgcctcagtaaagctgtttttaaattaaat

SEQ ID NO: 61968 - DNA, 2471 bp, Bovine  19866880540085
  misc_feature (1)..(1): n is a, c, g, or t
ntctccccaacacaccaataatcaaggatgcagtggcttatgatgggaacaaggaaagctttggaagactgaagttgtgaaagaatgggctacaacttctttttcccaatcatgcctgatgacctgacattataaaactcctagaagcactagataaaatataacaaacttaaaaataatatactgtttgcacttccctggtggtccagtggttaaggatctgcgtgccaatgcaggggacacgggtttgatccctggtccaggaagatcccccatgccatggggcaactaagcctgtgtaccacaactgctgaccccacgagtacctagaatctgtgctttgcaacaagagaagccatcgcaatgagatgcctgcacaccacaactagagagtagcccctgctcgctgcaactagaaaaagctggagtgcagtagtgaaggcccagtgttcagttcagtttagtcactcagtcgtgtccgactctttgcaaccccacgaactgcagcacgtcaggcctccctgtccatcaccaactcccggagtccacccaaacccatgtccattgagtcagtgatgaaatacaaccatctcatcctctgtcgtccccttctcctcctgccctcaatcttttccagcatcagggtcttttcaaatgagtcagctctttgcatcaggtggccacagtattggagtttcagcttcaacatcagtcctaccaatgaatatacaggactgatctcctttaggatggactggttggatctccttgcagtccaagggactctcaagagtcttctccaacaccacagttcaaaagcatcaattctttggcgctcagccttctttatagtccaactctcacatccatacgtgaccactagaaaaaccatagccttgactagatggacctttgttgacaaaataatgtctctgttttttaatatgctgtctaggggtcattcaatattataaattagcactgtagctctgtaatagcattgagaagtcatttaatgacatgaaataattttcagatgaagaaattaaagccattgtttttcaataagtctttttctaaaaggagaaatgggagtcttttcttaacagaaattagttttcctttgtaagatgtttataaattcaaatattttgcatattgatataaaatatttttaaaataattgaaaatttacctatgatgaggaattgcttcacaatttcttcaagtaggcaaatacccttttgactttataatgtgatctgagtttacaaaatgacaacagttttctaaatttaatagatttctctctgtctgcctccacgatccccacccccaccatatattctctaccctgcctctctgcccccagggctggtcctacagatgcatcaccagggcttctttaaatttacatttctagctgagtttggccagtggtgggtcagagtaaggaggagaaaggatgggttatttcttcttctaccccctcaaggccctggctccttgattttggtcttattctccctctaaaattatagttcctttcagtaacttctgtggctccaattttcatcagactcctactgtttcctctcctgctttttcagacccagatcttcttcttctttttttttcccatacaagaatgtatgtttattgcaaagaaagagagagagaaggagagtccaagagagattagaagcctagtatataaggttaagaatttaaaagcatcttacattttgccctaatagcaacagatttaataggaacaaagacttgtgttactttctggtatcagctctctgtaaacttgatgagaaaattttgtgaaatatagtatggaggaagaaagcttgaggggtcttcattgcagatcatgcaggcaccactacatgtgactcctaacatggggattgtcagtggctgggccagaagacaacttcccttctgactggatgggcactttaagatttccatattgtctctaatataacaaatgagttgcatgaaatctgccttgcatatcaagtggccccccaaatataataccattgatgagattgcattgcattactgctttcacagtctcacactaggcagggactctgaggctgagatttgatcttgatggttctagtctataccttccactgtgctttcttagcacgcttcaatattccttattggtttctttcctcatctctgtaatttctttcttcactaaataatttttaaaacctcaccttagttaccttgcattttcggcaggaatctgatgaatgcagtaacacaactcaggaatggaatcagagagatgaagtttctattaaacagctaatgagtgatagccagtagaaacagacctgggggcaagtgtagctacattttgtgtattttatcttcattctgtgaggcccttggtatagactttccgataaaacctgacagtagttcctgattattct

SEQ ID NO: 61969 - DNA, 2096 bp, Bovine  19866880917942
  misc_feature (1)..(1): n is a, c, g, or t
nccccagctggccttcctcctgcttcagggttcctctgggcctccactcaccctgctgagccctcatcctggtgtgccagaggcaatgcggattccagtctgaggctgggctaggagaccccacaggctggccactctactctggggaggtggagagggagggagagcagcagggttcctcttcacctgcaaataggaacacagggtgtttcttggcggctgcaaggatgatgatgaaacccccaggatattgagtcattgtgctggccagctgatagcgagcactgacccccgcgcaattgcacaggggtcagagagctggagaaacgtctctcaggtccacggcccaagcagcccatgggatttcctaacctgagccatccctctccccttccttctctctctccctcctggctccctctctccctccctccctctccctcctggtcctctccctctgccctgaccactgccttggggtcacctggagaggccgctgcttcttgccacccggcctcctcccccatagtgtctgccctcctggcgccagtcttgggcatggagtttgtcctgggcctggtggggaacagcctggccttcttcatcttctgcttgcgcacgcggccctggacgtccaacaccgtgttcctggtcagcctggtggtcgccgacttcctcctgatcctcaacctgccccttcgcgtggattactacttcttccacgagatctggcgctttggggacaccgcctgcaaagtcaacctgttcatgatcgccaccaaccgcacggccagcgtggtcttcctcacggccgtggcgctcaaccgctacttgaaggtggcgtggccacaccatgcgctgagcagggcctcagctgggggcgctgcccgcgtggccgggggtctctggggggcactcctgctcctcaacgggcacctgctcctgaccacccactccagccggtcctgcctcagttaccagctgggcacgagaccctcggcctcactcagctggcaccaggccctgttcgtggtggaattcttcctgccgctggcgctcatcctctttgccgtcgtgagcatcacgcgcaccatccgccgccgcggcctggacgggcaggcgggcccgcggagggccgtgcgcgtcctcgccgccgtggtgggcgtctacaccgtctgcttcctgcctagcgtggccttcggcgtcgcttccgtcgtggccttccgcctgcgtgcctgccacgccctggatatctgctcgcagctcttccacggctccctggccttcacctacctcaacagcgtgctagaccccgtgctctactgtttctccagccccagcttcttccgccaggggcgggccctgctgggcctcacccagggctggcaaggctcagacagcgacaagagcacctaccgtgcctggcgcagggcgcgctctgggaaggtggcggccacagggaagctgcaggtggacgtctcagaggaggactgaccaggaaggcccctcccagaactggggctctgctgcgggtgcctcgggacagaggaatgcctggctctgggctggagggccagggttcgtccttggacggttgccagcaagggtccctcaaccagccagacaaaggacctctgcaggagccaggtgggtggcagggagagaagagggtctgggcttggagtcgtgtgtctgatgttgtggggatgatgttccgacagcacggagcaccatggcaggtggaaacagccagggcctgccaactcagcagaaggccacagccgccttgtcccaggtcagagccagggaactgtgagagcagaagtcttgttttagaaattttgttgtgactcagttgccaggtcatgtccaactgtttgcgaccccaaggactgcagcacagcaggcttccctgttcttcactatctcccggagtttgctcaaactcatgtgcattgagtcagtgatgccatccaaccatctcatcctctgtcactctcttctattgccctcattctttcctagcatcagggtcttttccaaaattggacagctgttttttctatgatctccattggctttttttttcaatacta

SEQ ID NO: 61970 - DNA, 1251 bp, Bovine  19866881061551
  misc_feature (1)..(1): n is a, c, g, or t
natataccgaggaaacaccaaaatgtatattggcatatttcatgggaccatggtttgcacaaagctagtaacaggtctgaatgcagcttagcccgcactgctgtggaatactcaacaaacccagaacaccacagaagcacatcagaggaacctaacacctaaactgagcgtccaagcggaaggtaaggatgggcatctattcactctgaggctaccttatcctgctctccatgcaaggctgactcccacacctcccaccagatgctgccagcacagttcctgggggagtagggggtggagtggggaataagccctgctggagaaaactcaccgtagcagctctcacaggctcgcccgaggagagggttttgtggctggaatgtggttcccacagctccattcacagcaccaggtttgccattgctggtggatatttggttgggatttggtttgctgctttcaatgaaatataaagtgaagtgataaaaatgacttgtgtaacaaggtagaaggctctacatttcattactgatttatcttaaccacacataaacatgtgaatgtttgatgaagaagaaatttaaatgaacccaaaccatttatctttacaaaccgaggctatgtaaaaaccaatctcataagcatgacactcacaaaataagtagtcatgtatcttcctcatccagacataatttccttaggatactgtttgaaattttggaaaatgcaagttattaaatattacttatcatgacaaaataatttctggattaaataaattaggcagtgtgcagtgtttagggaaaaccactgcccattcctgccactagagtgacagctgctgaccctacgcattggctctcgagggaactgcacaaaagctgcatgtcaacagtgacactgtggataccagctgggcttactgggagaggtaaacgcatttcaggagactgtgaccactcatcatttctattatgcttgaatttttatgaagatgattacagagcacttgaaattagaaaaaccaataagtgtatccaaggcatttcttttttaagaggaaaaaggtaacatctatcagatttccagaagccataattcctcagaatcatgtagcctggactgttttggtatgtactgtgccaacatggttcgctttttcccatctggggtagcctaactgccctgcgtatcagtcacgcccaagaacactgtccacctaggtgtacacactatgtcctcaagtacagt

SEQ ID NO: 61971 - DNA, 871 bp, Bovine  19866881388917
  misc_feature (1)..(1): n is a, c, g, or t
ntggtgcttttagatctgaagactttgttctttagggggttttgtttttgcggtttctatttagtggtgtagtaactgtatattacattagtaacactgcattgctgtgctattctggccatctgaagctaaatgccaccaatgcattttaaattcccagctgcacaccctataaattgaaaccatgacatataacaatctgggtgtgagtgaagttttgccaaaacaaatgccagtgacactaacagctttaattatcatgtttgggatttaatatatcaactcatattgataagtaaaaatttccttcagaataattttagaaagatgcaacaacataaaagacaggatactggctcacattatatacttcatagtctattataaagagtctactttcataatttttaaaaaatgactgctatagaaagctatttatgaacttcacaaatagaaatttccccatttcaaagagactgtaagcttaaataaaaatagcaattccataaagacaaagaaagtacacaatagtagacataattacctagtatttaaaatgcaagtaagatcatgtacattatcaggaagaataaagattgaaaacccaaaaagcaaatcctcccgctttgcttggtaatggttgtttctatattagagatctgtatcaaattcaggctcaataattagtaagataaccagaaaaatacccaagatctaaaggagaacaacaagcttaaaaagcagagatcagaagtatctagttcaaatggtcagaaaagctgcgcataaattaaacctggaactcagagagaggtgaagaggatgaattcatactgccaaagtttataacaaaaatctgggacttcccaat

SEQ ID NO: 61972 - DNA, 1030 bp, Bovine  19866881426598
  misc_feature (1)..(1): n is a, c, g, or t
natactgatactaaatggtcactttcacttaaaaaaattgtaaagcactacatgtgagctacaaacatttatgtacgtagacacagtacatcaaaaaagcacaaaagtcaagacaggtggatcagaatattgaactgttttctccaaaatgttttgttttaaatcattttgtgcccactcagtgaacagtcattcctgcttgtctcagttcacaaacacaagggggtgacttaaaaatgagacagcccagttaactgaccagccaagccaatccaacctaacggcagggctcagagctgggaagttctctggtctataacattgctgtatcagctgttaaattaaacaagcagcagaagaaataataagccccaaatttcaaacagcatcttaccagggtgatgtctcgagaagctgcagctgcactcatatgcaaactaggttgccttacagaactgctacaatcaagggctcgagcaaatgtcccaacagcactggataaaagaggaaaggttaaggcacggttgttcttttatcttgaaagaaaaaaaaatctgggtagtaaatgaacaattgtaatagccaaacaagttctttgatgtttaagaatcaaatatcagattaaaaagtatcttctttacaatttaagaaatgacaagccaattcactatacatataggtcattataattaagaagtttgtgtggcattaacaagggaaagatctatagtgaaatttcatgtagttaacaatctggtacacaactgtgtttcaaaaatgagatatacattagatgcagagtttgactactactgtaaagcaagttgtgaccacctttttatcccaaatggtgaaagtggagtaatgtttttcccttgaaatgagatatcatcaactgtagcaacctattacaactgcagttatatgttcctttaaggaatatgtaacagatttccatttaaggaaagaaaaacaattatcacaatactgatttaaatttaatgatttacaaggcgttcccaaatataga

SEQ ID NO: 61973 - DNA, 1746 bp, Bovine  19866880179633
  misc_feature (1)..(1): n is a, c, g, or t
ntgttcattttgtagacgtaatatttcacatcaagattagcttagatgcaaagatatttttgtccaggttatgaaatcaacttatgtgttactgtttgctcacaaatgtgggtttattctaacctgaagataattctaaaaaacacagcaagcaaggatctgccttgcgtcttttcttgcccttctgagtcttcctgttcctgtctaaagcagcttcattcttctttttcaagttatttcctagtgcctgcagcactcgtccttggcttcctggtttcgtccatgcctggaacagcaacttttcccactttccagggtgaggctacacagtgggcctgctttgttccagaaggcaggttcactggtctcaatgcctgatgtttccccaggttccctctaagagacgtgttgtgcagcagtggataaaatggctacactccagacgtttccctcttgcaatgtgtttgccttcgtgtgttcatttaaattttgaatcaaaatatatacaaggacttccctgggggtccagtggctaagacttggtgctcccaatgcaaggggcctaggttccactcctagtcggggaactagatcccacatgccgcaagcgagttctcatgccacatctaaaggaagattgaagattgcacgtgccgcaactaagacctggcacagccaaataaataataaatattttttaaaaaactatatacacagagtccatttttcctaatttgaaacacccttgaaaagaaaaaaaaagaactagtggaagagaaaaacaaaatctcatccatcttttcttaactttcaaaaagtcttgtcctcatttattttttattctcaaattacagatgttggatgctgaccaggcaaatcaggagaaaccagattcttcaaatctagggaattgaagttgggcctcagcttcacctacattagttgtgtgatttgggatcaagcttgctaagcctcctatttgtaaaatgagaatgaagatagtacctcctcatagaggtataggtagaactgaatgaaataatggcaccccactccagtactcttgcctggaaaattccatggacggaggagcctggtgggcctgcagtccatggggtcgctgagggtcagacatgactgagcgacttccttttcacttttcactttcatgcattggagaaggaaatggcaacccactccagcgttcttgcctggagaatcccagagacgggggagcctggtgggctgctgtctatggggtcgcacagagtcggacacgactgaagcgacacagcagcagcagcagatacctattatgtttacactaactaggttgtagtaaaaacaaagatgacatcaggtattcaggcctaaatgaacctacaatagtgaaatcaaaaaagcaaagaaaggagccaagccaaacatgagcctgagggttgattagagacccaaatatgcactcttcagctaatatgcagggacatccttggctgagaaagaaaacctgtggtcagtggggcatgcagcttcacttcttccacttgtctttcagtgtgtcattactgcaaattaaataattcagttgaaagctaaaacatttgctgcactggctgaagaacctctagactgcaatatgtgacatacttaattgaatcctcttccactaaaagtcagaatataatggagttcaaacctgagcctctcaggcctcccctgccccatttaagaaggatgagtgtatag

SEQ ID NO: 61974 - DNA, 1404 bp, Bovine  19866880378449
  misc_feature (1)..(1): n is a, c, g, or t
naatgatgtaggctaagacccgaacacacacaatattgaccagtttaaacattgattgaatagaaaaagtgagagactatatacttacaatttcatctgtgaaataatattaaaggatcagcatttgactagattactgagtacttttctgggaagaagcaattactagtgataataaataagacggcactcagtgttctgtggggttctgatgtcagtggaaaatgaattattggatgatcagatcacattattattggaaggacttaagttacttcttgtgttgattttaatcaaacctttctgtttgaattagattaatgaggatattcctgaaacaaagataaagttcacatctgtggagaatcctgagagtgacagcgagttttcagatatctcctattcatgtcaagtgagctcaaaagtcccttatgagctgcaaaaaggacaagcacttattacctttgaaaaagaagaaggtatgactaatgttcaaaaacttgaccgtgttacctttagaaagcactgggacttccaaagagtttttgtagatatttggccattgctttagaatttttatatcatttcgtctcatcctcacaggggtgccctgaggtagatatgattatccctgttttacagaccagaaaacaagactctgagatgttgagtgatttgaacatgatcactagcgcagaatatgagtgctctagaaagcaaacccgtgttgtgatgtccaatagcagcatttttatactcctcctgctacctgcaaatgataatactagtaataatgtttcaaggtagcaaagcagagagttctgacagacatgatctcattttatactcacatgactctgtaaaagtaataagatagagatactatttacatcattaagaaaccagattcacagatgtttaagtgatttacctaagtgcacaaggcatgagggagaaggcaatggcaccccactccagtactcttgcctggaaaatcccatggatggaggagcctggtaggctgcagtccatggggtcgctaagagtcggatacgactgagcaacttcactttcacttttcactttcatgcattggagagggaaatggcaacccactccagtgttcttgcctggagaatcccaaggacgggggagcctggtgggcttccgactatggggtcgcacagagtcggacacgactgaagcgacttagcagcagcagcagcacaaggcatgagaatgaaaagagctctggagtcaaagacttggagtgggacctgatgtttgccatggtgtggaaccctcttgagaactggggacaccttaatgaggagaatctagctttgaatgccagatttgcctctttttttttttttttttaacaaaacaaaacagcactttatt

SEQ ID NO: 61975 - DNA, 1499 bp, Bovine  19866880524998
  misc_feature (1)..(1): n is a, c, g, or t
ntccacactgttaatgcaaagggttcatcacattctgtagagttagtccacatgagacaaatgtgagtttgtacttctgaaggtcaatgtccaatatcctgttcccccaggtctcatgtaccaagaggcaggatcagtttcaagtctcttgggtcagacagatttcctggataggatattgctgtctgtcttcatacactactggacacaaacctgaccacctttaggttttcagacttatttgaggagaagagaacatgatcgaaagagtcaaagggggtaagaaataagatttagcaggaatcacatgttattgtattttccattcatttttctttggggagagattttaattgtcatgtgttctagtgaaaaagaagttttacagaccccctctagtacataagaccagagaacatttttaatatctacttccagctatcagacagaagtgtaagcagctctcatgcttttaacaatgaattgttaggggtcttttaaaaaacaccaggagttatggtcaccctgtctttacttcttttattccttactatatgtgatgataagccattgcctatagaatgatctaatgtgtacttatgtccatgtctgttaattaatggagaaaacattcttctttacagagtggagtcaatatacatcacaggttagcctcagaaagtggtgtttggctttctggaatttggttctgctctaaatcaagacttcagtgtaaaaagtttaaatttccgtaggtggctttgcattagtcagaactgaaatagagcctgttacttatgagaggttgtgaagagcaactaattcaagacacctgggagttttgcccaacataaatcagctagttaatggaaaaactagcaccatgatatgttacattttctttgcgtgtaatacatcagggtacctttgtcatccctatatctggataatcccaaatggaactagactcagaagagtagacttgggatgcacttgagcctatgaacactaggtggcatctatttctttgtgtgcttgatcagtagatggatagtgcttcagttagacttgtgcattgagaaaggaatggacaaaaacgttcaatctgtgatctttgttcttttgtagatttgtgggagttaaaatggcacctgtgactcataaaccagggttagtattataggtgagaggtagcaagttcttggtagatataaagactccttttaaggacagcagtatctaagaaatattatttacctaaccttctcaccttggacatgagatatctaggggattttaaaagcttctgactttatgacgataataaaaaggattggctgagaatgaatgtacctgtttaatggaatgagaattactatactacgtaaacttgaatgataacaagtgaaggtgtggtggaggaaggcatggtagtccactacagtattcttgcctggagaatccctggacagaggagccggcaggctacagtccatcgg

SEQ ID NO: 61976 - DNA, 1258 bp, Bovine  19866880609509
  misc_feature (1)..(1): n is a, c, g, or t
ncactgaagcaacaagccattattgcccatttaatgcctttgacacaaactgccaggcctactggatccagatgaggaagatcccttgaagattggatcccacagctatttctaaaactttataagccaagccataaggaaagcttgctgaacacagtccaacatttgttcatatttttttaattgaaatatagttgattttcagagttgtgtcttgtgcatttttaagtttagtttttgtggtgaagtctagcatagatttgctttgttgaagtttagatcttaaaactattaaaaagtaatgctcattccgtcaatggtgtttgttgcagaattacagattttattagacactagtgtaacaccagtttatattgactatcagcttcataacttcagaactggattagaaataaaagtatcagcagtcaataagcaaggaaaaggtgagtatctgccatttttaaaaactgtttaacatgtttagaattcttgatttagaaaagaaatactgttaaacattttagtaatggagaaagactctgggttgatacagcaataataatgcagaaacttctaaaaatgtctgtgctgaaatcatttaaaacccaaaagaaaattttttaattatataaaaaaaaacctatgggtttaatgttgtctcaggttttatgtgcaagtccagaaaatagaggtaagtctagtttaataattggatagattaattgtactaatacactggtgaattacttaggtatgtgtagaaacaaattaagggatggtgcaaccgtaaatcataacaaaaactattaggcagtttgagaacttggagaatagtggagagtctaaactgaaatactaacaagatttgtaggtcatgtagacaggattgatgctttgaagtgtctaaatagcttcaacgtagttggctgggagcatgccagtcctgccagtcctctgcacagtgccgtacatccaaccttcatcaatagcttgaacattgacaatggcatctccatctttgaaggatacctcatctgcatcagcagccatatagtcatacatggcacggaagattttctgtgggtaaggacaaaaaagggaaatgttagatttgcaacaattaacctaaacaactaattttaaagtctcttatgacaccagaaatttaagttgcatgaaacagaatgtgcaactaccaccaaaactaaaaagactaggagaaaatatttgcaaatcgtatatctaataaggatta

SEQ ID NO: 61977 - DNA, 1007 bp, Bovine  19866880617499
  misc_feature (1)..(1): n is a, c, g, or t
ntgggttgccatttccttctccaatgcgtgaaagtgaaaagtgaagtcgcttagtcgtgtccgaccctcagagaccccatggactgcagcctgctaggctcctccatccatgggattttccaggcaagagtactggagtggggtgccattgtcttctccccaatttattactgttaacattatacaaaatagaagttttggtttaaaaaaaagatcagcacacctgtaaccattatttcacatatcaaaaaaggaggaggacttgagttacttactccagcagtggatggatgggatgggatggaggataccgttgtctgctgggtagcaactgaagatgatcgttgctgtgggagctctgtggttcttgcatgtttgtaacctgaaaggaaaggggaaaatagcattaggagaaaacgtgactagatatcatttactctgtgtttagcaactgagcagcagtgtctttccccctaatttaaaaagaatgatttccaagaaaggaggaatgaaaattaaatagctaactgcatgtacctctccgcaattttagactcattagaagaaaaggtccagatttttttctgtttctactcaaagcatctcttacagtaacatccagtgaactggctcccatggctatcgaggtcagggccatccacttgtacctgttgaggctgcagagaagaagacgcccccgtcactgtaggtagagaggtgggcagcttctgaatgctcagacttctcctcaccaccactgatgctcagcccactggctgatcgagactgctcccggctccggcgctgagcttgtgctgaaggaggtaagatccatcagagagcaggcagaaatgaaattttcctaggagtaatccctaatggtaattgaatctcagttggtttttgttcattataaaacagttttttgtagatttccatggattaaaccctcaaaactctataatagaaggtggtcctcattttccagtgagagttaatcacccaag

SEQ ID NO: 61978 - DNA, 3113 bp, Bovine  19866880647273
  misc_feature (1)..(1): n is a, c, g, or t
ntttcttattgtacacagtctttgatgcctatatgccttgtctttgtcctcttgtcctggactgtaagctttttgagagcagagatagttgattgatcctcttctatgtatgcactgttccaaaaatgcccactgcttgctcccagccaagagggcagacaggtgatacactgtttttctgttttgttttgtttagctcatgtgactggaacagtctttatgatttacaaggtcaggctgaggatgcccaggggaggccacttctacagaggcctggccctcatcccgggtttctgccgggcagtctgcccagctctcactgctcacctcactctggagcttgtatgcatgaagggcccgatccagatccacggtttttgtggtcggagccactctgcctctgatgctgtgcacgtagtcatagtggtagacagcctggacgcagagagaagcagagtgagtggactgcactgtggccgcaggggtaaaagaaactaagtaaatgcaaatccaagtctcttaatataaagatggcagcctgctccctttgcctcagaactctatctcgaatactgggccttgtccaatggaatagggccagtgtgtggatcccacactgagaaagtggaagagtcagctcaggcatatgaagaggaagagtggatgttttaccaccatgagttccacaacaaaaggttttcacattctgactcactggtgggatttaatatttgcttattaacctgtggggttagtaaaaagggggcagcctgctctgtaccactgtgctactacacaggtgctttccatccattttcccgctgtccacataaggaagctgaggctcaggggattaagtgcctctctcaagtctatcggattacatgtgctagaggcctcatcagtaactgcagagaccctcttctctccatctgatcatgcatgcacatgtgctaagtcgtgtccaactctttgaatgctatggactgtctatgggattctccaggcaagaatactggagtgggttgccatgcccgcctccagggcatcttcccttaccaccgtgagcactaaatgaattagaaagctgagaccatgaggcaaggatacaaaaagcaacctgggaagctctaaaacaccaaggatttcataaactttgattatttacaacgccaccccaggaaatgaatagaacacatcaggttttaggaaatcagagaagaatcttcagtactttctaaggcaccgacaccggtctcccattgagaaacggcctggcctgccccgtctttggttctccccacttccgctggtgcggtggccctgttctcctctccctgaagtaacttctccgtgggcacttacatcgcttagttgtttcccgcttttgacagcctgaacgtagacaggagtgtcagtaaccagcttgtaattgttccttgttttcagcacgtgagctttgtacttgatctgtcaaaaggaagaaggaaaataagcctgtgttagaccattcattatatttgaaattgttggttttcacatagagcctggttgcttttagctcatggcatgcacatacattggccctgaatttcataacaatcagcataatcaatgcttatagtcacatggatcatctagagtcttctaggaggcttgacagctgccttcctagaaatatttaagctttcttactaaaatcttgattatagtattaccttgcctagcaaatcctctccttacaaatagatcctgtctatagcataacagactcctaataaatgagatgttttttataataggaattatgtgctcattaatatatccaaaatcgttcagaaggtggcgagaagaaccaggggtcccttctgcaccaggggaccatgggacagctcatctgcattgtctgcactcctgagaaatggcggctctgctcttcagcatcttcctccagttcggccatcctcagcaccacttcagacacagttgggtgtgacagtgtctgtacttgacgtcctctccccttgcctctagaccacacagggaaggaagcatacttgaaacaaccaaaaaccaaaaaacaaggtaaactcacatcgttgcgtagatcgtaagcatgcttggcgtggagaatctcaggagtgtcccagacgtagcaaccaatgcctttcagccaggtgaggtcatccttgtacacaatctgggggttgcaacagatggagggggtcggaacaagaaaacttgactgtaactttaacacgaaagacacagacacactctagacccaggatgactttgcggaatgaaaacaagacactatgccctgaggccatgggtgctcttcagacttcagcatgcagagccctgcttctagggacagctcaaattcccggtagacccctgggtgtacaggaaagtgattctggaagagggcggagctgaagaaccaagtgagtcagtctctcttggatgtggggcgtgtgtggggctggggaagaggaccttcataagcagtggacttacgtcactgatctggtctgtgaccttcctgacgtgactgttgacttgcaagtcggggtggcaaatccactcgtggaggtgaaggcggtagtcgatctcactgactttcttctgagaatccttagcggtaaccatctctaccatgtcaggcactatgtggattttcatcttgttcttctcataaacagatctgtacaggcgctgtggagataacgtaaccagttaaacagggaactatgcaagggtcatggcaacacgtgcctttcttagaccccacagaggtcaggggcatcacttagagcaaccggttgggggcaggatggggactggatgtttctgacactttctacagattcataggggtggggaaaggcagtatgggctgacacagctctcagcttcttcacatgtgcacagtcagtgccatgcacattgctgaaaagaatgatgttctgacttatagttggtggttctgttacttggcttttgaaaccagcctttaggatcacttacgtcgatgttaaacttgccaactcggaggcaccgtgctgtgttcggatcatcttcaacacttctgggtaaagtgtaaagag

SEQ ID NO: 61979 - DNA, 1988 bp, Bovine  19866880678541
  misc_feature (1)..(1): n is a, c, g, or t
ntcccaagaagtgattgtgagaacctttatataattatttagagtacatatattttattgctttctaatttaaaaaatctgattttagcagttgtcatcaaaatctttctcagatgtatgacatttgcttgtttacaaaggcttatttatttaccatgagtagggataaaaataaaagagcttaaatatttcccaacactccttgaattcacaaatacacaaatttccatcagccagacatatcagaacccatctgacaaggagtactggaactctttgatatgtattctgtacaacctgtgctagacatcacaggtttcatttctgaaagattcagtagtttgtttgggaaaatgccactcagagaactgaaagagcatctgtctggatccagaattagtatcttactctccatatgtattgttactaggaattgtctcgaggaatgtagcagagtgtttttcaaaatgttctttttgtaatttagtaactgtttagtcttaaaatgagactttgagggtatggaaatgaagtgtgatagtaaatattctttcaacaaaatgaattatttacaagaattatcacaatgaattataacaagaaagtctatttcatgttatttcccctgctctttagaatatgaaggacatgttaggtattcttactccatgtatggtaaggtggctcagacagtaaagcatctgcctgcaatgcaggagacccacgttccatccctgggtcaggaagatatcctggagaaggaaatggcaaccaactccagtactcttgcctggaaaatcccatggacagaggagcctgataggttacagaccatggggtctcaaaaagtcagacacgactgagctacttcacttcacttactccatgtgatgaataagagcaattcccatcaccaaaggatacccacacaagttatgtacaagggatgcagcctggaatgctctaaacccaagaggaattttccaagctcacagaagcagtttcagtactagtcctcccctctttcccttagagagattcagagactcggggcagtgctactggggatgcaaggaccaaaaagaggtgacactccttccgaggtaagaactggaaagtatcctgaactacatctgctcccaagaaacagtccatgttcacagtaacactgtcttatgcttgcacatcatctttgtgagcacagcaatgcatccaacaaaccatgtctctaaggcaaggtgctagcttttcacaggagaggcagcagagtgttgagatcctggactctggagctagacttcctgggttccaatcttgggtctgtgttcattggctctgcaatttggggcacatagagttccctatgtgtcactgtacatgggagtcaaccagagaaatcacttacttcaagaggtagaaaacaggacagaggggcagtctagcaaagaaaacaaatagggacacgaccaaagtagtatgcaaaaagtgatgtgttaaaatagaactataaggcaaatacctatccccaagaaggtgggcattagggcatatttgcatctagaacactagggtgatggtaaaaccactctaaggtaacaaagcaaagtaagtgtcccagaagacacagggatggagtctgaaggaagacacaggaatatttataagtcccatatagactctactgtgcttctcatcttctgagttatctccaaaattttaaaatatacaagtaaataacttaaatactatattaatttatattacatactatatgtatatatatatatatatatatatatacacatatatatatatctcacacatcaacttactacatacacttgggtttagaactacaacaccaggtaagcttactctactaaacttcattagtcagtaagtccatattgacaaagatagatcaaaattgctagcatagtaatcatactggcaaagtatatattcttccccaaacatcatacaaatca

SEQ ID NO: 61980 - DNA, 2594 bp, Bovine  19866880708940
  misc_feature (1)..(1): n is a, c, g, or t
naatgtcaaacaattggggaaataatagcctaggatatattcataagattaaatgtaacatgattaaaaatgaaaaactagaaaagacataaaaaatattttccattatccgtgagggtaaatttttaatgatttttatcatcttcattatactttgtgtatttttcaggaataagcatcctttacttttaagtatcaactaaatatcattaatgctattcactatacagttttggctttctgccttccaagcatatgatgggattgaatatcctagttcctttacagtttgggtggagccatatatgtaactctagttcagttgtgaatggaaggaacatatttggaccaagaatttcactgtcagttcgagactcttcaaaactctttttctctggtattgcatccagcaataaagctggtggtcactgagtgcctaccatgggcattccttttgacccatcatggacatgtagcatgaacagtaagtgaatttttgtggttttaggtctctaaaacttagagataatttatcacattaacatcacatattctaacacaattaatacagaaattggcattcttgagtattgctgtatgtgtgtgtgcgcgtgtgtgtgtgtgcgcgtgcgcacacgctcagttgttcagtcatgtcctactctttgcagccccatggactgtagcccaacaggcttctctgtccatgggattttccaggcaaaaatactgtattgggttgacatttcctcctccaaaggatcttgtaggaaaacaaaaaagaaaaagataatccacaacacaatctaaaacacttggctttggctcagagtccaagcagcagatgattagaaaagagagattagaatggtagcatatattatgtagtgggaaaacatttggtaaaaccatcacacatgatagcttggaagacagataatgtacctattagcttgaagttctgtgtttttttttaaagacagtatgaaaaccagaattagtagcatatgtctcagtgagtttaacaaagtaatataagaaagaaatgagcttaaaaaagaattggccaggttgaaagcaagaaaaatggggagtaaagtccaaaactatgggaacttgcagagttggacgtacaatccttttcattcttaaataataaaactgaaaagacctttgagtaaaacaggctgattagatcttctgcaaggataaaatcaatgatcatatcaagatttaaatctgaacaaattaaggtccctcagagtaaaaatagcaattaaggttgtagaattcaataaacactttcaattagacaaactaattcagggaaaagaaactataagtggcctgatagactcaaatcaagtgaagacagggagagaagaagggagccaaaagagcagagaattacagctgtttcgcttcctgggtcagaaagtttccctgaagaagggataggctatacactccagtattcttggccttccctggtggctcagacagtaaagaatctgcctgcaatgagggagacctgagttccaatccctgggttgggaagatcccctggaggagggcatggcaacccactccaatattcttgcctggagaatccccatggacagagcgggtgtcaaagagtcggacacaactgagcacaactaaaaacagacatctaggaaaacaaaaccaaaaccaaagttatggctattagcatatgtaaactgactggactttagtctattttaatagagaaaaagcctattaagtttttttaaatataccagctaaccagccaccggcccaggtaaagaaactataactgttcaaaactttaagaaattggtaccaaacatttatcatagaaagtgtaccaagtgaggaagcttttcagcctccaagaaaaatatattatgaatgtccattctagatatggcccaggagaataatgaaaaaagaagaaggtccaggacctatgagaacaatgagcaagagacaaatttccagggagtcacagtcgcatcaaaaactccataggatttcacgatggctctggcccagtgacggctttgtgcctcccattctttccttttccaaatgcaagagagcagttatcttattctggtcctactactgtctatggggaggatgggggggtctctcagacttgatatagaaatttccacatatcaccaagagtttttgcaccttgagtttgatgttatgaatgggtgaaatttgaggattttttaccttggagatgggatgagtgtattttgtgtgtgaagaggagtgatccaaatatcgataaccagtaggacagcacagactacccttattcgtattctgggctcagctatttatctggttcttctcatttttataagacagaattttcttagtcaccttatgtttcagtgaggccatgtgacttcctggccagtgagatgtgagaggaaataacacaggtcactttcgggtcacagcatttaatttctggtgcaagactttccagacttcagcttcccaaccttgatgattctggaagcgtgcctcaagatggggcctgaagtgatcaggacagagtcccttaatct

SEQ ID NO: 61981 - DNA, 894 bp, Bovine  19866880760455
  misc_feature (1)..(1): n is a, c, g, or t
natatgtgataatactaatatcaacatcatagagatgttaaaaggattaaatgaagttataattgcatctattcaactatttttgactaaagaactcagcggtttcatatgaattgacctaatactttggagaaggcaatggcaccccactccagtactcttgcctggaaaatcccatggatggaggggcctagtaggctgcagaccatggggttgctaagagtcggacacgactaagcgaattcactttcacttttccctttcatgcatcggagaatgaaatggcaacccactccagtgttcttgcctggagaatcccaaggacgggggagcctggtgggccactgtctatggggtcgcacagagtcgaacacgactgaagcgacttagcagcagcagcaatactttgaagcactcataatagtgtctgacatatagtgattgctcagtaactgttagctattattttttttattaatcttgtccaccatactatatccctcctgacttgctcatatcttcaatgaaagggtctaaaatagccctgtctaatttccttaaagtgaattgaaatatataatgactgcccatgttgagccaattcacattaaggctaaaacaatattccaaaagcatttaatgaaaagtcctcttcatgcattattctcatatgtctttttatctcttttttcatacctgtagtacaaatacaaagaaggttaccgtaagcaactgggccaccacgtgggcttccgcacccttcaagatgaccccaaattggtgtggtctatccatgctgccaagattcagagtgacagagaatacaggaaagattatgagaagtctaaagggattcacaatacaccgctgacatgatgtccatcgttcaggcca

SEQ ID NO: 61982 - DNA, 1109 bp, Bovine  19866880761114
  misc_feature (1)..(1): n is a, c, g, or t
ntagcagtttgaggcaacagcagtggtattgctcattgcgataaatgtatgctgctcctggaacatttcttggtgcacatttcaaggaacagtctcataaaataattagcaagaggaaaaagatctggaaaacattgctcactatagttagtcttttaagattaactatgcataattagcatagtaaaagttctctaatgtcttctaacaaagaaacctgtttaacccaatgtttccccaatttacctgaccttagagcccttttatcatgtaatatctattagaaacacctaacagatctgtgatcttcataagacttccttgggattgctgtactaatgtgaaaatgcaataaatacaatttaaaatttttttcagtgataaatgatatttttaacaacatggcaaattacttcaatcctctatcgatgaaaactttgggccttttgttaccacattttatgggaattataagatacagcagtatttatggatttgcagacccatgactatttcagactgcatgtcctgcaagtaaccagagactacacactttttaagtttaaatagttctttgccttttgcaagctagcaagccctgtctgtcttcagttctcaactttaaaaagttatgtagtaataactgttggatccttcactttcagtgacactgagaaagcaaatcatagttttgttcctcaatttagagccattacctgtactaatgatgtcttctggaagctcatctccacagtatctgaaagagaatttttaaaaaggagaggtcacatgaataattataatatagctcttgcaagtgactaactgataattgatgtactttaaatttctcctaagaggtgcgtgggtgcgtgtgtgctcagtcgtacctgactctttgcaaccccatggactataacccgccaggctcctctgtccatggaaattttccaggcaagaatactggagtgggatgccattgcctactccagttcctctaagtactggctctgctgctgctaagtcgcttcagtcgtgtccaactctgtgcgaccctgtagacggcagccccccaggctcccccgtccctgggattctccaggcaagaa

SEQ ID NO: 61983 - DNA, 1871 bp, Bovine  19866880782216
  misc_feature (1)..(1): n is a, c, g, or t
natattctttaaaataggcttttaatagctgcatagtgtttcttttgactagaaagagcatttattaacatttattttggagaaggcaatagcaccccactccagtactcttgcctggaaaatcccatggatggaggagcctggtaggctgcagtccatgggatcgcgaagagtcggacacgactgagcgacttcactttcccttttcactttcatgcattggagaaggaaatggcaacctactccagcgttcttgcctggagaatcccagggacgggggagcctggtgagctgccatctatggggctgcacagagttggacacgactgaagcgacttagcagcagcagcagcaacatttatttacagaaagcctgtagctggatgtttgcgcagtttctctttctctgggttagcttcttttcctgttgacacagagtgaacatccaatgaactggctgacagaagatactcatttcaattactcctgtcctaacaacctgaaatattttatcattttttgttacttttctgggtcatttttcaacatacttcctctgctggtttgcctaatacaacgagcctgttttctataaaagcaacaaccagaatcgtactttattattgattctatttgtatcttgaccctaaatttttcaatcttgctgaagagttcctgcctttttcctcctcacagaatgtttacaagtctgatctccagtggctgaggggcattggctgggtccctattgggtctgtggatgtggtcaagtgcaagagagctgcagagatactgagtgataacctctaccgtcagcctccagacacgctgaaattcaccagtgtgcctgattccctggagcaggtgctggccaagaacaacgccatcaacatgaacaaggtgagctccagctgcctcaagcttctccaagatgcaaaaagaggttctgagacattaatcactagtggagttaaaattgtccatgcaagtgtggggtctgtttaccacctaaatgacatacttgaaatcctctaagtaatttctattatcctcggttgtaaccctgataactatcattaagactcaaacctcagttgaatatatcttagtctgatttattttttcctaattaggtcaataacattcctgctttaattgactttttgtaattctgtttcaaatggtcttctataacatgttctttcttttctatcaacatattctttgatagcgcttatacacagaggcctgggacaaagacaagactcaaattcacataatgcctgatactccagagatcatgctggcaaggcagaacaaactcaactacagtgaggtaggggaaaatcttgtggggccatacttgtggttgtcattgtagttgttttctacacttacttttatgaagaatcttggatctcagctgtcctggagggtataactctgtgatatgaacactcagcccatccaacctttcatctgtagttgaatatcatatgctataggattccaggggaaaactgaagtcacgttatcttttccatttatggtctttactggtgtgagtcagtgcaactggagagtatttttggcatttccaaggggtagtatgaccaaatgtaatactgatatattatttatatgaaaacattatttgctgtttatctgaaattcaagttgagcttggcatgctatcttcctatttgttaaatctggcagcccaaccaagggggcctctaataatacatacccctttcccacctggatcctgagtggaattagaaggaaagcaaagcaatgaaactagaagtcaaaatctcacatcttttattactaaagttagtttcaagggcacgtttgtatagagccaa

SEQ ID NO: 61984 - DNA, 1127 bp, Bovine  19866880810417
  misc_feature (1)..(1): n is a, c, g, or t
ntcatccacttgtaggaaaggcccaatgtatgtaaactaaagtaagtcactaatatgatctttctacataaaacacagtgtattaccatattcccaaatagtgggccttgaattttagagcagtggtctgttctccaagaatcccctgaggtaccagggaaggatgatggttttattctgcaaggtacaagccacaagccaggagctggttaagggtgcaagcttgggctagtctgtcttcttctcatagtcgtataagggtgaattgtaatgataaatgtcatatgcatttcttgagttaaaatgctatataaagccaggccatgattctcactgggagaacttaagtttatgagtcactctttccatcagcactgtgacaattttatataagtacctccaagcctgcagctatactctaacaaattccacatgaatggctctctctctgttcttggtggatcagctttcactgtagtactgtgtcttaacagttataaaaatttaataaacattcaatttttcatttccctcaaagctagattttagaaaaatcctatgcaaatacataaggctttgtttccaaaaggccaggaaagttcttttcaaagatttagttcagtgaaaatgtcccttcagactgaccacatacttgcagtaaaatcgacaactcacatcactgatgatgtccctggaggccttggctgccacaattgggatggcatcacttcgcaagtcgtagcctttcttctttgcttcttcatgggcgagtttgtacagattctaaatttgagccaaaaaaaaaaaaaaatcagttagatgttgacattcacacccaaatattaacagagaactaaaacaattcactaagttctacacaggtaggtgcctgtgatcatctcactgttgagagtcctatgctttgtgacttttttggcaaagttgagtcttaaaaatgatacggaacatggtacctttgtttttcatttttaaagttatgttacattaactgtatataggtattattcattgttttaaaattttgagttttaacaaggaatcagtttggaaagctgaaacaaatgggtctaggggcaagagggacaggaggaaaactattcaatcta

SEQ ID NO: 61985 - DNA, 3318 bp, Bovine  19866880811997
  misc_feature (1)..(1): n is a, c, g, or t
ntctttgatagtttattctgtttgagcacaacctcgagaatctctctgcccccaagccggaagctatggaggattgcttaggttgccagtgtcgctcaggtgtggtaggaaggctggtatcatggtgatattggcagaaggggcaaattggactcatttaatatgtatgatggtttgcaccctgaatttaggatggtatgttttaaaatggagaaatgcatgggtgaacctatggttgatttgtgttggtgtttggtagaaaccaacatagtactgtaaagcaattatccttcaattaaaaataaataaatttaaaaaactgagaaatggagctgaaaacactcacaaatacagttgtcaaatattgaggttagaaaattttaacatgccaacaatgtgaatctccactagtgggtatcctgtacaccttagaaagtaaatcttaaataccaaaatgctgcaaattttacagagaattatgagaagagatgaataacttctatatgaggaaaaatctgcaaagccttgacaaaaccccaagtgccaaatgtgtttacgacgctctgtaagggaagggagaagcatgaagaaaacttataaaacagagacgggcaaacaaaggcttgctaacattcttactgccatcatcaatctttttctctagggctgatggtttgtatgtaagacatgtacattcatctacctacaacaaacggtgcagagcgtgggacagtgtatctctgtccatgggatacactgcttgccacgctgtgctggggaaaatgaactcctgatatttaggaaaaaacagattttgcttttttttggcaaagcaatggtatgattgccatttaagattcttagctactttatagacaaacaaaaagagttgattgctattggcagcttacagaagcagagaaagtattttttgaaaaaaaaaaaaacatatttggtgcgtaaatatgctaaagcagaggtaccaattgcaagtttgcaaacattgagaatggcttttaatacttatgctaggagatgtaaaagcactggagttcttaaagtttttattgtatgaaaaggaagaaatgagcagatttcgatatcaaccagtcaatggagaaaaccatacaatgctgggataatcaaatcggtgaaggactgtgaggaccttgaaaacataacaaaggctgaacctaagttcttgctggttatttctcacaaagtctcttccttttcctggaagggcatactgtctctccagttaacacatgaagttcacttcctttgtatggctgcacatcagccattgcagtggccagagaggaaataatgtttaaaaatttttaaattttattttgtgacactggtgggagctcgggaactatgttgaaaattaagtgctgggggagtcccaaaggaaatgcctctcttgattctgcttttggaaattgcagctgatcagtatgatgatgctgcattgccaatatgttttctggactctgtgtgacatgtatttcctcaaaaagatgaatgcttctaataaaaatgaaagaagaactggcacaaccagaatatcagccaaagtacattattagggagtcttcagagtctccagggtgaaaatgcatttaataataatttaacaaatatttattcaacacctactttattttagacactgtgcacacagtgacaaataagacagagaaggccatggctttattagagcttatattctagtggaggaagattgacaataaataagtaaatacttaagtaatttaaatgttgtgttaagtgttttattcctcttataagacagggaaagtatttttccctctaaccattctgttcttggctgagaccaccataataaaaaatagattaataagagaaaagcaaatagtttaataacttgtgtatctcacatatactcaggaaagacccagggaaattgagccccagccaccaatttaaataccatattcagctaaagataaaagagacctgttgagggacaaggggagtgggggcaggcagttatgggagatttccaagaaaagcactgtaaataagggtgaaaagtgaaagtgaagtcgctcagtcgtgtctgactctttgcaaccccatggactgtagcctaccaggctcctctgtccatgggattttccaggcaatagtcctggagtggattgccatttccttctccaggggatcttcccaacccaaggatcaaacccaggtctcgcgcattgtagacagacgctttactgtctgagccaccagggaagtcgaatgtttgtcatataaggtttaactgggcaccttctccactgacaagattatcttgtgatttagtcatccttgtattcctggtacagaggagactcttacaaatggatatttcctttataaatgtaactttcccttaaaaaaatttaacttctgtcttattttcagagcttctacgctgctctttctcaaaaattatcagctcaaaaataatctttatgccaaagagtcatgttctggaatgtcttactcttctctccttcacttagtgccttaaaacaggtgtttattttttccttgatttcaagggttaggaatgggggcgggtttggctggacaggcatttctgatccacatggtatcagccgggatgctgggcaatcctggcttctttttcttgctatgtggggtctcgtcattggacttagcatgagtgactccatctttgacccagtctgattactttaacagatttctcacaaagcagttgtcatactttttacatggtgtctgtctgccaaaaatcacaaggttagaatagttaagggtgatcctggcagtggtaaaatgtcatttttcatgtatttgattggtcaaatcaatatcagtgcccacctaaattcaagaaagggttgagaaataaataggtctcttagtaggtgagtggcaaagtcacatagaagaagagcaggtctacccatctgtggaaaatacaataggctatatgcttgaaggacatgaaccataggagggtgagagtggtgggaaagatggaaatgtttttagttagggtagtagccatgagaaagagagggagaagagcattccagttagagtgcagtaggttctagtttgagtaaacctctatagaaatggtcagtttacattcacataatgctccatcaacagtattgatactagaagttggcaagctgagacagaaattcaactagtcttattcatccaccttgtctggatatttgcttcattcagcacatccttagtcatttacattcttcctttctg

SEQ ID NO: 61986 - DNA, 1005 bp, Bovine  19866880857370
  misc_feature (1)..(1): n is a, c, g, or t
ngagtagattttatgtaaatgagacatttgcattcatagtgactggaaaaatgagttctaaatcatggagcctacttggcacctcattttcttgtattgtagtgttgcactaatgcctgcagccaatgcacctgggtcgtcatgtttgactgagctgaagtcattaaacaaatatgtgaactgtctctttttagattaatgacatatgcatccactctttacgttttgggcaaataaaatttcctctgcagcaatgggtaatttgtaatttaggtgaaatctcaccatttaaaaaatctcaccatttaaatatacttcctttcccaaatagccagttcactagtatcagggacacatggggaaagttgctgatgctggtgtggcacgagctcttcttatcagcataaacagtgattaaatctgattcagtaaattatttgcttgatttgttgggatattttccttgccaggattgtcttctccactcttctctcatttataatactcataatagcaactatacttatgaacttgttctgtgctacacattgttctaagaccttgacatgttttaactaaatttaatctcaccatccttttaatatggcagatactatttaatccttctttcacaggtgcatatattagagctcagcaatgtaaagcaatgtgtttaaggccactagtgacagagctagaatttgaaggcaggcaatttgttccagagttcatactcttaaaatatatatatatatagaactatgctgcctctccattttgttcaatctcaaactttcttcaaggctcagtttattgtcacttcctcccattctgtctctcctgttcagtgcacctcccctccatcaattcctatagcattattttatttcattaattgttatttaaggaactctcctttatcattgttaattaactgattcatatgtatcagttatgtgtatcagtttatgtgtaccttctgtccgaagattgaactccatgtat

SEQ ID NO: 61987 - DNA, 3445 bp, Bovine  19866880871613
  misc_feature (1)..(1): n is a, c, g, or t
ntttgggccatttctgagtcctcttctcacttatatgcaatctgctagcattaggcattccccctcagctcctggtgcatacctcaatcagacacaaccccaaattgtaactatttatccgtagacatagagtctgaggacctcaatgagacacaaccccaaattgtaactatttatctgtagacatagagtctgagaacgtttattcccctcattcctagcccaagctttcaatgtatgtttgttaaataaaaaagttaaagtgactgcatctgatagaaattttcaaagcttttcatgatataattttcaaagccctgagtgctatcaaagacccctatctctttgatcactaatattgcactttcattctgggtatcacttcttcctgcagagtttctaaacatctcctcacattagagtgactgcttgcccatgtgtgttacctggctgctcagcttggctgccttcttggccatttcaatgtcggggcgaccaagcatgctaagtccgtggctgccttccttgcggtgcttggctctgtactccacctgaatcgaagaaaaacaaaatggacaacgtgttccaggtggccggggccttgtacttactacttactcacggtgcatgggtggtctggcaacgtttaaaccatccacctacctcgctggcttgtttggcagcctgcgtggccttcttgatgtctggccgatcagccactgtggtgtaatggcaggttttctttcgcatcttttttgtaagcgaccttcatttggagaaagaaaacatttgctcatttgagaaacagactttctttctgaaaggaacctttctgattaaaaccaaatcaatcccaccaccatatattttaaaccactagatatagaaattagggtggccactctctgggcccagcccaccacgcaccagtgtgggaccccctggtgcaggtgggccccagagagtgagaagagggactcacgttactctgcttcttggccacgtccatggcgtgtttcacatctgggggctccagcatgatggagtagttggatttgcctttctccttgacaaacttcttcttgtaatttgtctgaaaagagccagaatttcttaggtggggaggggaagccaggaacagaattgttttacttgaagaactgtgagaagatcaaggaaaatccatggttcccattttggtgtcattttggaactggggtgtcttgtctgtattctagttcttctctgtcatttctgtcctggagcctaacattgggccacacaccaatctttcaagaatgatgacaagcaaagcaaactctttcattcatctttttaaaataaagggaaccttacatggctcataaatacaaattattaaatatatgatttattgtaaatacacgataaaataataaatacatgatcattaaagcattatccataaggatgtagtgggcagagatgtgggagatatgaagacgtgattttgattctctaaaattgttcagcagtttaaggagaagagagatgatgagaaagacagattttcactatcaaagcttcctccctttattaccactagggtagtgatatctttagtgccagagaagacatcctatggtaaaacccatatctgccacagttgccaaaactggaaagtcactagatattgagtctttattattactatttttggttgcatcgtgtggcatgcaggatcttagttccccgaccagggatcgaactctgcattgggagcacggagtcttagccactggaccaccaggaagttcctattgaactgtcttttaagccagtgttcaaagtccacatataggtactggctgtaagagaaagtgacgtaaaagaaagtctgtgtgagcaaaaacatgactttcagtcttttgctggatgctaaagtaaagtggcattgctgtggccaagagtcctggggctggtcacttacatcactgacgttcttggtcacttctttgacgtgaatagtgtcccgggtctctggcagcgtcgtgtaccgaaccctgcgccaagtgcttcttcacatacgacttgtacttgttctgggagagcacagagagcttgttacaacgccggcctggggcatcagcccaggacagaaggcgagcatatgggctgccgggggggtacctcggacaccaggctgctgactgtctttgccaggaggatctgtggcgtgtcaggtacggcatggcagcttcctctttccttgacgtgtttctctttgtatttcagctacaggggtgagaaaaaggcatttcttcagctcctctgagtctcctgcatattttttatcaagctcctgagttactaaatagagctggtaaagtagtgtcattgacatagaaacattaaactcagtgtaagatttgatatttagaaatcttgggaaataccaaaacaggattttctttatctcgtgcaagctggggctttagtaacaatcagaatgaacattatgatgaatctttatatacgcagctttacttcagagcactttgaaatgtcattggaccctcccccaagccctgggaggcattattagtccttctttccagctgaggaaacaggaagcataggaagagtatgaccccacgaaaatgaatatgttcccttatagagtccagccaggccctcagatccccagttctggctgggagggctggcacgtggagcctctgcatcaggcccggccacctgactgttacagcttcctgctgctgccaccctgctctgccaagtcactgctgtggactggggtcagcagccctccgcagtccacagggtgcccagggtgcccctggggactgggctgcagaagacagccctgtatgaggctaggcctctgggaggggaccgcatgcttacatcactttcgattatagaattcttcagggccagcaccatgtctttatcatccgtgacggaaagcttgcaacccttgaggtactctcggtccagcttgtattcaaactgtaacagaagaaagtcagaggaagctggaaaacggtgccaggcacaggagcaagatggtatctggttaaatttctagggagtcttcttcttgagggcactatgaggatttgctgccaggatgggggcaaaggtttcccggctgggtccactgcaagctgggctcctcctcgccagccccaaggccaggacaaagctttcctggtcctcccctgcctccctcaagagccattagtgtttgggctcagccatgtgagaccaagctgtgtggccaggtctacttcctgagcttgcctttcacacttcacaaccctcctgtccttcttggatctcaaatgagctagggagtgacagtggtaattatggataatgagggacgtttctgccctgggtacgtcatgcagttctgtctctcttatctcacatcgctctg

SEQ ID NO: 61988 - DNA, 2809 bp, Bovine  19866880876760
  misc_feature (1)..(1): n is a, c, g, or t
nggaatgatactctcaataagagggatatcaaaattttgcaaatatagtttttagaagcctccaaagtattatacctataaattgaacattaccaaagttctcttaaatgtatgctctatctacattcttaggtaagaagagggaaggtcagaggttcttcctgagtcttttgggccttgattgttttcagcttgaaataacacaaatgcctaaagaggtattttggggtggcaaattttactcctgtacattgggaataaattagtgagtgttaagtatattgtaaaaattaggccctagaaaaacacaaaaacaatatatttatcaactccaaggaaacaaaaaagtatagatgaaggaaaattatgaataataatgatgttctgaattctgagtaatagtagtaaaaagtcactctgtcatgtctgactctttgtgaccccacggactatacagactatggaattctccaggccagaatactggtgtgggtagccattcatttctctagggattttcctgacccaagaactgaaccagggtcttctgcattgcaagtggtttctttaccaattgagctatcagggaaggcccctgattctgaatagtgacttaaacttgtcataactgtattagaaaggcagaatagaggaagagagtatgcacatgtggtggagaaaggcagggtggtgaaagagaacaagatcctcatccttcaagtggaagtcaataattaataaataaaatttttaatccaaaaaaaaaatatatacaggtacactagctgcatatatgccataccagcctacactatttgtgtacttaggggtaaatgccagaagaataacctaaacatgctgaagtgattgtttctgggtagtagtaaacagtagaggagaacagttcatggaaaacattatgaaataatggtgtgtaatacacactgcacaataatgtgcaataaatattatggaaatgggacactttaagatatttacatgttgtagaagcagaattctaaggtggtctccaggatctcttctctccaatactacacactatggaatttcctcttttgagtgtggtcatgatgccaagcagggccctgtgtggctcccaggcatggaggccattttgcaccaaacttcttgtaggcaagtctccagccaccatgaccttctctcagtttcaaaaggcagaacaattggtaatcatacttccttacaattgtgctcatttcacatgctagtaaggtaatgttcaaaatccttcaagctaggtttcaacagtatgtgaaccaagaacctccagtcgtacaagctggatttagaaaaggcagaggaaccagagatcaaattgacaacatctgttggatcatagaaaaagcaagggaattccagaaaaacatctgcttaattgactatgctaaagcctttgactgtgtggatcacaacaaactatggaaaattctaaaagagatgggaataccagaccacctgacctgcctcttgagaaaactatatgcaggtcaggaagcaacagttggaaccggacatggaacaacggactggttccaaattgggaaaggagtataacaaggctgtatattgtcaccttctttgtgtaacttatatgcagaatacattgtgtgaaatgctgggctggataaatcacaagccggaatcaagattgccaggagaaatatcaacaatctcagatatgcagatgataccactctaatgacagaaagaaaagagaaactaaagaacctctgatgaaagtgaaagaggagagcaaaaaagctgtcttaaaactcaacattcaaaaaacaaagataatggcagttggtcccatcgtttcatggcaaatagatgaggaaaaagtagaaacagtgacagattttattttcttggcctccaaaatcactgatgatggtgactgcagtcatgaaattaaaagacacttgcttcttggaagaaaagctataaccaacgtagacagcatattaaaaagcagagacattactttgccaacaaaggtccgtctagtcaaaggcatggcttttccagtattcatttatggatgtgagagttggaccataaagaaagctaagtgccgaagaattgaagaattgatgcttttgaactgtggtgttagagaaaactcttgagagtcccttggactgcaagatcaaaccagtccatcctaaatgaaatcaatcctgaatattcattagaagaactgatgctgaaactgaagacccagtactttggtcacctgatgcaaagagctgaccattagaaaagatcctgatgctgggaaagattgaaggcaggaggagaagggtgacagaggacaagatggttggcatcactgattcaatggacatgggtttgagcaagctccaggagatggtgaaggacagggaagcctggtgtgctgcagtccatggggtcagaaagagtcggacaggactgggcgactacacaactgcaagataaagaaagaaaatattgtactctgtaacttgtgggtgttgtataggaacattgagctcagtctgcacagagatgcagttcccattaatgcattttaagagacaaaaggcatctatggggcatctctgaaaattcttccccttctaatttccaggcaaaggaatttttttgcagatggttttccttgagcattctttctttagggtgatggaaatccatagtcagttttctcattcaaagcagactttccccaaggccacacacaaagcaagcctgccagacctgaagactgccgccaaacaccttccag

SEQ ID NO: 61989 - DNA, 1584 bp, Bovine  19866880893151
  misc_feature (1)..(1): n is a, c, g, or t
ntttaggatacctttggtggttgtacatatgcctttcagcaatgccaaacatggaattccaatcttttagaagatacaagtagtaacgtcagggtgacaagaaatgggaattatgaagacaaaaagttcagatgtctaacgataagcaaatatgatttttttaagtttttatttttaaatgccaatgcagtatttttattacaaattaatggaatggtataaatacttgaaacaaagatatgaaatcacccacaaaaagtagtggaatctctaagaatagtaaaatgtaacaagaacttttcgatttaaaacacttttaatgtgtttttaaatcaagttcatattattagcaagctaaaaacaagttgaaaccttgaagactttgctggttttgaaaatagtgaggcctgtatttctaacctcaggtgaatcctgtgatgcggagaatgacacctgagcaggtggtattatgagctccccttcttgggattacttcctgggaaaggcttcctcaggattgacagcttcctggtgtggccactggtccaggagagcccatctgtgtgggccccgcccattctgactttgctgtcttgctggcactctaggtggaatacatcaaaggccaaaggagagggcacgggcacggcgccgcatcttatgacacccctatgatgaggcagcttaagaaaactaatgtgctcatcagtgatgtaagaccagcaccagcaagcccgtatctctgtcttcctctttctcttgtctaccttcttagccttggtcaggggactgaccaagttgcactctttttctgttggtcttgtgttggaatgtgtagaatgctgtggaaatttgtcaggggatatacttttgcacacacccatcttttcctgcacgaaacattccccctggaacatacctccagagtaggaagggtagagtagttttgagatggtctactaacttctttaggctgctgacactgatcaaaggatgaagtaaaaatagactgggcatcttatctccaaccagagaaatagagtctccgctgatgactgtcgttggcatttaatacatttaagactggttatttactatggtcttgcagttcagacatactccaaatcaacagtataaactgctcaaaatgttttcggttgtagctttcaccctatgtcttatagtctcaatagcaagaaatgttctaattcttgaacctgctcttcagtctttagaagcgtcaatattattatcctgttcaagtctctgcaaagaagtagaactggatgttagatctttgtattcaattgaactttgaaaaaatcgattgaaaacttccttcccacactctctgagcccgctaggattatggacactgatgttgccatttgcaacatggcactgcgcagttgcatctcaggtttccctggtaaataagagaaagaaggcttttctattccacatcccgcatgaatgtgggtttactgtgaaagtgaaagtaaagttgttgctcagccgactctttgcgaccccatggactgtagcctaccacgcttctctgtccatggggattttccaggcaag

SEQ ID NO: 61990 - DNA, 1663 bp, Bovine  19866880910215
  misc_feature (1)..(1): n is a, c, g, or t
natgcatgagagcttctgtttggatgaggatggtaactacttagttttgctcatatgatggctggaaaaatttttctacagactagcttttggttccatacagttcaagacttgctttttcctctgttgcccacatacttctaagtgctgggtgctgtatggacaggcatattttaacatgacttctgggctgggcccctatagtttggctcagggggcaatacaagtgtttctggaagtcattcctagaatgggatagctaggaataacttaactatataaagaaacaactatgagctacgtaaatgtatcccattaacccaaattaaatgcttctcaactcaacttcctcttagctggatctgaaaaatgcctgttaaccacttaggtgcccactaggttcctctgtccatggaagtctccaggcaagaatattggagtgggctgctatgcccttcttcaggggactagggctgctgcctaacagaaatgcaagggggcgttggttgaacattcggtgactccaaatcactcattttttagcttgttttttcttcatggccttcatgggcccttcatgggcccttcacggccccttctgccttcatgttctttttcaaagaatttatgtatttctaagcagaaatctttcaaactgaagattgaacagaaaacccaagtgataaaatagatacatgtagacctaccttgatcaaagcaggggctggggcataaagcaccagctacttggcctcctctttcacttgtggtaagtctctgagtaagcttccagaagccctcagagttccctctgaacaaaactggaaaacactggtatagaacaatgattcctaggtaaagaattgtaaaatctgagttcttatttgcatttctactggtagacaatagcaaatcattaattgctctgagccttaatttttgcatttgtaaaaagttgacaataatatattgccttgttcagcctacatcaaagtgaggctatgagaatgaaataggtcataaatgtgaaaactcttagcctttctaataaaacgattctttagattattgacatcacaaaatcgaaatagtaacagcttgaaagagttatctctgatactctatgtccttgataatataccaagtatcaggtacgggccacccactccctgttcataatgacaaggacactgtgagaatgagtgtgacattttccaacatgtcctgggatgcaaaacccatggcagtgacataaaggatgatgactaagcatagcaagaaaggaatgtaaagtcacaatggcctgtaggctctcctggcactggcaaatttttgctggggttagcaaagtaagatgatattgtttatatggtatgatatgcagaaaagaaatgtttggaagtgacacattgatctcattttcatttagtgcccaagtgtatctgacttgtagaatccacactgtaaaatgacaggatataagaggatttaaatgaaagcagaagaaaatagggcagagaaaagtgaatacagagtatttggcctatttatcttgaaaaaaaaaaatggaagaaggaaggacatcaagtctgccatcaagtccatttggtacctaaatcattttagagaaatgaaatttcattcattcttaaagagacagaat

SEQ ID NO: 61991 - DNA, 683 bp, Bovine  19866880925379
  misc_feature (1)..(1): n is a, c, g, or t
nctactgggtataggcagtatagtttcttttatctccgaagaggtactcacatcactcctatttttggcatttgtctttgccagaactatgtccatggcgtcaggaatgctggtgaacttgtttctatctggaggctggcgatatttcttctcactgatgatttctgaagcccgtttgttcttttctgcctccaaagaacccaagggactccatcctatgcctttcagccactcaaggtcagacttatacaaattctgtgaaaatacaaagcatgccatcaaaattccatcctcatccggacccttgactcaaacaattatatgcattacaaaaaaaggtatgttttagacattcaataataatttgtctatgtagtttctgtctcttaatgattaaatgatcactcatatgagatatgaagtactatacacatatactatgagatttagtagaaactgacctcactttgtaggtcataagcttttttagcatggatcacatcattctgatcaggcagacatgtccacccatgcaggtagtttttgtagtccacatcactgaccaaggcctgacattttttggccagtaccactcccaacatgtccacggggctgctgaactttgttttccacttctcaaagtccttcttggattctctttcactctgcattttggctacatt

SEQ ID NO: 61992 - DNA, 1108 bp, Bovine  19866880980980
  misc_feature (1)..(1): n is a, c, g, or t
ntttcatatccttaaaaaaaatctgttatttatttttgctacacttatctgacttaaagatctataagttgtagtcaaaagagtcttactgacattactaaaatacatgtactcctcctcattgacaagatctgatccccatgacaccctatgaaggagggaagatattttatggattaaaaaaatgagggactgaaggattaagaaatttgcctatagtcacacagaaagatatggccaaaagcagaactgaaactgttaagtggtatctttcttttacactgaacagcctctccaagcataaatttgattacctaaaacacccaaaggcttcatagtggcttcttgtaaagtagggtaggtagaactactaagcgaaacctgtgagaacaaattggaatttccaaggattatttagttattgctaatccattgaattaaacactatgcttgcactcggcagacagacatctccagggtctgtccttcttggtttctgcccctcctttgaaaaggtcaagtgcactaatggcttgccttcagtcttcatcagctaagcataaaaatcttactggaagaagagtccctgacctatcgaatagtgaacccaattgtactgttaatgtgtgtggaatccacaagttggccacaatgcttgctgaaccacagcccaggcacacgccttgacttttatggcacttgaataatgatgttgcactttaaagggtatgagggggttttaaaaattctggtcttataccaagttttttccacttcatgtaaaaggagtattttccatctatctacgtgaaagggtacaggaggaagcatagggaaagacaagggaaattcttcttgtctatgctttttctatcttgaaacatgacctactccttgagatgttggacatacttaaataaccccatcagaattcgcaattgccagaacttgctgtctactaaaagccagactttctcgataaaagagctgtctcgaaaaatgaatggaatctacaaagttactagtcattttcattaatctaagtctccagacaaaatttcaaaaacacttagataagcactgtaacaaaatcccatacagaaatttt

SEQ ID NO: 61993 - DNA, 1648 bp, Bovine  19866880988551
  misc_feature (1)..(1): n is a, c, g, or t
ngaatttttatgcagatggttttcccttgagcattctttctttagggtgatggaaatccatagtcagttttctcattcaaagcagactttcccccaaggccacacacaaaagcaagcctgccagcctgaagactgccgccaaacacttactctccctacctccaagatgccttctctaagccaatttcatctgggggaaggaagagaacagtactagagtacaaaatctgcacaatagaaatagcacttacagctggctgagttattttgcatatgtgcatctgccccaaattaagaatacttgtgaatggaataccacaagtgtctttgaagttcattacagttgagagttatgcactaagggggtcttttccttgtttacatagcctgttatggtctcacagagacagagggaagtggagtaaccactctggtttacattataggatggttcgcagagatgaaaggattcagtgcactgagtcatgctgcctgtgttattatcaccagggcagatatctcatagagtaaatcaagttaatctgccagagccttgggttatgtatgtgggaattattatacaagataatttcacgttcctgggaaggttcaagtttgcagaggactgcatgacctctttgtctatttcaaatctatggtttttataaggtctctggcacattttctctctttttccttttgaaagagtttaattttgtctctacatttatttaatgaacacttttcttatatttagtataaaaaggatattatgaacctatatttaggaagatctcaacagaaaaggcaatcaccactgactaggagagaatgacaaaatcatatgtcaggcaagtcaagaaaatatggatttaaagatacttgaaatttaattgttttaaacagcatgcaggccaaacaaaatcgcatacaggtaacactttgtttaatgagtctatagatgtgagaaacatggaaccagagcagagggcctatggagacaaagtatgagataaatgtagatgaatccaaggaaattttgtaaccataactactgtagttgggtaatttggtttcatcattttttggtagtcattacaattgagttgggaactccatttgtaatgcatacatttttaaagacctttgtagggaattccctggcagactagtggttaggacttggcattttcactgcagggggtccaagttcaatccctggttaggaatcctataagttgcacactgcagccaccaaaaaaaaaaaaaaatttgtagagatgaccctctgagttctatgttcttttcagtccgatatcatccttaaaaccttccacaatagtccgaatcttctatcctttaaatatgtctacagctttctactaaacccctcaatgaccaatttcatctgagaaaatagaaaatttctataatttagtagaaagtcttctcctcttgaaaggatagcagaagaattccttcaagcttccagatatgttctccccagcctggaaagctgccttaaatatagtgtgtatttaccctaagcattttgcaaaagttaacaaagtcttcttagaacatctttctgtcttaatttttttttccaccaagctacccacaaaggcaggttaaaatttataagcat

SEQ ID NO: 61994 - DNA, 1228 bp, Bovine  19866881014255
  misc_feature (1)..(1): n is a, c, g, or t
nattggggaaaaaagaaatatttcagaaggggaaagatttttataagaggcttttaatataaatgggcaattatataaaaatactgacttttatacttagatactgtgttggagatacattatattatatttgatgtaaatttagtaaatgatatgcatgtaaaaacttaaaatatatgaatgttacttccttaaagacatgaatagtctggcaaaatagatttttgagaaatggattcatgacttttatgcttacagaggttttattgttcataatgcattgtggttttttttttctttttgggtgaagaatgaatcattttcatttggcaatgactctgaatatttttgcaagagtgattgtactttttaaatcatttgtgacgctcaactgaataaagggtggtgataaaaataaaaattagaaccatgattcttctttttctagaagaagaagacaatagtataaattatgaagactgagttttgctgtaagtgatacatagaaggagagttctcaagcagatagaaagtttgaacatggaagaaaatactttactgtgtttaagatgtttatattgaatagctgtgaggtacaaaatcttctcagcaaaattcaccttaaatgtcacactcagcatgagaaaatctaggattagtaggccagaagcttatacaattttggaaactttaagaaatagtagaagattaaaaaatacataatgagaaccaaagatggtatttatttggaatgagaagagaaattttaaaaaattataaaataaaaaaacagaaataccacaagtatagctatatccagaaaaaacttcatattttaaattataactgcctgacacatctttataatacaattttatttacattttagctgattagtttctgattgctttttcatgtgaaatgattttgtaatattttctgtgtaggggatgtgaagataatccagtgtttcttttaacatggttgattaaaatttgcttgatagtttgatagctgggatgcttaagtattgatactgttgtttagttgctaacccgtgtttgactctttgcaaacccatggactggagcccaccaggctcttctgtccctgggattcccagggaagaatactggagtgggttgccatttctttctccaggggatcttcctgagccagggatccagctcgagtctcctgcattggcaggtggactgtttactgctaa

SEQ ID NO: 61995 - DNA, 1173 bp, Bovine  19866881016906
  misc_feature (1)..(1): n is a, c, g, or t
ncatggaccacatcatcttggggtcatccttaatgtttctggctccaatgtggtggccaagctgcatgcgaaaaccttccttgtacttgtactaaaggaggggaaaaaaaaaacacatatcttcgtcttttgaagattaacttatgttactacctttgtggtgaattacaaagcacagtaactccaaatattttcataaggctagatagccacagatttaagtgcttttttttttttttgataggaaaaattaaaggctaaatccggctacagattccatacataataaatatacccttgagtttatcctcgtcccatgctgcgtccctgggatcatttcactatttttaatttgtcacttggaagagtctattcaatttaaaattaaactgagacttttttgaagtgaaaattgcaatctaatcagtacaaacaagggataaagtcttacttcactggcaatttcccgggatgctttagctgctttgattggtatggcatcaacaggaagatcgtaaccttttttcctcaactcctcataacccattcggtagaatttctgttaagaaatgaaaatcactttgaaaaaaactgtttcccattaacatctgcagcataatgaatccaatgtgctaaatattttaagagttcttgagaatagcttctgagctctagaatactcaaatgtactagaaattgtgcccattgattgctaataatcttgttttaaactctaaagctcttcaattacttagaccaacaaagttaaatgtcagctgttcccaaatatttatgagaatgagacagaataaattggtagataaatgaaatatcatcaaggtgctgttttccaattaactttgactctttcactagaagtttttgttagaaatgagcaatgtctttgccatctcaacactagagtctatttcaccatatagggctgtccaaaagtaggatccacatttttaggcaagaaacaaagcacttcatagtttttacaatgtaagattttttttttttaggaaagtttaaatatcaaattttaaaagtttaagtgaaataatttctttcttcagatttgttacataattaaatgagaatagaatttaagtgcacttcatttagaaaccagagttgtttaaagtacctagttgaccttggacttgtttt

SEQ ID NO: 61996 - DNA, 599 bp, Bovine  19866881033220
  misc_feature (1)..(1): n is a, c, g, or t
nttctgtgttcttctgtttaaatgtctttcaaaatctgtttctaatgtgaatattttgtggattcccaagaaataccaaaattttaaaatttcccatagaattcaagcattgaaatgtataatgtagtattttataatataatataaaacaaaattttatatctttaggggactatcattatacttctgtttaatggtctatcacttaaaatttcagaatttgtacaagtccgaccttcagtggctcagaggcattggctggttacctagtggttctcttgaggatgagaagaacaagagagcttcccagattttgagtgaccacgtttaccgtcagcacccagatcaattcaagttttccagccttatggactccatcccgatggttttggcaaaaaacaatgctattaccatgaaccatgtaagtcctttccttaacttgaggtggctgttaatttttgtatgtgtgtgtaaacactgaaatctgtttctataaaagaaaaattacattcggttcttttgcttggccttaaagtggtttttaagtgggcttccctggtagctcagatggtagagaatctgcctgcaatgcatgagtc

SEQ ID NO: 61997 - DNA, 1269 bp, Bovine  19866881043126
  misc_feature (1)..(1): n is a, c, g, or t
nttttgtatagatactggtggatgtgaacagaaagaaagaagatttgtttctccaaactacttctggacagcctgctcaaataactccctcatattacccatttgggggcactgtttttctttaaattcatactacaagttttatacttgatactttggtttgccttctacgtctacattcatgaaaacattgtgaacacctcaaaggcaagaactgtgcttctgggctgtcctccagtataggattgtccaccgtttcccaaacttcagtcattgtgtgccattcccacatgttctgccataaaattttgtgacaatactacttgtacttcatattttactttgtcaacttgatttcttgtctacataaatatatatcttaaagtttaaacttatttacactttttattttaaaatttataatcctatctaagtgggcaaaatcagtgtttttctagcacacattaaaacaaatgtaactttttaaaaatgcttgtccatgtactacataaatttatcccaggaaccacctaggcatgctgcacttcaagaaacaatagaattctctgtgcccactggatctctgtaagtgtttatacattaactgatactgataagatattgaaaagaaaatccagatctgtgcttaaatatatgaagtgtggaaataagcagagaagtaagtcatcaaattgttgtcaaagttgttcttgaatttggaattttaaagcaagacactagtaacaacgcccttcattctactcaaatataattcctggggaattatgttaaagattagtacagttttatctctctgactgtctgtgaattagtgtttgttaaggccgagcaaagaggagctctcacatcactggcaatgtccctggaagccttggcatgctgaatcccaatggcatctgctttcaggtcatagccagtcatcttgacatcttcccaagcttgctgatattgtttctgcaaatggagattgcaatgacacagttaatctgaagagggggctactgactactgaactactacagtagttcagtacaatagttcaatacaggctactgaacactgtattcagtgttcaagaatacacgttaacagttacactgaaaaactgaccttcccttaagatttataaaatagactggtttcatactgaacttaaattctagtacattttaatgacatttagtaaaattctcttcccggatctttttttttttttttaagaagagaatttaaaagacaacaaatcat

SEQ ID NO: 61998 - DNA, 774 bp, Bovine  19866881068283
  misc_feature (1)..(1): n is a, c, g, or t
ngaggcttgtctactcaaaactatacccatagcctccccctcacttccccagctttgtcacaatatctaaattattctatgagtcacttttggtggtgtggggggcatcaagacacaatgttacacaaatgttacatgatgttaagcactaaaagtctttgacaactaagcatgggttagcaatttcaagaggatggagacaaatgggccacaggaaaaggttgtttaatggaggagagaaggtgagggaggaagcagagctgagtgctgcctgggaggagaggtataggaagaaacaatcgaatttcacaacccccctggatttgtcagtgatggtgggtgatgcgaagtcatgaggaagatggagctagggcaggaagcaagtcagtatcatatggaactggggcctctaccatgtatttatgagagtttatgtcttatgtgtttttattactacatttacatcttggttcccagaaatgtaaatagagataaagaggctgaagtgttttttttccttcttcttttttttttttaagcatcagaagttaactgtttggcaaatgattatttggtatgcacttaatagcaccatagtgtccaattcagcccatttgaatgaatagtatttccccaggagaactttattcactctggcttgatggcattaggaaataattttagcttctaggcaatatatacttctttccctcctcactccatctcatttattgctgtaaatactaaggcaaggatttaagcacagaacccggg

SEQ ID NO: 61999 - DNA, 2186 bp, Bovine  19866881089033
  misc_feature (1)..(1): n is a, c, g, or t
ntctaacctgctgctcacgtatttttgatatggtcattgggaactaaggacgccatcaggatcacagtcaatgttattcattcaaaggcaagagaaacaaagctatgatttttggtttatgcaaaccacaaattctaacatgcctaatcatacaatggaaaaatagcgagtaatattcagctgtgaattagcacaatgacattctacctacaagattatcaaagcattctttaaaagtaaaataaagcagaaaaaaaagttcctctttgtcaaactttacatttacccatgaacctccacattgagattatttgtggtttcaatacatatacacaataaggtatttcatattgcatcatcatgttttctcaaacatctaaacaaaataccatatctgtcaagaattaatcctaacttcaccaactccaacaaatttttaaagatatatcacacttaattcaaaataaatgtcaatattttctttgcggggggggttaattacacaattaacatttccatcagtatgaatgccttttattttaccttgttttgtttttttaagcatttagtccactggcttgatcctgaagccatgaatgaagccaaaaaccctgcctcatggctttagttactgctgaaaatgcaactgtattttctgtttcacaaaatctgtcacatggttgaacacatgccaccaaactgccatgacttagcactgcactgtggcatgctcttctcattcattaaactgacttcccattgtcttaaggaaagagcatagacattaaagacaaatgttatatttctataagtagacgtttttaaaccttctgctgtttacagccaagattcagattcttggctctggggtccagactactctcacataaacttgtttcagaacatgtgctctacatttgtttcctaggatgcaaatggcttgggcatgtgctgactaaaattcttcacaccaaggggatttaggtagattcctatagtttggcaaacattctgctatgatatttgggtaaagatcataaagtaatgtttttatcatcttcctgacacctaaccattggacagcttttcagattgtttccagccaattttattaaaatactgaatcaagcttcacactagaatgaatgtgtataatattgagctcagacaatatcttttggatacatcaaggataaatttccacatccacttaaatatattaattgatgaggatgagctttctgcctaaaagaactctgatgcaagagggcagagccacacatatagtcaaaatcgatgagtgataggcttcccttcagggatgctgtatgtgaggaaacttggagggaaaaagcaataatattgctttctgttaacatcccagctacttctttccaaactgctttctctcggcaggtttgtgtcagaaatccaagagaaatgaaaaatgattagttgccaaaattaatttttctgatactgttcagggggccatgaaaataaaaccatgtcttcattgcccaaatattagaatttaaagaactatcagccagaatcacaataaaatgaaacttgtttggaaagtgtattacaattccttttaaaaggaccaactgctcacctttggctgacttaaaatgaaattccatggagcagtgaccaagatggcagagtgggaagaccctaagctcacctcctcccatgggcagaccaaaattacagttgtttacaaagcagttattgatgagaacaacctgaagactagaagatcttctacaagtaaaaatataaaggaacgtaaaatgagtagtagaggcagacacacagcatcgtcaagacccataccaccaggtagcccacacacagaaaaaggaggataattacaattgcagagcttctctccaaagagcaagggatctgagccccacatcaggctcccaagcccaggggtcctgctcctggaagatgagcccacagaacatctggcattgaagtccagtggggcttaatttggggaaagccagtgggctgttggaaacagagactccactcctgaaggacacatacaaaatctcgcacactccagcccctggggcagaagcagtaatgtgaaaggagcctgggtcagacccacttgctgaacttgcagagcctcctggagaggaaggaagcaactgggactcaca

SEQ ID NO: 62000 - DNA, 894 bp, Bovine  19866881101487
  misc_feature (1)..(1): n is a, c, g, or t
nttttgagtttatttttgtatatgaagggaatgctctaaatctcactcctttcacatggttaaaatgaaagcaaaagatataaacacctttctctttcatcatgaaaaactaatatttcaagctatgttgaacattcttaccactctcaagggattcattaagcattttaaaatatagtgtatatataatttgtgatagtgtatgtttacctctctatgctaagaattttaactggaagatgatagatggcctaaaggcaatatttagggaatccatgaattctctgaaaggtaaaggtgtgaaaaacctccattttttctgaagagataatccaaatattttatcagattctcaaatgtaactataattaatggtatatttttccttagatctaggtcaatactaattactaaagtcaataaagagcaaggttcactatactaagatttttatctctgactcatgatttttctttcaaaattaggccactttttgaaacttaattttagaagttactcttccattagaaaatatgaaaatatcttaatgttttccaaatgatgctaaaaattatactcaatattctactaaatatgagcacataagtctttcaaagtgaaatggtaatcaagtacaaataatttctctcctgaaacatgagaggcacaaaaacttggggaatcattctacttttaaagttctgctcagcagtttgttgttatgaacctgatgcaatccttttacatctctatccttggccatattacctgggacacaatactaaaaataagacagattgagaaaagcactcacatcactctggtttttggctgtcttcaatgagtgcagcatcttggggtcatcattaatactgagagctccaatcatcttcc

SEQ ID NO: 62001 - DNA, 3387 bp, Bovine  19866881164577
  misc_feature (1)..(1): n is a, c, g, or t
nttagtacttgcttcaaatttgttcgtgagtttcctttagtctctcatcagtaaaatgaaataaaaatggctattgaaaaatttttatgatggctagatagggtagtatgtgtagtatgtcctgggtggagcctggcacataataactgcttaataaactaatttcttccctttacattcaagtcaccatgaaaattagttttatttaatctatgcttaaaatagcctgtttatttgatttatgctaaaaataaccacatttacaagaactgaaataattcttaaattcatccatctcaaaactgtaagagaacaataaaaaaacattttttaacctactgtctccagccccactaaatatctttgcagccccacatatctttgcagaataggaaacagtttcttacccaattgttctcatcaaggtcaagaattacctggttcattcaagatgaatgttgatttcttacatgcttctgtgtatcttcattcaaaaaaaaaaaaagagggtggagttgcctttaatttgagaacattggaaattttaagtactcattttcaagtcctgaccacattcattattttactcctgttaattacttttgcctatcatgtagccctgaagaagaggcacatcaaatataaatgaagaggactcagtttccttttgtctagcactataaaaaggcccaaggacaagcctgatcataagtatttgactgatcttggcttcagtcaattttgaatgaacaatttttctcttggccacagagcttctctgttggattagcttttcccagatgttctgcctcaccctagacagatgctgttagtttctatgccaaagggtaatgatgcttttaagcctctcccttttattaaaattaggtcagatgaagtaggatttctttcttttttttttcagactgctgagaggaaattaggctatttttttttacttctcaaattttcagctggatttatttcttttaaattgcataattatgttaattccctaaagactgtctttgaagattagattttagaatggcccatgtgaatttcttctcaacccattaccaatgataccttcacgtcatacttagtaaacaaaataaaaaagcaaccatatcttcttttttttgtcttaaactcacatttacctgttctagttctcttggaatgtttgaacttactagacattctttaaaacgtagacttgatgacactaaaagtgttttccttgaagcctggcctctttttccattgttgaaagaataaaatgtttggcctgaagccacaaaatgattcaagcacattttttcccacttatacataagggcaaacttgagaatttatcgttcaaaggaaaaatataaagtataagagtatttgactctctagttacaaaataaacatttctagaaatttttaagaacaaatgccctcccttgggattttatctcaaatacattaaatttattcttgtctactttagcttttccttataaaaagttgcaacataagagaatgtgaattgtcacacattaataatccacattaaaaacattcaattacatccttctcaaactctaaaagttattttaaaattattactaattaagaattaaattcttgtaatggttcacaagttaaaaaagactaaatactacaggtagagatgacttaatgcagtggttctcaagctgcgttcccattggaatacctatgttctaacttctgtgtatgtctgtcttgccacagaaactgaatagtgggtattttgccaattcataaagaaattattataatttcatcagttttgtccttttgactcataaatccctggttcctgctacccctctgtctgctagcaattgccagcaatcaacaaaatgaatagagagcaaatagtgttaacaaagatattcagaaacagtggatgatccttagcttagcactgttggaatacaggtacatgctcatggcagtaatgttgttattatatcatattctctgctggtaaaattgatcctaattcaaacttgcagttaaataaacagacatttttggtaatttcatgaaaagaacaaatgctgagcaaattcaagcacatttcagagttaataatgagtacaatttgaaggagttaaacctgctaaaagtaaaacttcaagttcaacaaataacttgcacactgtgtaagtaagaagtaaaagaaagaggtcttgtaaaaaatttttttttaatttaaaggctgaacatactagtttttgttctgtatccaaaagtagtcttcctttcatcacagtcttcctttgatggaaatattaacatatttttagaatgaaagtgggcactgtgtctaaaagttactacttctttcctcagaacctctatcgccaggccatggaagaagccaagaaagaaggatatgacttaagaagtgacgccattcctatcgtggctgccaaggcctcccgggagattgcaagtgacgtaagagctgatcacatgcttccatctgttaccaacagcccagccacctgcatagggcatcacactcttggaacacagctgagagtctctgtagtcatcatccacccacctgccttcattgcatagtcaaataaattgaggctttgagacagtcagtcacctgtccaagtttcatagagatacactgggttgtggttcctttgatgctcttttggtccttgcttagtaggactgagtaccttgagcaaagttaagtgggcatatgttgagctactcataaattctcatgagctctcctcaggctacactcaaggcaaagatgccaggaaagaaacaggtttaactgagttcttccccttgacttgagaatggacataaaatagcaaaaatgttaaatatttctttgctgtggggtccacaaaaatcaatattcctttaccctaaaaatgaatatgtgaggttcctgtacaacttaaatattaatccaagagtagcaaaattgtccattttggtaggtttttcttttaaatcataataaaattgaataaccatttaccactttcagtatatagtccataagtatatttacactgttgtacaacagactttcaaaactttttcatcttgcaaaactgaaacgctatgctcattaccaacaagaattgcccattttaaaactactccttgccaattattatgcagaatgccttaaaagaagaaaagtaatgacccattataaacacatccctccaatatgttctcagttcggtctgcccacatgactgacttctgagaaactgctgtcactgtaactgaagttcattctttcaatgttcacttttctatcacattttttttgtggttaaaacatatgatttgctggcataa

SEQ ID NO: 62002 - DNA, 1775 bp, Bovine  19866881184349
  misc_feature (1)..(1): n is a, c, g, or t
naagaagtgttgtgtactatagttacagttttaattttttttttaagacacttgtgggctgctttaaaaaattcacctgtgtttcctcctgcagctgaaatacaaagaagtttaccagagaactaagtccaactgtaccattgagccagatgctgttcatatcaaagcagccaaggatgcctacaaagtcaacaccaatgtaagtccccaaacctaacaggggttcatcagcttctgcaggacacatgggctctttgggcatcacttcaggcagttgtgttctagtgactccagatcaagggctgggccctggagcatgagtgataacgctgacctctaaatggttctcaccagggaaaggtgggaaaaaacaagggtggcccatggatattgtacccactcagccgctgtgccaggagactgagaaatgggagtttaattctgaaatgaaggttacatttttgaaagtgtctccagtctttttgttcttctcctgcctcaaaccctggagcctccttcttctgaaaaaagagaactcttgagctgcttgatgctgtcaggacttgacctagaccttcctcctgctcacatctctctgtgccgattcttctttgtgtgtgatggggcatcttaaagcctcaaccacagggacttttttgtgcatttagataagtattgacttcttcaaaatgtatgtggttatataatgaaaggttataaaatccaagctgtgaccactagtgccacagagaattgtatttattagggcaaacaaactgaaaatgctttaggggctgacagggagcttacaggtgtcctgagaatggaccgagagataagtagcagcatagatttgggacaaagcaaatgcagtaaaatgtacattgtagaatctaggtgctgggtatatggatattctctgtaagattcatgcaacttttttttttttttttgcaactcttcatatgcttgaacattttcacaatggaaaaaacttgatcaaaattaatacatgaaagcatgtgtatcttattgtacacaaatgataccttgaccaagaaaaaggggagacaaagagagtgaagacacgtggctggtcgtgagggcaagggcactcacatgaaactacatacattctcttcctcagattcagcctgaggtggccagttctccagctcaaatgcaagcctagcaagtacacatgccctctgaagccaggctgcctgggtttgaaccccagctccactgctcactagctgtctcacctggacagcttgcttaggccctctagacagttcctcagctgctgatttcatgaagttgtgatgaagattaaatgagttaatatttataaagcactttgagaagtgcctggcagaaaataaaaagtatttaataatttttttaaagttgtctgaatttagttagaagttaaaagtacttgactcaaaataattaaactgccctggcagagttagtttgaaaaatcatttcatctggaacctttaaaaattattagcttctattttgaggccaacgggtcccataggatgacaaaactagttgcataagttgtatagaaattttaattggggctctcttcttgcataaagaaccatgatttgttaaaatgcaagctgagtccctctgtgctgcgtgtggtggttgtgaattcaggccacttaatgaactgacctgtttctatcttgttaaaaacagctggactacaagaagaagtatgaagccaccaaagcctactggaaatggacccctga

SEQ ID NO: 62003 - DNA, 2397 bp, Bovine  19866881184825
  misc_feature (1)..(1): n is a, c, g, or t
naaccaaataaatatttgatgaatcaacgtactgatggatgaatgctgtcatcactgttgccattgctagagccacccctaggagtttcagtgggagggggagaaacagggaaggcttagcctctgtgagcccagctggtcattttttcaccttgagcctggaatttctagcgtcacccatttttgctccttttaaatttcagggccctggggccttatctcggccttctcactaattattgcagaaggatcttaggtcttaacatggttaaatctgaaataaaaactgtccaaaagaagccacagtagcacttactaaatttgcctgatcatgtgaatcacagttttctgtactttttcataaatgtagcaaatcaatagctttagggttcaggcctggacatccatatttttcatcagttcgggttattgttataatcagaaagcttaaggaaatggatgcagaattgcttttttttttttccagtgagagagaatgggctgctccacataagggatctaacttatagatgtttatgaatacccgatgctcatgtttgaagtgccaaaacttattttatatgaaaaatataataaataattttcaatgatttatacatttctgccttcataaacagtgcacggatatatttaacatttttctaggcaactcagagtcaatagtgtgaacccatttgtttatctaccaaagaactcctgagcaccagcctcagtcaaggctttggggtagggattccacagttgcttttagtattctttatgatgcccataaagccatggagttctttaaaatattaatctatttgttacccaaaatgcaaggagatcaaaccagtcaatcctaaaggaaatcaaccctgaattttcattggaaggactgatgctaaagctgaagctccaatactttggccacctgatatgaagagctgactcactggaaaagaccccgatgctgggagattgatggcaggaggaaaagagggggacagaggatgacatagttggacggcatcaccaactcactggacatgaatttgggcaaactccatgagacagtgaagcatagggaagcctggcatgctgcagtccagcaaagaattggacacaactcagtgactgaacaaccaccaccaaaatgatgagttttccaccacagaatctagctatgtatatcaaaatatatggatataatttctactcagagtattaagatttaatggctaccttgttcctcttagctgagatgaagcttatagaggatttattaatagagtttatggcccactgcatttttcaaatggtctcaacaatatcctcctccgctacatgcttttctgcaatgtgaccttcccatttgttcacccagaggaggcctatgtctcttcaccccttgaatctaggtgtgcatactgtgcccagcaacataatgcaacagtgactctgtgtcagttctagaagtagcccttaatgggtctgggtcttctaccccagcctcttaggacacgtccaccacgctgtgagacaaccaaaccacaaaggccacgtatagaggttcctgtctgtacctgagtgccctgagtagctgagtgcccagccaagccatgatcaggcgccagcgctgggagcaaacaattcgtggttgttgcagctctcctgggctgcagctgtctgctagcacacgtaatagagcattgactcagctatgcccagtctgctcacagaatgctgagccaaaaaggatgactgctgtctcaaactgctacaatttagattgattgttacacaggtatagataattggtcctgggtttgttaaatcacactagaaagaggccaaggtgagaggggctgcaaagccaccccagtacttacatcactgacttcatctttgaccttccggacatgcagcaacatgggcgtgtcgtgaattgtggtgtagcctctgggtttcgctttgttgtattccaacttatacagtatctgaaagagatgtcaaggcagaaagagccaactttatgcatctcaatttatcttggaatatatgtaaaaatataaagggaacatggttgctattgtcattgagtatatacaaaggagagagagtcccataaactcatcaggttttcatgctttctgcaaacgctcccgtgcttctacaatgtggtgtctgctaatttggctgggatgattctttactctaaaagaagagtcctgagcagagtaggacattcagtgtccctacctccctcccactaaatggcagtagaatcttccaaacagataaccatctaaaatgcccttccacatttgcaaatacccccaaggtcaagaaaccactcagagctccctgtacttacatcactgatttgtttgttga

SEQ ID NO: 62004 - DNA, 2297 bp, Bovine  19866881192915
  misc_feature (1)..(1): n is a, c, g, or t
ngtgttggtggatctatggatgtttattctcacagtcaatgaaaatgttgtagaagaacacttaataatataaaattttgttcacaatatattaagtaagagagcatgttacaaagtgatatgaggcatgattccatttttgtaagaaaaaataaaggacatgcacaaagaaatataattttaagaaatgtaatgaagggtttattgaccatcctgaagtggtgagatgcaagtaatttttatgttattttttcttatcagaagtttcaattttcccccaataactatgtttttccttttgtaataaggaaaaaagtacatagagtaatttaatgtgaatctgtgagccaccagaattggctaaaagctgtctagcagcctacaccaagacatgaacattttcaggtccctgtttcactgtgcccataaaagaaaaacaaatccaattgcctggggagaaacacagctctttccagaactaagacctatgaaaaatttattttgtgggtttctttaaggggtcatgggtggtataagagacaatgtatttatttcacagcatcctgagagaaaatacagtcctgagttttatagggctctttttcatattgttttacaacatatgttgatgagagatagttaatgcacatccagaaaaaacagatttatctaggagaccaatatgatgccatccaattacatagttaatttatcaggcttaatctggtgaagatttttcaatagctaaaggaatagatagattgcatattcttcagtcttctactgaggaacaaaaattcaaggttattatccctggcaagtaacaggggtttgcaatttgatctcatctgttaccttgtgtagcttatcctttgtctgttggctgagcaaaataatctggcaaaagggacacctgtcacctcttaatgaaagttaggagccagacaaggagacctgcctgactggagactctgggcaaagcatggtcaggataatccacagaatataaatcttgaaccactttagctcatgctcaaataggcagataaatcaggctcaaatattttcttgtaggacactgacacgatacatgtggcccatgtggttttataagcaagcacgacaaaatacctcatttgttaagactaaacagaaccaaataataacagctatgttaagaatccacagaacactgacttgagtgatataggtttcttagtgtatagatcaggacaaaatgattgtatatctggtttaaaagaaatgtgtgcttaggtaactgagtgagttgaattacttaattatgattcaattaggtaagagaggacatttacctaaaagagttacttttttcagaatgacttctttatggttcttctttttgatattaattagttgctatggtagccattaaaatgattcccagttctttactgtgttatctgcagtgaagaggacacattctctctgagacctcctagtaattgtggagtatttgctgtaaccattagggagattatcatgtggtatattttccatctctctgtttctgccactcaaaaacatgtttatattatactgggaattctgtgctttgttctgaccgaaaagataaactcctgatgtagtaggctttacactgtttcccatgtcccagtcaggtttacacaaaggcagaagtacagggcttgctaattttgcccctggtcaaaggaatgtacggagaagaatatggcgtctttttttggcagcaggttttcttgcatagattctctatagggctgtcctcactgcataccagctaagtactgtgattgtgcttcttgcaaaaataaaaatgcttgccctgttgattgattgaactatggactactgcaacgcttggaaattcaatgaatttcttcatggcaattatggttacagtgcttaagtgttaccaggtgtattaaaaatccagatgttggatgaggcagtctggcatagggcagtcagaggccccttgatcatctgaggagttacatattttctgccagtttcacttaaaattttattgatgaaaagggggagagctggtaagatatgcatttgagttagaatttggcaaatcatacttgtttaaaatatatagatataagcctcctatcgtatacttcttgtgactggtctggattactgcaccaggcttctaatcggtctctctgttttctaccttgttctctctctttttaaaacaatgtccttttttccccataatttcatttatttctagttgccctgggtctttgttgctgcacgga

SEQ ID NO: 62005 - DNA, 1623 bp, Bovine  19866881197341
  misc_feature (1)..(1): n is a, c, g, or t
ntcaaggatggagcttggctgtagaactatgatatagtagaaatccctagatttcagagacaatcccaaggtcaaacccagctcctctatgtctaagctgagtgatcttcagaaaggtatataaggcctcacacttgtcatttttttgaggggggaggataatcatacccaattcaagttttttaaaaaactttatgcttgtctctttcttttagctgaggtgaaattggtatttaactttattgagtatttttttgtagagatcaaccataacatatgtatagtgcctgagtcatggaaggaactcaacaaattttatgatgtttcctattgttattttcacagtgggtgctctgttgatgagtatggtatagaataagctttctggagttttaataccccaaactttgcagtttgctatctgagagccaatttcgtactctgcactgagcacacaatttcattgccctgatatttggaagacattcaggcaggtgtgggagaactcagaaaagttcaattcaacttcaaatgttcatattaagggcctacctactggatgaagaaattagccgaatatcaataagcagactgccagaattctggaggaaagcagcaattatctattttgtgtaataaaactgaaggcagcagtaacagctcactttccaaagtgggatttccacaagcaactaatttgagatgtgcaccgacactgccatgcacagtgtttctcagacttctgagcaaaatgtgaacagctgtatgttttttacatgatggataaagagacaccaatggcttgagtcagctctgctgaggagaacgtgcagacaaaagtattgcatttgtggacgtctccaggtcactgctcagaagaatgtgtgctttacccccagagaacttgttttaggctgtgcttccccatgcacacagaaatgtggggtcagggttaagaagagcatgcaggtccagctaggattcgagctttattgaaggcctgcataagaatcaggcccatcacctacctctcccttctctggaaaccctccaggacatttctcactttatgagcccaggatgaggaaggtatgactcaggcaactggccacagctgaagactcaccttgctcacgttcagggcattattctttgctaggacaatctctggggtgtctgtaatgcttgtgaacttgagctggactgcaggctggcggtacttcctttcactcaggatttctccggctctcttcgcatgctcgacccccacagagtcaatgggcacccacccaatgcctcttagccactcaagatcagccttgtaaatagcctgaaaacgaaataatgtcaaatatttgtagaaattacctccacaacctgatgtttcatgatttagcatagacagatggcgtgtaattttgcatctcacttgtgtaaatttctgaaaagacacagtactgttttactttgatgcagaacatctagttcaacactttgtccctgaaggtagtcaattcctactgttttaaagacctatgaaatctctaataatacgtgatttcattgatacaaaaccactttaagaaaatttctgcctgcctcccaatacaaagtgtttattct

SEQ ID NO: 62006 - DNA, 1858 bp, Bovine  19866881205280
  misc_feature (1)..(1): n is a, c, g, or t
nctgctgatggacatctaggttgcttccgtgtcctggctattataaacagtgctgcgatgaacattggggtacacgtgtctctttcccttctggtttcctcagtgtgtatgcccagcagtgggattgctggatcataaggcagttctatttccagtttttgaaggaatctccacactgttctccatagtggctgtactagtttgcattcccaccaacagtgtaagagggttcccttttctccacaccctctccagcattcattatttgtagacttttggatggcagccattctgactggtgtgaaatggtacctcatagtggttttgatttgcatttctctgctaatgagtgatgttgagcatcttttcatgtgtttgttagccatctgtatgtcttctttggagaaatgtctatttagttctttggcccatttctttaaaaacataaacacgactgagtgactgaacagaactaaactgaatttaaaatcaaaccatattagactagtacaaggtagtaccatttatatacattttaagtgaaagggcttccctgatagctcagttggtaaagaatccacctgcaatgcaggagaccccagttcaatttctgagtcagaagatcggctggaaaagagataggctacccactccagtgttcttgggcttcctttgtgactcaactggtaaagaatccacctgcaatgctaagtacttaataaatttccaaacaatactttaaatgtggttaaaaaaaatttttttaacttacatgggaatgatttccataaatttcaggatcaataaaaatatagtggggctttttagcttagttctctcagtcttatttatttaaaaacaaatgatctgaaaaaattatgtgaaatatgcttcaagtcctcatggtaaacttatgatgtataaacctgataatataaacctgttatattattttttgaacacttgaattacttcataataaaaaccataagatataattacatgtcagaataaatccataaactacattttgagataccaacaaattgaaaagctatgctttttcaggagcaatttgttttcaaacatttcatcagaccttttaaacagcttctgaatttaccttaacactcacgtgtaagtgagagctaaacatttgattcaagtaagtattattcttcagttaataatccaaatcctggaagcctcactcatagattagatgctagaattgccaaaggagcctttaaactttccaaatatataaaacactcttgactgaccttaatgacattagaagagtcaaacttcgacagagtatttaatatttaattataccaggtatcatgctggacccttattttggaatgcttatgttggcaataaagaccatctctatcagtgggattaggagaactggatacactggctgatttacaaaccagttttgcaattgcttttacaaatgctagttttacaaatgtccttccccaacttcaataaacacaatgaactcagagctgtaattagaacctggccttttatcttttcgtgggaactattaattattcttatttttcatgaaacaactttccaaagaaaaagaattaaggaaaaaatatattgtctcacagaaagattgataatccctaaaaagtctgtagctgtatttaagtcaaaggtcagttcagatggaaatttcaacttattttccaatttcttctcttttaaaaagccatgtgacttaaagctattcctttgatacagcaagaaaatggaaggtctcaaatgatgagagtagatgataataatcataattatgataaaagcaccatcaaggtactctccaggaagatat

SEQ ID NO: 62007 - DNA, 804 bp, Bovine  19866881255087
  misc_feature (1)..(1): n is a, c, g, or t
naaaagaaaatggactaattgatctgttgtaagataaagtgtaaagaggatttttgcattgactatgaggtaagatcaaggacctctaattagcttccaacttccctgactttattctaattctataaataataaagtgctgtctattagcagtgtttcagcaccaaaaatacattgccaaactcatctcatcataatgccactaattatttacatcttggcctccttgaggttaaggtcatccttttactcatcttgatacccctgtcatgaagcacaaggtttacttaataaatactgtggattagtggcataggaaaaccaaagtatcacattggccaaaaatttcattcgggtttttccataccatcttacagaaaaaccacagagaactttttggccaatctactagtatgacctgtactcctctagtaataaagtttaccctttttctttccttcactgactgccaccacaatcattacccactaaatttatacccagtctcttacattgaattcttgtcctaaagaatttaacatgcctgtggaacccctgcacatactattaaggagtcatatggaatctgctttagattttgaaagaacttttgatgcccccaatattttcaccacaaaaaaaaaattttttttttaaagactttaatcttttgcttgctgctgaggaggagacactgtggtgaaacagaaagacattagactggggattggatattaataatagcccttaatttactctgaatccaactccctttctctgcccgggcttcgtgtctccatctgt

SEQ ID NO: 62008 - DNA, 743 bp, Bovine  19866881267795
  misc_feature (1)..(1): n is a, c, g, or t
nacactttgttcctattcaacaacaaaagagtctagctattatttgtttagaacctgtaagagaaaacatagctaagtactctatttagttttattttttggataaaattaaaattctcatcagaaaattatctagactttttgagactcattcagtgtaatatggctcaaaaaaaccatataatctggtaggagggcctgatagtattttctgtcatgtatgttttattgtttaaagtgttatggtttgggtttttctgttaaaaaagtttccagtaataagtgggatatttgaatcctgtaatttgtttttagaatatttatttggtatagcttattttagaatttataaaattaaatgatgcgaaactaatgctgtataagttggagacaccaaatctatttgctgttactgtattagacaatggctttgttttctttgacatgatctagtagatttgaatactcaaatttgatataaatattacactgtaattaccaatgtgaaaaggataaatatttgcacataatgaaattgttttatttttataaaaacagacagaaaattcccaattaaatatgaagataagtggcatggaaagaaaatcaagtggaaaaagagattcttttttggcacaaacaaaggatacaaaagacagtatgaaaccaccagctaaagtatgtttttccaaagtgtatttaatagtactcttaatattaatatatataccagcttgagaaca

SEQ ID NO: 62009 - DNA, 783 bp, Bovine  19866881270524
  misc_feature (1)..(1): n is a, c, g, or t
ncgaaaatagaagttttgggttgctttaattcttctattctcttttttcagtaggagagatactttatagtgatattcacagatgtgttaggctccattccataagaatgctaatggtgttgtcttaacaaactgacttggatgggactggagtaaccccatgcacgaaggatgcctgctgctttagttgttactgtagacctctccataatgcatacagttatgagttgataaggagactgtataatgaacaggggagcagcctgggtaaaccaagctatatagcaaaataggcaaatagttttgcataaaaattatgcatccattttgagcttgtatctaaaatgcatagaagactggcttttagtaatatttgaaaacagctgtactggttctgttctgcccctggggtccttttatgactatccctgcaggaaaacttcaataataagggagaaaatgaaaatatttgcattttgaattaagttttgccatcattttgtctgtctcgcttctttatccttactcatatgcatttttttttctttttttgcaaacatcaaagccagaattgattagaacaagaattctgtggtcacacaacacatgctaaatcaacacttttgtctgggagttggacatttatctttccaagccaggcaaacacctaattgtctccacattgtgagaagtgtaaaggccatcatgacgatggggcagaaagtttacccaattcaatttatttaacacctcataacactctggagttttcttcactgccca

SEQ ID NO: 62010 - DNA, 888 bp, Bovine  19866881334093
  misc_feature (1)..(1): n is a, c, g, or t
ncaaatacttgaaggttatggggtagcagtttccctggagctgtctaacaggaaggcattagtgtctctgagtatgatatgtgtcaatttggggagcctgtggactagttcagtgggcagggaaatcctcatttccttgaaactccaggagcctgtgcctttgtgtgggcaaaaagtacattgtagacgttttgttgtgattctggtggcggcagaaggagactgaaaggggaagactaggagctggagccgcttggtgccctacccttatgctcttcaagcctgctgctggacagaagggaaatgtcctgaatttcacaactttctctccctaacctccaccactttttactcaggttttgactccagaaaccatcatttgcagacagcaaaactgaaaagatggctccctaagtcttcacaggaatttctaatagtggaatattaagagcttgtctaatccactgcttttcaaatacactagataagtgaaaactggcctggcattagaagacacacagctcaaggccgctttgattatgtatataaagagactgaacatactgtcagttgagtttttcccttttaattaggtaaagtttcccagcatttgagattatgtgtgggttagttatctttgtcccttgagttaaatcagcaccatagatatgtgtacatgtgactgacgaggtggggtgagtgatgtggcaggtgagaggacagaaatgaatctgttcaaatagctctactgggaaatcagtgcaaagcactgtttcctgaatgaaggtcatctttattgaacataaaaacccaagttcaaatccattttgttgaaaaagacaacaatataaaaatattaaaaatgaacagccccagtatgtgtatgta

SEQ ID NO: 62011 - DNA, 1082 bp, Bovine  19866881368497
  misc_feature (1)..(1): n is a, c, g, or t
nctgcaatgattttggagccccaaaaataaagtctgtcactgtttccattgtttccccatctatttgccatgaagtgatgggaccagatgccatgatcttagttttctgaatgttgagctttaagccaacttttttcactctcactttcatcaagaggctcattaccattttttaacatttgcttaaagtagcttaatgataagctcctcatttatccccaaataattaattagcagtaaggataagagggcttccctggtggctcaatggtaaagaatccacctgccagtgcgggagacacgggttaattcctggtccagcaagatcccacatgctgcagagcagccaagcccatgtgccacaatgactgagcctgagcccgagcccaggaactgcagctattgaagcccgtgtgccctagagtctgtgctccacaagagaagacactgccatgaaaagcccattactctgcatggatgcagataatccaagcaatagtagatttagatgtttagccttaaaattataatcacaagtaccctgtgctccataaaataaataggcaataattgaaagaagatctcagaagtgacttttttcttaagctgccatcatgtacagtgtgctttatgattcatagtataactactgtgagtctgtccactgatttgcagttcttataagcaaacttgtgttttccctcaacagaaactctaccagaaagactgggatgaggccaagcagaaaggctatgacttgagagcagatgccattgaaatcaagcatgccaaagcctccagagaaattgccagcgaggtacagctccttctagttccttgtgggttttctactctatacaacaaattgggaaaggatttttcaagaattttgctttggtttgatttgcttttaaattcgtgtgctaaaaactctattttaaaatattaaaatggggtgaaaaacactaaggtgaacataggtgaagtctatgtgtaaatcgcttctaagttgtttataagtagaagtgaaatatcatgaagaatctgtacgaaattactcagggaacatttaggagccagta

SEQ ID NO: 62012 - DNA, 1192 bp, Bovine  19866881432487
  misc_feature (1)..(1): n is a, c, g, or t
ntaaaacaaattttcaatgttttcatgtttgaagaactactttagttaacacattgaatatgtttatattctgttcatgaccatttcctgagtgtcaattgagtgtattgcaatataattaattacagagctaccaaaatatttgcatagtttaaaaaaataaaacaaaaaaatgtttcactgcaaagtatcaacttgctacattaaattattttaacaacagccagaacaaacacattttcaaagcaggacaattttaaatacagagttgataacatttcaggttatcattataagttctcctagacagttggcatgcatgtgtgctaagttgcttcagtcacatctgactctttgtgaccctatggactgtagcttaccagctcctctgtccatgggattctccaggcaagaatactggagtgaattgccatgccctcctccaagggatcttcctgacccaagaacccaagtctcttgtgtctcctgcattggcagcaggttctttaccactagcaccacttgggaggccccccagacagtttacttactggcaaataagctctcaaagacagagcttttgaatagtgaggaaaacattggatttcagaccacattcagccttgacattcttgaggaccccaaattccttggagtgcaaatagcttggcttcaaaaagaatgagaaagctgaacatacttgccagggacatcaacatacttgccagacatcaaggacaacaggagacctgctgggaaggtggtctctcttacctgcctctatccttacttcagaaaagaagacaagtatcttgcagacacagcttactgagcaggatcactctccgaaacactggaggagaagctgcttctcctggtacattgactcctgcagcagctgggccaggagaacaggcatttccatgagcctcatggcttagacagtaaaaaagccacctgcaaagcagaagacctgggttcaatctctgggttggggaagatccccttggaggagggcatggcaacccactccagtattcttgcctggagcatccgcatagacagaggaacctggtgggctacggtccatggggtcacaaagagtcattgtgaccggttttcagtgtcttctgcaggtttacagaatccagaaaactgacccattctttactcctggagaccctgtgtatga

SEQ ID NO: 62013 - DNA, 816 bp, Bovine  19866881471136
  misc_feature (1)..(1): n is a, c, g, or t
ntttaaggtagtaggtttgcttagctcccaaaatcatgtaatatatcattacatgtactctgtgtgtgtatgtgtgtttttcaattttcaaacttctctcacatgtattgccattgaggactgaagaaaatttccatttatacaattccaagcatcactgagtggtcttacattcttatgggtatggtcccacaatgtgacagggacagtacaggattattttggaaaggatagcaattgaaactgtaattgctgatggggaatgactgcatgttagctggtgtatttttgtttagtttcttaggaaatgtgctgaatgtcaggataagatcttggaatacctcattgaagatgtctgccatatgcttggcatgattgacagaaacagaatcagctggcatccacccaatcccacgtaaccattccaagtcagccttgtaaatagcctgtgaaaataagaccaggaagaagtcagtaagtctggtcacatttgttctattcattggtctgatggagaaatgcaatttaagaatgacatactcaagcaccagacaagtaacttaagtaaattaatgatgcggcagcataataaactggggcccatgtttgctatttaaaggggtttagccttaatttcggagaaggcaatggcaaccaactccagtactctcgcctggaaaatcccaaggatggaggagcctggtaggctgcagtccattgggttgctaagagttggacacgactgagcaacttcactttcacttttcctttcatgcattgggagaaggaaatggcaacctacttccagtgttcttg

SEQ ID NO: 62014 - DNA, 734 bp, Bovine  19866881488829
  misc_feature (1)..(1): n is a, c, g, or t
nattttatataagaataatatatcttcccgtatcaataattgtgaagtggaaagtggtcttgtttcatttgcaatcaataaacagccaattattggagaagaaagtgctctaaagtatatagatggcaaacaacaggctattatggatctcttttcttcagctatagaaagttataattaggtttaaataggtaaatatggtagatttaacagacgcattactattctctccctcccaaaagcccactgtgtgtgctgtgctgtgcttagtcgctcagtcacgtccaactctttgtgaccccatggactacagcctgtcaggctcctctttccatggggattctccaggcaaaaatactggaatgggttgatatgccctcctccaggggaatctacccaacccagggattgaaccctggtcttctgcattgcaggtggattctttaaaacttcagttcagttcagtcactcagtgtgaactgattcatgcgaccccatgaatcacagcacaccagacctcccagtccatcaccaactcccagagttcacccagactcacgtccatcgagttagtgatgccatccagccatttcatcctctgccgtccccttctcctcctgcccccaatccctcccagcatcacagtcttttccaatgagtcatgtcttcgtatgaggtggccaaagtattgcagtttcagctttagcatcattccctccaaagaaatcccaggg

SEQ ID NO: 62015 - DNA, 1276 bp, Bovine  19866881507201
  misc_feature (1)..(1): n is a, c, g, or t
nacgaaaagggttggtaattggtatgcagagagcagttctgtgttatctgcctttccctgggtctgagctataaatcagttatcactaacttgcccatgagcaagcgaaggggaagatgacagacaagatgctttggagacccatggcccaggctccataagcagctttgtgaagtaagatgaaacaaacctcctctccctcttctttcaatgtcacttccaggcattccagcggttcaccctcctgtctcaagctcatgcccaagcccaaacacactctgggctagtgatctttgcccagggaagtcctaaatgatttggctatggcttggtctttcatcctaactctcactgcacttccaaatcaggttactaagttctcctgagggttatacaatctacgactcagttaataggggcactatgtgcccaagaggactcctaatggaaaatgcatccatatggaaatgcaatccgaagcatcgaggaacacagaccacgcattatgataaccttagttcattcagtaaatcagcaaaagtgtatgtcacagtaaattaaaaatgactaaacactagccttttttgcccattttgaataatattctttaatgaccttaaatgaaacagaaaattaaaaatctgtgagatgaagagaaaggcaaattgaaatacttattcaaatgtggtatgaaggcagcaagaagttaataatcatttctatatttagtgcactgatggaaaaaatgagttgttacaagttctttataatattacaatgtgaatgctatttttaaggttatttttcattcaaaggcagaatccaagagataaataagaaaggtaatatatagaaaagaaatgactcagtgtgtgggccaggtgagaacttggtacatatgtaagatacttaaatttttccagatttgactattgcaatgatgtcttacttaggggttagcagtcttagataccagtccataaatgaagggagggctgtaaatgctacacatagttttacaaaggaaatttgatttgaaagtcacaattcctaaagaaaacgtcaacaggtttgaacttaaaacctaccagaatgaactttcctatatccaaactgagccactgaaatgaaaacactaagaaatcatcacactgttcttttggctaagaggccactttggtattgtaaatgttttcatatacttgtacagtcctgttgatagcttatggtgaacagtgtcaaattcatgatatccgaagaagatttagcttcagga

SEQ ID NO: 62016 - DNA, 1130 bp, Bovine  19866881524657
  misc_feature (1)..(1): n is a, c, g, or t
naactataggggttaaatattaaagcagaatttagtgattccattcacttgcattagcaaatacttgtgcagcagcatttgcctgtgaaaatacactcttatgagatacatactattcatttaaaaatgcacgactgtttgtacattatgtatagattaagtctttaatttataaatttcagtcttcgttagttgcatgagtttttctgtagcctcttgtgaatacctttgtttaatagaaacataattttgtatatattgaatactgagatatcagtatggataatagacgtgcttcatgggattgctgcagatatttgtaggattctgtatctacaaataaaacaacaaaaagttttgtacttagttaatagttaaacatgagtttattttctaaagtaagcagaacaaatacgagaaatgagaaagtgttacatgacaaccttgctgttcatttccataaccttttttttccccccttttggtttgaaagaggggattagccaccagaaatagtgcctcgttacatttctctttaatggggagttagcttgagtattttcattataacttggatcataagaaacctagagcttatctgctctccacctatacctaaagcaaacttgggagaaatctgaaaactgttctttaaaatatgtatgttttattcagtttaaaaaaatagggtgtatgtaattaaaacatttctaattttaccaactggtattagtgcctgcctttcccatatttgtttcatctttttaacatatatctcacttgttttctaaatagaatgagtaatctcagttttagacttaattcagaagtaacccctacttgaaaaagcacacattcattaacaacttatgggaaagtttaatccttgtgtcttggttagctttatattcagaaggggactgccacccagtcacgataaaagttggtttcattttcatgatccattatcattacattgtaaatattttggggtctaagtttggtatttatatgctgaggatggttttaaaagaaaatctgggaccattgaacctgaaggattgtagctttgaatttaaacacttataattttggtttaatttgtcatttattccccaagttctatgtga

SEQ ID NO: 62017 - DNA, 1172 bp, Bovine  19866881562303
  misc_feature (1)..(1): n is a, c, g, or t
nattatttgcagaaggaattcctataggaactttataatgcacatccatacttgctaccttggatcactgtcttagtgcttatgtgattacagggaaatataatgggtttagaattttcctaagggtactgggccagaatttttctgttaaggtaattggtgagcaaacatgatgaagctgggctttgacctaattagcatcctctccaaccattccagaaaaccagccaatgaaagttccttctgaggcccagtcaggacatctggtttatgagaacactgtacataaagaccaaggttactttcatggctcagtttcataaatttttctcctttgaggtcttgtagctgctgaaatctgaagcttcttttaaattgtaaccaaaattaaacttagtatgaacaaaaacctttggggttctcagtggagcttatttattgtccaaactagaatagtcaggttgaaaaatcaataactattcatttaaagatgactttagaaaagtcaagtgtacagccctatttacgaagtagtcattttatataatcagaagtatgaagggcttgtcatataatttttgataatttaaaaaatacttctttagtggaaaactcttcaacggttattaccttgatagaaataatgcttattagtggtccttgaaaaaccctattttaaaataaaataatagctgcctgaagcagaaactgtggcccattcataatgtctgacagttcctctttaacctaaaaaaagagatttgagaaaatctgaccatgtatgatttgaggggggaggtgttcaataagtgaaacatatcaaattttaagaaaaaatcactaactagatgtctgggtctatatctctaacgtgtatttattgcttaatagagatctctgcttttctgcaaatccattgaaggtttgtattaataattggtaatttcttgttcacagcatgaatatcgtaaagactatgaaaagtcaaaaactatctacacagcacctctcgacatgctcccactcactcatgctaagaaatctcaggcaattgccagcgatgtggactataagcacctcttacacaattatagctacccgcccgacagcgttaatgtggaccttgccaagaaggcttatgcactgcagagcgatgtgagtaaccagatttt

SEQ ID NO: 62018 - DNA, 1045 bp, Bovine  19866881602701
  misc_feature (1)..(1): n is a, c, g, or t
naattctcctgcaagaatactgatttccttctgcaggggatctttccgactcaaggattaaacctagatttcctgcattgcaggcagattctttactgcttgagcaaccagggaagccccttgagagtactctgaaaagcaaggagatcaaactactcaattctaaaggaaattaaccctgaatattcattggaaggactaatgctgaagctgaaattccaatactttggccacctgatacaaacagcagactcattggaaacgaccctgatgctgggaaagattgagggcaggagaaacaaggggcaacagaagatgagatggatggatggtatcaacaacacaatggacatgacttggagcaaacttggggagaagtgaaggacatggaaggctggcgtgctgcagtctttggggttgcaaagagtcagacatgacttagccactaaacaacaacttcaaaatttgatattcttacaattaagcttacaattctatatttagttaccttttaagaatataaaatcaagtcttagatgcctatttcccagattttccatgaaaccatttccctgatctttcaagaccttaataaagggattcagtttaggaacatttggtgcatttcaagatagcccgacacactatgaaatatggccatgtacaatctttttgacatttaaaatacagtacaatataccagtatcttagttctaaactcaaaattatgtttgctgcatgaaatctaaatgtaagtacagaaaactcaattcaagataaaagtactacaaacctctttgttttgagtacttctttctggtgttcagttagtattctttcctttgtttcttttacttctggaggtataaacacaaagtcagtagacttttcttcttccaaaggcatttcaccctttgcttttggagttgaagaatctagtttcaactggaaattaaaacagtaaatgcacattttgagtttctaaattattttccaatacatcaatcaatctctctttggcactctgataatggtttttgatgat

SEQ ID NO: 62019 - DNA, 792 bp, Bovine  19866881653371
  misc_feature (1)..(1): n is a, c, g, or t
nacactcatacatatctgttctatgaactgatgacttgaagatatgtataaaatacataatgtatataaaatgcataacttcttgttatctttgtttctcgagttcttgtggccctgaaatttctattaaatatacactgaattattttcctgatgacattttttattttccttgctagcgtctgtacacagaagcctgggacaaagacaagacccaggtccacatcatgccagacacaccagaaattacgttggcaagaacgaacaaagtcaactacagtgaggtgggaacagatgctaattctatgacatttgcatggcgtttcatatttcaattaatctgttcatggtgatgtaatataaataaccaatttgtaaagaatgccattttttgctccatgtgagaaccaaatactcgtgcatttctcaatttccatcctaagcatcaatcttgaagtagcacaaattaccatttaggcagtgtaaattttaagaactgataattaaagcagtaaccagaagattaactagactctcttcttttattaatttaagttaggaaattggcaatataccaaaatacatttatctcttccttatcaggagacatgagagatgcaggtttgatccctgggtcaggaagattccctggaggagggcatggcaacccactccaatattcttgcctggagagtctcatggacagaggagcctggtgggctacagtccatggagtcgcaaagaatcaggcacgactgaagcgacttagcacatagcacatatgttacatag

SEQ ID NO: 62020 - DNA, 1900 bp, Bovine  19866881692019
  misc_feature (1)..(1): n is a, c, g, or t
nctatacaaaactgcttacgagaaacagaaaggtcattacattgggtgtcgcaatgccaaggaagaccctaaactggtctgggcggcaaatgtgttgaagatgcagaatgacaggctgtacaaaaaggcatacaatgaccacaaggccaggatcaccatcccggtggacatggtgtccatcaacgctgccaaagaaggccaggcgttagcaagcgatgtggactatcgccagtacctacaccagtggtcttgctttcctgaccagaacgatgtgatccaagccaggaaagcctatgacctgcagagtgatgtaagttgttgctgtggtgcctgggggtgggggggtggtgactattccccaggaagccagccttctaccgctttgcccggtcactccttccagtgttcaggaatgctttccctgcctgagcactcccctgggatattttactaagtttgttaatcacaagtcttacttctgggcttattcagaaagttttcatcttcattgttagtgctactaccagaatttttctatagattttgttaatgtattcattgtttgtagcttattaaatattggtgtcatcgtgtttcttcagttgaagaatgacaggggctgtctttttaaaagattagcagcatgctctaagctcactcatttcccttaactttttattcttcacaacattatgtttcattagtttgcccaaagtatttttagatttacttatattttctaaccattcgatcttttgaaaatgatgaattctattaggatatttgtttcttgtatagaatgaatttcttcttttaattggagaaggcaatggcaccccactccagcatcaggatatttgtttcttgtatagaatgaattctttcttttaattatctgaacttcccttaagcttcaggagatattttaatataatagatgagtttgttatagaagaggtatacccatcatttgaaacaattgccatttggtgaatttagtccagtttctagataaatgcagtctcttcattaacctgaatcacactggtgtattaaagaatgcatatcaatcaagttcttaatgataaagggaaaaaaattaaaaaaaaaaagaatgataaagggaagcttcaaaacctatgtacatcctcttcaagaatccttctagattttgtgtatctgtcatacttcacacactaaaacatataaccttcttcactaaggtagaaatttccctgcattttgactcctcttactccttattttagcttgatatttgtatcctattaatattgatatactatttctgaagaacacaacggtttttttttaatgaaattcataactggtgtttcacataaagcaattttatctggttaactacttacatattcctgagaaaacatgtggagatagccgaggaaatgcaaatcccagttcaaaaggaagtgctgtcctgaaaaagaaaacccaagtgggattgaaattgtgcaactagggactgagttcttaattatccctttaaaaatatttattaaacctaccatgtaccatgtcttgtgctgaacactaaaggcacaatggtgaataaagaagaacaagacaaagttcctgactgaaggaagttcacgttgatgataaaggaacagatgtcaactaatgaatatcagcaaaaatgggatggctgaaaaagagtggtcattgcactatgaaaaagtgaggtgggaaaagcttctctggggaaatgctgatttgagataagaaaagagaataggagttggttgtgaggaaaacactgtgaggccattcctgcagaatgaccaacatcatacacaaagcggagtgtatataaagcacagactgaaaggccagtgggtcagaacatagggtcaaagggaag

SEQ ID NO: 62021 - DNA, 1939 bp, Bovine  19866881859277
  misc_feature (1)..(1): n is a, c, g, or t
ntgaaaatacagctgccagcttaatgatatactctctaggaaagtatgcctgttacatttgaattgctttaattggtattaaaatgaaaattcccaaatgcagtacaatataccataaagtgggcaaaaatcagtattaatggaaacgcctcttaaataattatttcagtactttatcattccatatacctcacagtcagagcttctatttgttctactttcgttgatcctaacctgctatttggaggtaggttcttaaaactctttgatgttcttctcccaggtgaaatataaacaagatttgacctggcttaaaggcattggttgctatgcctatgatactcccgactttactctggctgaaaagaacaagactctctacagcaaggtatgtatttactcagggataatggccacatccatgcagtgtactccactgcccccagagagcactagaactgaggaaacagcttctcgtatttccatctctgtccttgcttctacaccctaaagtgggaacatactgcattattcactctactcaggaatattttagtactgacctcactgacaacagtaatcatttatttgtatcattccttggaatttgataaaaggccatctcagtacaactccttcctcatggcttttccagaatttccttcctagtaatatgtctctggatgatttgatacggcagcagatataaagtgagattattttaattcacaaacatgtgacttgaagcaaataacttttttatggcctcattttcctacttacaaaataaagcagtcagattggtttcctttgagttctaaaatagaagtcagcaaatttctctgaaaggtgccagagagtaaatagtttagattttgtggaccatgttcattctgtcacatattctttgttacaatccctaaagattattaaaaaaaattgtctagttcatgggctatttaaaaacaggtagtggtctagatgctagcatattcttactctaaaatattataattatctgattaattcctggaaaactaattaaagggttaaaaactgccttcacgtacacatggaaataccttcaaagtaaaataattatcactataaatattgaaacaaagaagaaactgatttgaatttttacccaatatgggaatagatccatttgacatctattcaatgaaagtatgtatttgggggccagttttcaaggcattggggtggtatgcccttcattgctttgggaaatagagtacattcaataattacttgttaactctatgaatgaattaatcacacatgtctcactcttaagataatcacaacctgctatcaagtaaccatgtttctgttttatctagtataagtataaagaggtatttgaaaggacaaagtcaaatttcaagtatgttgctgattgtccaatcaataggcatttcaagtttgcaactcaactgatgaatgaggtacgtatgacctgatccagtttaacctattaacttaccttagtactctataagtgacattcgattaaaactcaacacataaaatgacaggaaagcctttgagtctttgggaagacacttatgatatccctgttttatgggctctgccaaaagcaggaataagaacaaatgaagggcctgtgcagagtggagtgagggcccacagccagcgtggcctctgccgacactggcatggggcagcacagccctttgggtgcttctcagctgaactcccttcagcaggattctgtatagagttgggagacccataagttcaaagttaatttagtatcccttaccaaggcccagaaatggcagccgtaatcgggtagttgtgattcacacattcaaatatattgccatagttactcacacattgcacaagaaagtgtccattttgcattcaagatattcctctgtcttctacccag

SEQ ID NO: 62022 - DNA, 725 bp, Bovine  19866881940339
  misc_feature (1)..(1): n is a, c, g, or t
ntccaggcaatgcttggccttctgattctctcctcagtaaagaggtgggctttccaggtggcactagtggtaaagaacccgcctgccagtgcaggagatgtaagagatgtgggtttgatccctgggtctggaagatcccttggaggaggaaatggcaacccaccctagtattcttgcctgggaaatcccatggacagaggggcctggcgggctacagtccatagggtcgcaaagagctggacatgattgaagtgacttagcacaccagaaagatgtatttttcgtatttctttcaatataaactcttaacattacaaggtgtctctgggaaataattaagtgtgctttgaaaacaatgacatcagtacatccagaagaggtttgaccttcagtttcctcaccctgggaagttcaatgacattgccattgctcaaagcacttaatgaatcccccttctcccccagcaggtaatccctctgcagggctggtgtgtttatattacaagttttaccaggtactggctgctgtgcctggataacatgaagtctggagcctgcagtgccccttctgttcatctgcctcctaccctaaggcagtgatggttggtagacacaatcatcgttgatgggtctaatttctctcagtgtctagttgattgtctagtggtaacatatgcaaacaaatgtactgagtttctcacgttccatagtatcaactctctaaga

SEQ ID NO: 62023 - DNA, 5579 bp, Bovine  19866880378719
  misc_feature (1)..(1): n is a, c, g, or t
natatcccagggctgatctccttcgaacggactggttggatctccttgccgtccaagggactctcaagagtcttctccaacaccacagttcaaaagcatcaattcttcagtgctcagccttcttcacagtccaactctcacatccatacatgaccacaggaaaaaccatagccttgactagacgaacctttgttggcaaagtaatgtctctgcttttgagtatgctatctaggttggtcataactttccttccaaggagtaagcgtcttttaatttcatgtttctgtctttgcctagactactttttaaatctaaaaatactaaccaatctttttatacatagcaaaaaggaaagggcctggcctgtggcatacattcagtaagtatatgctgaaaaaaatgcataatatgatgaaagttgcagtatagatgtgtcaatttggtttcataaacatacactggccatatacacagttatccagtggttaagatgctgtgtttccactgcagggggcttgggtttgatttctggtccaggaactaagatcccacatactgtgcaatggggccaaaaaacagaaggaaaaaaaaaaatactaggtgttttgaatactaaacttgaataacatgtgccttgacctacagtttacacataatagcctgatatagaaaaatacttccataaaactaaattttaactacagttctgtttaaagtttagaagttgtacttgaataaattacatactttaaacagcacttgctctggtgcttaataagagcaatgcatttttctaatggttaaatgttcaatcaatttggcaccagtcttactgaatcttacttcaatacgtctcttaattccatcccatgttcaccattccccatgatactgtcttttttcatagtgtccttacttgttattggcattgttttcttattttctaatatttctaccctagactttctgctataatatcatcaaattgactgataatcagaatacctgcacttgagatttctctttgatcacaaacttaatgtggctttgaacttatcattttccctgcctcatccccttccctcttctcttcctctcttggattcccaaattttggtaaatatcatcaattattgctattttccctgccagaaatgtggacatctttgtcaagtaaaggattctccaatgtgtttcctgctccgtagtgtctcttctgtcatttggtttatttcttgcacagactaatgggaaagttctatcataagtgtctggagaattcacttccctgcaccaatataccatttacattctcttagagtgatctttgtaatattcaaatctgactgtgctccttaggcataaatttcccccacaggatacagcttcaattccttagttctgcatcctctagatctttatcatctcatcaagccatcttctctctactgtgtattctgactgtatttgtggattacagctaactgaatatgtagtgcattcttgtgcttgtacactgtcttctgattgtaataccctgccccttctttcttctaactttaactcgtccttctagaagttataaatatgagccgtccaaactggaatagaatgtgacacaaaataatatgttccctttcacttcaagcattttagtatctgctgaaagatcaaactacttcaaatatattcttgattcatcaactggcaaaattcattaatctcttaatatactataacagtcataataggagtaattaataatttaatatttacccagaaacttttttctgaactagaattcactttttaaacatttagctgaaattaactgcaattagtaatacagtggttggtatgtgagggcaatataaactgataacaaaaatgatgactaaaacatgcaggtgtctatatgaccttaaactccattatcctagacaagtagaggtaaaacaaatttttttacagcatattcagtaaacatcaattgtgctcaaagccccagaaatagacttgttctgagtcaaaaatgaagtaagctgaaagagaaaataccttaacaagataaacactaatagaacgaagtaatcaggctctttcatttatcccaagagtatgtgtatatttatgcatacataatcagttcaacccaacaaatgtgtactggctgctagacaaaatttatagacaatccagagagagaactttgcaaatctgagaggtagatgtcactggtctcctgtctcagtgtctggggtgagttgaacagaggcctatatactccctaaatatgaatgtgtagtcagtccacttgcctatgcaaagaatgaagtctaacgcatattgaatagatcacattacattttaattaaagcatgtttatactgcttatattttcattcttaatatttatgtatcagagttttcaatatttatgtcagtgcatttatttatttttcttaacaatttataacagtataacttaatgtatccaatgacaatattaccaagaaaggagtgtatgaaatcaaaccacattttcacttagattcccatcctgaccaatgcttcatcactaatgaagcattagcgatgcttcatctttttctttttttggccccgtcatggagcatgtgggatctcagttccctgactagggataaaacccatgcctctgcagtggaagttcagtgatgcttaatcttaatttttaatagattttagttggaagtggctcctcacatgtcacttctggtccctgtcactttgcttttagtcatggcttttattattgtttcacaatgaactgtttatacccctcattatttttattacaagtaatcagtgaatcaccatcaacagtacaaaccataccatagaaatataaaggagaatctacattttcacagtattttacaaatttcaataaagacatctttagattattgttttatctgtgaaatccaatcaaagtagtattattgttcaaacacaacttcaagttgccctctctgttcaaattgttgtgccctaagatcttcatgacccagataaccatgatggtgtgatcactcacctacagccagacatcctggaatgcaaagtcaagtgggccttaggaagcatcactatgaacaaagctagtggaggtgataggattccagacgagcagtttcaaatcctaaaagatgatgctataaaagtgctgcgtgcaatatgccagagaatttcaaaaactcagcagtggccacaggactggaaaaggtcaattttcattccaatcccaaagaaaggtaatgcaaaagaatgctcaaactaccacacaattgccctcatctcacacactagtaaaatgatgctcaaatttctccaagcctggcttcagcagtacatgaaccatggactggcagatgttcaagatggatttagaaaaggcagaggaaccagagatcaaattgccaacatttcttggattatagaaaaagcaagagaattccagaaaaacatatacttctgctttattgattacactaaagcctttgactgtgtagatcacaacaaactgtggaaaattcttcaagagatgggactagtagatcaccttacctgcctcctgagaaatctgtatgcagattaagaaggaacagttagaactggacatggaacaaaagactggttccaaattgggaaaggagtacgtcaaggctgtatgttgttaccctgcttatttaacttacatgcagagtacatcatgagaaacactgggctggatgaagcacaatctggaatcaagattgccgggagaaatatcaataacctcagatatgcagatgacaccacacttatagcagaaagtgaagaggaactaaagagcctgttgatgaaagtgaaagaggagacagaaaaatctggcttaaaactcaaaattcaggaaattaagatcatggcatccgatcccatcacttcatggcatataaatggggaaattgtggaaatagtgacagactttattttatgggctccaaaaatcactgcagatggtgactgcagccatgaaattaaaagatgcttgctccttggaagaaaagttatcaccaacctagacagcttattaaaaagtagacctttgccaacaaaggtccatctagtcaaggctatggtttttccagtggtcatatataggtgtgagagttggactataaagaaagctgagcactgaagaattgacggcttttgaactgtggtgttggagaagactcttgagagtcccttggactgcaaggagatcctaccagtccatcctaaaggaaatcagttctgaatattccttggaagaactaatgttgaagctgaaactccaatactttggccacctgatgtgaagagctgactcatttgaaaagaccctgatgcctggaaagactgaaggcaggaggagaatgggatgacagaggatgagatggttggatggcatcagcgactcaatgaacatgagtttgagcaagctccaggagttggtgatagacagggacgcctagtgtattggagtccatgggttcacaaagagctggacacaactgagcgactgaatggaagactgtttaatcagaaattttagcaatatcagagacattcaaactatcaggatatcacaaatgtgcttggcatcccatcttttgttcatgctattttcctaagtaatgttggccatttccttatgcattttcctctactctaaagctgtgtagttgcttcctacctggcagcaggctgaaagttttcttattctcattcaatctctcttttctgctgctgaatcccttggaaaagacagtgtccaattgtcatataaacaaagaattttctctcatctcgccttttcaccaggggggcaactcctgggaaaactctgtcaaggaagccatggtgtcctaagaactgaacctaagttttgagccatccaaaggctcctagccagctaagacattatcttcactcaggactctctccccagactgccctttctgcctgtcagggctcactgtcccctcatatctaccatacctgaggcaccctgtaccatataagctgctatgggtatccaagcctctctactcagggtgctctgccacctttccttccttatttttaatttgtaggaatatgtagaaagctacagaaaaactattccttttctgtcttcaagagagtgtggtaagcgggcctgtaatggcccacttatctttgagatttttctcaaggattttcccagctgagaagacagttggcttagagaggaggaattttcaacaattttgcttatttcccttttttttttttttccttctcacagcagaaggaatgtcattggcttcatttttttcttgtcaatgattcaataatattttttgtataatgactgtatgtgtggaaaaaatacagtctgggaatttccatgttctgggaatatactggtgaataaaagagaccaaggctctgcactcataaatcttacagtctcaaaactaatagaaaaacaaatcaggttaatcgtctctcctgaccactgaatactg

SEQ ID NO: 62024 - DNA, 1411 bp, Bovine  19866880457785
  misc_feature (1)..(1): n is a, c, g, or t
ntgctgtctgacgtgaaagattttaactattcggaacatctttctccaaaatatcagaggcaaagaaagaaagagaaatttaacgtttcaaaaaaaaaaacggagttaaaatggagactgaagattataattatgacagattttcattttgattttaaccaatgatgtgttatttagtcaagactttaatttaaaatacagtattttgcacctaacggatcttaggttctgtgaaaatgtcagtgcaatctaccaggagaaaaaaggaagatagcacctgctgtaatcattctttttttttttttttttctcctacattttccctccaaagttcaaagacccctctgtctttgatggtattgtaagaaaaacaggcggagatgctctctgcctgtattttttattttttttaccttgcctgctagccattcggtgttttgatctgtgtttccatctgagctttctaatatagcgaccctggcatctaatccatccagtttattatctattgaaatacttactgcctgaagtgaatttattttggcagcaatgacttctgatagagatgtattttgtattattttttgtgaaagacaggtgagtctaaagattccaaactctccctgatgacaatccttggccttttctcatggcaaacttcgggaaaaaagaaaaaaacaccctgtacatacttagtttttatttgtcattataaacttgctttgtccaaaagctagaactctctgaggctgaaaataaaaaatagtaacatgcataaaaaagtcatgttattagaacaaaaaagaagcagattctcacaactcgcaggggcacatttttcctcttccattcatactcttagtgttgagttctttttaacctttagaatttaatttgtgaaagattatggctgcatcaagctttgcagaaactgtacttctgaagtgttagcatgttttgtattttgatggtttactttctgttacatgaaatagaggagaccatgagggatggaatcgtgtaaaaagaatatccgaaaggtcaaacagcaaaatttattttgctcttttacataatacatattgcaccttaaaacttccagttctgcctttttgaattacactgcaaaaggtaactgtggtattctttaaactaaatcctcttttacatataacttgaaaactgatttgttaatggatgcttccacttagatgtccactgcttaatttttttttccccctgagcatttggttgtattgtggataggcatttcttctgtgtgacaactggtaggataggacatgccttatatttagttggtatgccccatatttacttttgctgcatattctgtgactctttggtataaccatgacatgccatttggaaggtgtaggatgggctttctttt

SEQ ID NO: 62025 - DNA, 940 bp, Bovine  19866880693954
  misc_feature (1)..(1): n is a, c, g, or t
ntgctactgtctctattcttcacaccaagaacacaatctgttatttttatctcatactctttttttcatcgtgggtaaatgtaggctgattccataagccatcatttgattatgtgccttataatcatcagcattcagattttatccattgggaatgtgaaaaacctgtgggaaggatttaaaatactaaaataaaacctctttgagtttgcaatcagcaagagcttaattaaaatcaatggggaaatttttaaaaaatggttaatgtaaactgttacttttgttcttctaggatatctatttcacttttcttttgttcaaaaagaatttctgaaaagtatactatacgactagcccaataatagacaccaatttgcattattaaacaagcgaagattttcatccaaaagtcacataacaacaaaagtggccttcattctcaaggaaagtccaaacctggaaccacggtgctcttgagttgccctacttgaatcgcagaagtttgactgtggctgtaagaattattccttgctagttacaagtttcctttctcatgtttccacatggctcttcttctgcaataaagtacgtattttattacatccatatttgcctccaaaagaaaaaagcaaaaaaaaaaagcagatgttttcaagaccattttattggataaatgttggctaaacaaagccaaaacaaatcctgccattgagctcttctgaacttctgggcaaaggtcattgtgctctggtgttcatgttccctgtatgcattcatccttcagagtctgttaccccctttaggggtgcaggataccatatggtttgcagaggaagtagtaagcaagttacaggtagtgaatcactattttctaaaacatgtctgattttaatagttatttgggaaaactttaaaacagagattcctaggtctccccaaa

SEQ ID NO: 62026 - DNA, 983 bp, Bovine  19866880706202
  misc_feature (1)..(1): n is a, c, g, or t
nctcctttgtgattacttacccccacatctcctacacctattttaacacttaacatattgtaaggaaggagaagggcatggcaacccactccagtattcttgcctggagaatcccatggacagaagagcctggcaggctacagtccacagggtcaaaagagtcggatactactgaagtgacttagcatgcacacatgttgtatggaaattttttatttatgattatggatttctctttcccattatgccacaataagtctgtattttttgtttcccctctattagtactttgtctagtgtgctttaagagcttagtaaatatttatgaattcacatattagggttaaatacatatcattaagtaaataatcccaattcttagagtatgaaatatatttaataaaatttgatgactttgtgcaaataactgaccttctgtgatgtgatgtggtgtgcaaaaccagtattttacgttctttatataaatgaagaaaatgtgttaatactaaattctgttagaccaatggttaaagtgcaaattcactgttctggcacatatttgtttatatcacataagggcacagcactaatacactttgaagtgattattgctgtggtagaatactaaaaaaaaaaaaaaaaaaatacaatacagtgtgacatgggagagtgaaaatccaaatgaaagcagaatctgcatattgtttttacgttgtacctgccagtcaagctaaaattttatgaagaactgagaagctattttcactcatgtacattgtatcatgtaggtcatattcttttatgtaaatctcttccacttgggtgtttaaatttcaatataaatgtagttttaaagaatatggcttatatttctttctctccttaattcattctgagttttggagcgcgaatgttttgcagaccatgacacctacaaggggcattgtttgaggaggtgttaaaacatgagctgtgtgtgtttt

SEQ ID NO: 62027 - DNA, 3107 bp, Bovine  19866880728184
  misc_feature (1)..(1): n is a, c, g, or t
nggaagctggtgggggaagggggtgaaaattgagttcacttcaccaatagccagtgatttagtcaaccgtccctgatggctcagacgctaaagcgtctgcctgcgatgtgggagacctgggttcgatccctgggttgggaaaatcccctggagaaggaaatggcaatccactccagcactcttgcctggaaaatcccatggatggaggagcctgataggctacagtccatgtggttgcaaagagtccgacacgactgagcaacttcacttcacttcacttcaaacaaccccagaagaatggggtttagagagcttccttgtctttaactgagacaggtgctgggagaatggtgtgatcagagagcatggaaatgacacacttccacgtactttgccctgtttatttcttccatttggctgagtctgagttacaccctttacaataaactgataatctagtgagtaaaatgtttttcttgagttctgtaaaccattctcgcaaattaatcacacccaaggagagaatctttggaacctccaatctatagcctgtggtcagaagctcacaacctggacttgtgattgacatctgaagtaaattggggcaggggtagatgaccctcttataggactacagtgaatctgatgtgttggaatccgatgctgtctatgggtagaaagtgtctgggttgagctgaattattggacacccagctatgttgtagaagtgcttgctggtatggggaaaaccccttacactggaattttaattggtgagcagaatagttgtcatcctcatgagtattttcttacttgtgtattattcttgttgaattgcttgactgagtaatgaagctttcataaagtgaataatttcctccatcctttgcattaggatcattttgccaacaagaagatagtgttctaatcatcttctaactaggggctagcaaatcttaccccacaatatgagtcttgaattatcaacacattgatatttaaaaggagcaaataattcagatgtggaaaagccagtaactttgcctaattaaagacaagcatgttgtagaaactaatgtgttattctttaaggccaccatggtgattacttacagggtctaaatagttccctggagcccagtaagtagtaatatatctttagaagtttgctaaactatcaaaaagcattggcattcagaaaaatctgttttgttacttgcccaaatacaaaatatgcaagcactttgcagttttgtatttactgtggttaatggccacatatcggggtttgtttaatttgtttaaagagtaaataaaatgcaatgtctactttaaagaaaaaatcatgacttatggccattgaaatgctctttcaaccaccacctgaagcccaaacctctccaaagccctttagcccccagatggccagtaccttaggtctagtcccatgaggaataacaggggtcatgacatggcctgttcactaaggccaaagaacaggtgcaaggcctacatttctggctgcttggagccctgttatttttatgaatagtcagtgcatcaggaactctacagggatccaagcctttccttgagcccaatcaaaggattagtgtggtttaggcagaggttgcatctgtgtggaaaattgtccatgctgagttctattagaaggtgctgttgagtgagatttgttactaatcacaaggcaaaattacagtctcttgaaatgagaagccagtaaacaaaattataaaagtcattttaattattaaatgacagtgttacaaatgatatgccatttatcattgccataatgaaatacaataaacagaaaaaaatccatatgacccattcactgtaatttaattttgcctaatatattattttaatgattttttaaaaatgtgactaattaacaaattgctaattctcttagccagcaatatctatattttaattcggatgtaccatttttactaaccagtgctttgtgctgactgaagaaacactgaaaactctgaaaggtcttctttacaaggttcaagttatcagtgcctaatgatgctaagtgatgaattgctccaattttaatagaacaatcagggcctagtgtttccattatccttgtccagacacttcccatccatgttattgttgtgctgattagcagcattatttgtaaagactttgtaaattgtaaatcagagataacaggtgattctttcttgttatttgaaaactgaacgtgtttgataatttttcaagtttgtaaaaactattgaaatgtcaatatcattttacaaaaagaatgatgagctgctcaaatcagagcaactgaatgcaaaaatggcctttttcctaacacccttgaaaactgaacaagtactaatattacctggtaatagctgtttggattaaatttgtttatgtttaaaatttgatctatgtgtctgtctgtcatctatccattatctatctatcatctatctttttaagttcctgagataagacttttgaccatgtacacaaattttcaggacagtgtaatttaaaatgtaaaatgacctattactgattaatacttgctatatccatgcttttcaaagaaaaggggccattataaatataattcatgttcctaaacctttcatatttaagtagaacatgccttaaaataaatatgccctattctactcttaatcttctagtaaacacttattaaatgcctactacctgccagactaaaatcatttctacaagatgaaaatgcttaacaattaattacctaaaggaatatgcaaaacaaatctgtttttttttttattacaactggatgacttattatccaaaagaaaataactttagtaaaaataactgttctgatttatattaatagaattttatcagataatctaagagattaaattcagtaacttctcactgctggatgtgtgtgagagagaggtatatctcactgggagacatacccagtaaaaagaagagtgtcaagtggtagctgctgcatgctcctgaatctccctaaaatactgcatttcattgtcaatctaagacttctatttttggtggtgataatagtgtagtgg

SEQ ID NO: 62028 - DNA, 2069 bp, Bovine  19866880762274
  misc_feature (1)..(1): n is a, c, g, or t
ntgaaaaacacttgaatcagaaattttcagaatttgtctttgacaactttatcagatagataacaaatttggtaacattcaagagaaaaaaggtattgatccagagattatggaagtttttatttaaagtctatatatgtcagtgatgtttttgaaataattatggaaacccagggaatttatttggggtttatgccagacatattttccctgccaaccattaaccctcaggcaatatctcactcctaggtcattactataattagaagacaaacatttaaaaacaacagaggtgcatttgtgtatacattttttgtacttaggagatattatcataattggtgtgtatagaggatttcggggaattttcgattaactcatcactcacgaaaatcagttgattagattatctttcattttcaattcacattattataattaacttgttcttgtaagtactgttggggtaatgtaagaacattagaagctgttttcaattataagcttgtatattgtagcaaagtagattagaagcttactattaaattgaaaacacatcttattaggaacatctaattctgatgaagaaaagtgcaatgtgccatttgtactcttcatgtggaggtacagatgttaaagggaaaagggcttgttcttgttgagtatttcgtctcatgtatcccagtaagaacatctgatcttggactctgtttagctattgcaacagctgttgggtctctgattgggtttgaagccctccctctgaattttactaagacagtttgcagaatgaagtcagcagaagccaccacacaagttttccttttaaattgttccacaaggctgagagctgagtgattgctacacatacgatctctcatgtcttcccagcaaattaaccccccacaaccggcttcttaccattcagtctgtgattttgttgttgccttctgttgggtaatttttagcttttccctggcattcagcctagtgttatctgtgagtatgctggtacatctgtttgtattcagaatttattttacatcatctttaatattagtaacagtatcttcaaattgaaattttattaataataagtatttgttgcttagtgaaatagcttgcctagtataaatagtatgagtgtttggggccaatctgactactgaaagtattgaatctgatgataccctgaaaagaaaccttgtgtttagaatctgatctgctcagattttatttgacctctaactgttttaagattctacaatcataatgtatgaaggaaaaccaggaattgagaagaaagttgagaaaatgactaatggccaagaaaccacatctattggacgagaaagtaggtctagtagacaactacaagaagcacagtgggctggaaaaagcttggtcgctgtagttacatgtgcagaaaatagaggcaggaagcattacataaataaagaggctatcaaagatgtttcaaaactcccattgcaggagatttgagatggtttacaattttggttttgttctcgatttttttcatttattccttacataaacgggtcttggtatctctgttttggcaagttaagttcctgccctataccttcccatttaaaataatcccaaatctgggacttccctaggagtccagtggttaagactctgcactcccactgcagggaccaccagtttgatccctgttcagggaactaagatcccacataactcaaggtgcagccaaaaaataaaatagaaaataaaatgatggagaattttaaaaaataaataaataaataaccccaaatcccaggatcagtgaagtcaggctatagcttgtgctccgtgtctacagagaagaaagcaagtttattatagcaaagactatcagatttaaagtaagatgaactcaactagaattctggctccactccttactatgcacaggatcgtggataagacactcaaattctcaattttttttttttcaaatacaaaatggaagtgatatcagataatttgtagggcatttagcaaatgattgatagtgcattagaattataaaaaac

SEQ ID NO: 62029 - DNA, 806 bp, Bovine  19866880764606
  misc_feature (1)..(1): n is a, c, g, or t
nataaattacctttcccttttagatctattttaaaagagaattgcagacctgacagctgacagggaggcagggggtagaagaaatcagagtagagaagaatgttggcctggaaagaagcttcacctcccctgaaaatgagctctgctttgaggcttggcttaggaaaatttgggggattaaatcaatagatggggctggaacgaggaaatcaagaaacaattaaaataacagctgcttcccatcctttccactctttggctttttcttatccgctcttgatgatgagttttgtagccctagttggctacagagcagaacaaactaaaacagtcaccatggattttttttcttccaaaacatttttcagtacaaataactttaggatccacacatctcaaacattaaattaacaatcttttgtcctctgctgccaccaagatcccccagttgtatagaaatgaggattggaaaatattacaggtggacctctcaggcaacttgaacttctgaaaaacagtagctacaacagatgtttctttcatatgatctgtgtttgatctcctaaaaaatattcactaccattggcaaagggtgagaaaatgtgtataattcaaggggaaaacatagaaaacaaaggaaatatcccatgataccctacaacaattgctagaaatttcactgatcaaaatatgggtttatgttacagcaaataatctttattttagatgtctaatatccaaagatacttaaattttcagacaaaggcaggcagcagccattttcaataaaaccacaccatttcaat

SEQ ID NO: 62030 - DNA, 1037 bp, Bovine  19866880924784
  misc_feature (1)..(1): n is a, c, g, or t
nccataaatttgagcatcatttacagatctcttctctccacccccccaaaaaaataccccacatatttaacatatgtctctttcatttagatcctaagttaaaggagaaccatgtgctctagcaatgctctgtgttgcctcagggcttggtgaatttaatcatttatttggatccacagataattgcctagtcaataaactttgatgtgggaatgtaaatgattgcatttgaagactgcatttgaagagttgataattacgcctaaattttaggatttctgtgaatactttaaaatatctgctggaacagaatgatttttttttttttaacttgcaactttactctcctaattagtttccattggaaaaaatagtgaattctggattcactattcacaaaaacagattttgctccatctctacttagagaatcattttgctacttgaatgccagggcgtgatttaggtggaaatgaagctcaagaaatgcacacatggacagcctatgacctaagctgataaaaataatcaactacataacagctgtcttttatgttaagcaagtcttctggggatggtgatcaatggaaaaatatctttctaagcggaggcctcctaaaaggaggacagagtacaggtatgttagcatttgtatcaatactgtggtgagtgtaaggcattttcacgcaatttgtgagaattcataataatgactaccagtgtaactacaaccatacattgaacaattttatcctgctgctgctactgctgctaagtcacttcagtcgtgtccgactctgtgtgaccccatagtaggctctctcattttattttcacaaccaaatgatgagttaaccatgagctgctcacctggcagaggcaagatttgagagattaatctgtcttcaatcattcagcttaaagtggtagctgctgctgctgctgctgctaagtcgattcagtcatgtctgaccctgtgcgaccccataaacgtcagcccaccaggctccccatcccgggattctcgaggcaagaca

SEQ ID NO: 62031 - DNA, 3499 bp, Bovine  19866880929318
  misc_feature (1)..(1): n is a, c, g, or t
naaaaacaaaaagacaatctagttacaaatggctagacacttggaaaaacatgtcctaaagagaatgcccatgcttcgataaatatcattgttcattaagaaaatggctgcttaaatcacaatactatacctatcaacacccactacaatggcttcaatttttgtaattgaaaggagttatgacaatgtggagcaaatgggctatcatctactactgattggaaaataaacaggtaataccatttaggaaaatgctcagtatctactgaacataactatacactataattaatacctaacaattcagttattgggcataaactcaacagtacattcattatgtataccaaaatcatgaattgaaaaaaaaatagtattctcaatatcataaaactacaaacaaccctaattctatcaaaaatagaattgacaaataaaatatggtattttccataaaatggaacactacacaatactaaaaaaaatagttactactacacatagaaacatcagtctcacaaatattatattgaattaagtgaaatattaaaaatattctctattgttccaacaatgtaatgttaaaagcaattgaagctaatctacagtttgccttcagtggagttatggttaggaagaaatgtggaacactcttctatattttgatctggattgaggctatcaaggtatgtttactttgcaaagatctatcaaattgcaaatgaatgatttgtatatttaaaatatgattttaaagatactgtcttttgccttccatcctttgatttcctactggttcctcccacttgctgaacccatggagaagccagaagggagagagcaaatcattgcagtgagtagaatatcagggtgctagagccctgagcaaggccagaaatacatctaaagtggccagagcagaataactagctcaggggcagttccaaatgcacattggagcttagattataacaatggaaaactggaaatagattgaatgtccatgatcaagtgaataagtaaattacatctaaaataactatacgatggtatatcatatatcattgcaaattagaagtgcatgagtcaggaataatgaacaaactaaagcacaaaatgaaacttcagaaagaaaatacagggtgacatcaattttctgtatttttaaaacatatacgactgtgtgtgtttgttagttgctcagctgtgtccaactctttagcattagaagtaaaatgcttaagaaaattaatatcaaattcagaatagctattttttcctggagaagagtgaaatgtgggcaaagtttttacttgtctttgtaatattttgtgtcctaagctatgagacagttatctacgtgtttattgcatcactctttacaccttggtgaatatctaaagtatttcacaataaaacacaataaaaaattctgagctcatagaatatctgttttatagggcattacttgaattgggaataaaaaaaaataatcattcccatagggttaattttgacccatcaatgaagggtgagtggaccccatcaacacagcacatcctttgacatgtttactcctagattaagggcagggtctggatgccctgtttgtgggcagctgtgtgcagctgtgggcttcccaggcggcactagtggtaaagaacttgcctgccaggttccaaatgtaagagattaggatttgagccctgggtcaggaagatcctctgaaggagggcaaagcaacccactccagtattcttgcctggagaatcccatggacagaggaacctggtgaggctacagtccataaggtcacaaagagtcggaccccactgaagtgacttagcatgcaacacacacacacacacacacacgactgaagcaacttagcagcagcagcatgtgcagttgtggaagtgatttgcgataatagagtcatccatggcttttgaacacagcagagataactggtccacaaagagatttaatcctcagctttgactcatcagcctaatgctctctaaaactgaattcactttagtaaatgtatatatgcttcatgatgctttctactgtgatgtttatatctatttatataactgttagagatatctactatcaaatgactacttctgatttgtattccttgaaagttacttaatattttttttttctttttgaggaagacctttaggtattcttgctttctactcatttaaaggtttaaaatttacttctttagatcatatctttatccttataataatgcctaatagagctgtccttattttgcaagcataacaaagactatatgttgtgtaatcctggaggctttctgatgagtactgcataagttgaggtccatttaacaaatatgatctcatgcactgtcagcatatgtgtactcactataattaaaatgcaataacaagaaatgcatggcaaatgagttttaaacctctaccgacatatgaaataacttctccctcccagggtcaattgaaccacatttctcacttcttttaccctatgtctccacatagatctataatagtaagggggaaaaaaattccctttctcattacagagaaacactgtaataatttaatttcattgctcaagctaaggacttttaaatatcacaatttctatggcaatcccctttccatttattgtactggagaatatctttttattcaaactgcatccataatatcaagtgcaagaaaattgcagctaaaccaatcacagcatggtaactcctgaattaatattcttaaacaatgaacataatttcagaaatgcttccatgtttctctcaacatggaaggaatcaattcagtgtgtcttgtgacctctaaacctaaagatttaaagtggaaaatttcaggatcccaacacttggcctcaaaatttattaacaaaacacctggactttggatatttttctttgattaaggttggcatttgttcagctaagcatttagctataaggaaagcttcttacctcagactgctgtttgcctggcatgtgcaaatagtttctcctccacaaacacctacagcagctaatacattccactgtctagaataatctgaagattggatttatttagataatggtgtactttgttacgtgaaaagcactttcatttacatagatagaattttccataaagttttcattcaaatatttgatatcatatagatacatctttaatttgaatggacagaagaaatcatctgtttcctttgagaaataacaagacagttaaacatttttttttttggtgttattggacattatacattatttacttaccctaacaaggaacttcttgtggtttttattttttttgtctttcttttttttttaaatgtggccttcgcaagaaaccctcagtgcccagagcatatttttcatcatctggaagccagagccagagtgggagcccaaccaagattggaaccaaaagtgaagtcctcaccttcagcacca

SEQ ID NO: 62032 - DNA, 960 bp, Bovine  19866880944651
  misc_feature (1)..(1): n is a, c, g, or t
natgccctagaggaggaaatggtaacccactccagtgttcttacttggagaatcccatggacagagatgtatgaggagctacagtccatggggttgcaaagagtcagacaactgaacaactgagcacagattaaaaaaaaaaaaaaaaaaaagacaacaaattaagacatctgtttaaattgaataactagtggatagcagaactaaggttaaaacctcagcaatctgtctgcaaaggccactctcttctacaatattctgccaacttgattagccatagttgaaaacagaattccagaactaggacacaatccagaataaattaaccaaattatagaaatgaagagaaggaaaatatgaaagagagatgagaaacagaagatagagtaaggtggcataacatacatctaattgaatttctaaaggagagactagagaaaatgcggggaagataatattcaaatagataattttcagaagttcttcaaatgaataaaaaagatgaagccatctattcaggagtcacaagcaattccaaagaggactgaaaaaaagaaaaactcacacacagacacttgctagtaaaaatgcagaccaccaaagaaaagtattattcaagaataaaggtgaaataaaggcatgtacaactaaaaagaaacttgaagtgtgtaacaacagagaaattcagcagaggaaattacagaggagttgaaaaatgatcctagaatattgtagttctaaagaataagtgggaaagtcaagtttaaaaaatggaatatatgttaggtaatctatacaagcattgattatataagtcagtaatgaaagtgaaagtcactcagttgtccccgactcttgcaaccccatggactatacagtccatggcattctccaggccagaatactgaagcaggtagcctttcccttctctcaggaatcttcctaacccagggatcaaac

SEQ ID NO: 62033 - DNA, 1046 bp, Bovine  19866880965167
  misc_feature (1)..(1): n is a, c, g, or t
nacgtcttaatgctgacagcaaaaatgctatttgcatcataatcatatttgcctctcccttccttcattgagctcacgggtacccacagtactattagaagagcttaagaataaatccagtctttccttgagtttccattatatgtataaaatcacaacaggtacttgatgatttgcatttgatactaacagaatgcaaattgatctcaaagcattaaaatgctctggaaaaaaggtgaggttcaaatactaactaaaatttcccattcatgccaattcaaagaaaaccaacagtatctctcgaatgcagatacctataaaaacaaatacgctatgcagagataagaatagcaggtgaaagccaaatatgaatataggaaaacataaggggcattttccttagtaacatacatgtggattccatggaaatgagtgtatcaactgaatgggcaagactagcagcccataggaaactaccttccctgtcctgagattgtcagtttcccataaagtcacttacaataagttaaaagccaataagttaaatgcttgtccttttgtactcctggcccgagagtttcctaataaatttgacaatacggtaggtagcctttttgacaacattttactgttttggtccaagtgtattgacaacctgtactaatttcttgaaaagcacacaagaaaaagtattttgacagcttcaacctactgtctgatgatggaaattaagataattatgttgacctttctgttggaagttctggtgggaaatgatatctttagacaatctatattaacccatctgaaacacaagggaaaaacctctaaatttttctcaacctgaagatttcacttggttttcccaaactatctagaattataacagtgatgtattcagagaaacgtgatctcttgaattgcaatttctaccctttgtttcttttctacacttttagtttctttcaaattgtttccttgagttcatttcaattagcacggttaatagcatgccatcaactgtaaataaattaaagcagcaactg

SEQ ID NO: 62034 - DNA, 1791 bp, Bovine  19866881002606
  misc_feature (1)..(1): n is a, c, g, or t
naattttgtataattttgtagagaagcaaattgacttcccagattacctcactatataattttaatggtaatagacctacaacatgtaactagaaccttcatatttatttatctgatttcccatgaaactaagagtctattgcttttttagggattgtggttctaatgctacttgtccccagtcaaccacaaagaaagctttattatctgcctgttggggaaacttgtgcatcagatccctgactctgatgatattttcttctcttcacactgtgtgaaaagctgggatatagctactgtcggcctgtttgcttctctcccattcatacaagatttaccctcaggaatggctgacttcatttctgatttgttctcatctcccagaattcagttgctttaagctaccttttggactaaccttctgaccagggcacttggcaatattccagtctgtaatctcctctccattggtaggtctgctttctgagaagccagggagaaggaaattttgactgtctttggagctaaagtataataccagatcagatatgttaggtattaaatgcatagaaattataagctgctgctgctaagacacttcagtcgtgtctgactctgtgcaaccccatagacagcagcccaccaggcttccctgtccctgggattctccaggcaagaacactggagtgggctgccatttccttctccaaggcatgaaagtgaaaagtgaaagtgaagtcgctcggttgtgtccaactctgtgagaccccatggactgccgcctaccaggctcctccatccatggaattttccaggcaagagtactggagtagggtgccattgccttctccgaattataagctacaagtgttcaaaggctaccattttaaaaacagaagtgtatggaaggtaaccaaaatgaatcttgacaagaatcgtggtaaaagtcacagagcttaaattagatatagatttgacatgaagaagatgggaattgtaatagaaaaaatagcacattcaaaaattaatgataaaagaaatatatatcaactggtaattttagccttttattgggcctttggaatggaattcttgaggcaagaatactggactgggttggcattctttctccagggaatcttccagatccagggatcgaatccaggtctcctgtattgtgagcagattctttactgtctgagctatcagggaagcccataagatatgcaagtactattaactattattaattgtattattattattatcattgttataatcactgttaacctttcttctgagatatgcatctaaaatgattagaaacttattgctgtttgaaaaataatagagaattttgaaaacatctcacagatgatgatgttcttttaagaatctgaaaaatcgtgatggctcaagggtctattatttttagaactcatttggggcaggccaaatatgtcctacactgtattttcatatatagtattctcctaattacatatattgttatgaaaaaaaaaaacaacccgtgtttctttagtgtcatttaataaaattaaaccaatcaatcaataaatctcatcttaggtgggatattgctgtgccagtctgcagactgccattgtgaagtgcatcatgggactggaatgagtacatggtccccttggcttacatcatcccatatcttaagctgtttaatccataaagcccagaacatggtgaaatacttttattaaccatacttttggtaggggaaagagaattacggcttgtcctttgtgggtatga

SEQ ID NO: 62035 - DNA, 699 bp, Bovine  19866881059529
  misc_feature (1)..(1): n is a, c, g, or t
ntgatattttccaggaaaaaatacttaagtgggttgccatttccttctccagtggatcttcctgacccaggaatgaacctgcatctcctgcattgctcgcagattctttacctacagagccaccagggacatataattaaacatggtcttcttgtgcactttgatccttgtgtatattcttgtcagttgttcaaagtggttgaatttgactctaaatagtttcactgtcttaatacattattctgtgtggcaaaaataaaactggactagaattatctaggccaaatgatacagtggatttctaggaagcctaaggcagattggctattttgcattgagaagaagccattggagagtgatagtttaagaaaaattttgttgtgaaatatttgattggggaaacatttttgaaatgttcagtttaacacattaaggtactattatgcgccctccaaatagatttcctggagattgtctgccaccttcaacacatttactgaatttcaacttgaaagtttattgttgtcaggggatagatgtaacctgaattaaaggtgtaatgttagtaaataattttctaacaacttacaaaaattagaactgaaattttaagctttgttactattggaggtagtattaaagtaaaagtgaaagtctctcagtcgtgtccaattcttttgaccccaggactatagagtc

SEQ ID NO: 62036 - DNA, 812 bp, Bovine  19866881080717
  misc_feature (1)..(1): n is a, c, g, or t
ntatttggaattctctgcatcttctattcttgccactgtcaaatggatcattacattttcaacacttaattatcttttcacctaaattgtgtcttatttaacttgatcatttaaactgctaatgtgactttttaacatttgtcttggctttatataaatgaattgctattctctaacttgacttttgcttaacatatgaaatctgaaatttataaagaggaaaagggaaaagtgggaatttcaaaaaatagtatttgctaatgagaaccattttcagtaacttagccgctagactttggcacattccttggactaggcattgggtcactcccatttttcatagcttgtcacacaattaactaaatcattaaaatggaactagtccattgtgacaaactgaaatgactaaaagcttgcctaaggcattgcactgcacggctgtttaagaaaattccatctctcctgaattggtgatggataatgtgacaaaaatattccgattaaattctaactttggaatacttaataaattagtaatggcattagaagtgccacttctattcacctgtcaaggaggagggctgtgatgctgatctttttgccctctttgtctgctttcatgagagctgcttgcagctgagggggtcatatcttatgaaggtataagatgacagcaaggtaagagatgaggtttccctgtcatgcctctgtacttactcatttcttcccttcagatttggagacactgaagaacacaatgcttttctttgacagatggaaaccttccttctctcttcttcatcatcattttc

SEQ ID NO: 62037 - DNA, 1233 bp, Bovine  19866881370371
  misc_feature (1)..(1): n is a, c, g, or t
nctcctgtgaagtctctttttaggttactaaactagtctagcttccctggtgacacagcagtaaagaactctcctgcaatgtatgagacaaggcaggagccatgggttcaattcctgggtcaggaagttccccttgagaaggaaatggcaacccactccagtattcttgcctgtaaaatcccatggacagcccatggggttgcaaaagagtagggcacaacttagtgactcaaaaaaaaaagacaacaaaaagcccctcctcagtccaaaggtgggtgaaccatcatttcactttggacagtcagtgaagacagggactggaaaacttgtaggtagtaagcctgtaggcttgctctgatgctatccttgggaaactagtcatattgtgagcccacactgattcatcccccaaatttggttgaatctaaagagctgatggaaacttatgtgattggccagtaacacagaaaaaggatgaagctgcacctagattgaattatgtcagcaccctcccagctgcacagcccttaaaaaattcgaaccacacaatcatcagtattttacaaagctgaatgctacatgtctcttttgacaatgaggactcggttaaaactacattttggcactctgagagatgaataaaaatctacttaaacgtggtgtttctaatactcagtgtcacgttttaccggttggcacacatttatcacttcatttcccagtgcagtaaacaactcgtaactgactggttactttgattgacagcagccttgggcatttcttagcactcatgttacagtattgcatagagtcaaacttccatggtaattggcttccacaacaacaacaataatagaaataatcatttcagagttaatttaaaggagccaaaagaagtcagtcaaatatgaggacgataaattatgaggatttctcatttaagtaagtaacaggtttaatggctttctctaagtactgagatcattcaattgaacatctgctttccagctgtgcatattgatatattactaggtttttattcccctctaccctaaatgtatccataagtttttaggagtttcactacctgactttttgacaaaggcttgattgtgaatgatataaaaatgtcaaaaattctggaggccatattatgcccaaggtattatttttcaattgactccaaagacagatgtccatgaacaattaaaccattctccaatcacacccttg

SEQ ID NO: 62038 - DNA, 1900 bp, Bovine  19866881557614
  misc_feature (1)..(1): n is a, c, g, or t
ntgcttgttaatagtttagtctgtgcctaataaatgaattttgcagatcttggaaatagtgcctgatagcaatcatgtaggatagtccagagttaactattttcctttaatgtgaagcaagaagtggctaatggaaacaacacaatcttctctggccttggaaattatccagcatgttcccataatcacagaataattaaaaatgatggtggtatcatggaatatttgtgcaagggacaaaaaagatgcaggtgcagtaataataatatggtgacagagtcccaaaaggaaaaaggcgagagcattttccagcctagagtatcatcagtcagtaaatggatgtcctttctggcataaaattaatagcctgggatttcactcagtaattggctattacataagacttcaccatttactgataggtaattcagaagtccctaaagttctttgtcagtcctctatagatgcaggcaatggagcatgtactctttctcaatcccccccccttttttttaaagctgtccatacatatctgaataattcttagtgtttgtatcaatgtggataatttcaatgtcaggtaacagaggagtggggtactgttgataatctctttcttaccagaagtcatgagaagctgcttattaagtgtgctatttctctcatatagtaagtcctcaaatgagtttccaaggttagttaattctagatttgaacaatgtcaaggggccagatttttccattttgacccatcatcctcagcctcttaacctctgttctgatacttgtcccctcctagacatgaggaacccacatatcatggtataataattacctgacacttattttaaaattctttctcagatttgagatataaatgattcgtaacattgtgtaaatttaaggtgtacaatgtaatatcctgatatatgtatatattgtgaaatgattaccatgagaagattagttaacacactcatcaaaccacatagtatgacattttctttcttttttttttttttgatatggtaagagctcttaagatttactctctcagaaactttcaagtatacaatatattattgttaactatagtcattatgttgttcattacatccccaggactaattcatcttatagctagaagtttgtatcctttgactttcttcatacatttgcctcccgcttcccctggaaaacaccaatttgctttctgtttctatgagctcccccccttttatgatttcatgtatgagaaagattgttcactatttgtcttctctgactgttttatttcacttagcacaatgttctcaagttccatccacattctcacaaacagcaggattttcttctttttatggctaaataatattccattgtctatatatgtgtatgtgtgtatgtccatgtcttggctgttgtagagaatgttacaataaatatggagtacagatatctcttccagatagtaactttatttctttcaaataaataccccgaagtagaattgctgaatctatagtaaatctattttcaagtttttgagaaaacttcatactgttttccatagtggttttaccaatttacaattccaccaggcatgcaaaaaatttccttttaatccacatcctccatggcacttgttatctcttacatttgttatgttaaccatcataatgtgaagttacaacttgatgtaatttttgatttgcatttcctgatcatttgtaatgtgaacatttttgcatgtatctgtttgccattttactatcttctttgaaaaaaaaaaagtctattcaggtcctttgcccatatttggttgtatcatttgtggtgactccagctttgttcttctcttttaggatactttggctacgtggaatcttttccggttcca

SEQ ID NO: 62039 - DNA, 679 bp, Bovine  19866881559877
  misc_feature (1)..(1): n is a, c, g, or t
naaattgagaagaaatttcgattgctctaattagttaataagtcgattgagatcctttgtgagctgactaggattccttttcctttactgtttaaacatataattttggatgttaaaaaattttaaagaaagacaatttcaatgtttttaactgctacttacttcactttgtaatcatgctgtattttgatgaatggatggactttttactgctggtttacgagaaccgaatttcaattatatcagaaaataatacatcttcatttagaaggcatttcatgtaggaaaaattaagttttccctgatctatatctaggcatatttttttttctgtttgtacatagataagattctctgaggcgctcatgaatattttggtggctcccatgggggtctgacatttcaatatttcctgtcacgcttgagaaggaagcatttcgcaaaattaaaggcactgataagcaaatccttcattaataaaacagactattaagtttgcagctcctgtacttaaaatttccctattttatctaaaattaatttgcaggtaccatgaaacttttttgaagtctgcagaaaagagagatgaagttaagggcaagattaaaaaaaaaaaaatggcttcatctatagtacatctctgctccacagatcattttcttctttatttaataattaa

SEQ ID NO: 62040 - DNA, 1532 bp, Bovine  19866881786272
  misc_feature (1)..(1): n is a, c, g, or t
nttgatttgtgacgtagttctttataggctcaaatatatccaaactaagattaatgttgcacaataaaaggagaatgttatgctaccagaatgttttattcaatatcagtagcatcagaaaaatgttgtagttcatttatgtgagtatgtataaaaatattttttggcaaggacttctattttagatgtgggaatactgcagcttgtttgaacatatttgtgaattatatgtgtcccacaacaataggggcttccctgatagctcagttggtaaagaatccacctgcaatgaggagaccctagtttgattcctgggtcagggagatcccctggagaatagaatgactagccactccagtattcttgcctggagaattccatgcaccagaggagcctggtgggctatggtccatggagtcacaaagagtcagacatgactgaagtgacagcacgatgcagcctgtgcagcaccttatttcagtactcatggtttatcagcaagtgccttgatgcttttgtctcgaaaggaaaaaggtaactattctgcatacggaacaactggaaaatgagtggcaggataccactgtttgctctttatccacatataaaaatgaaaactatgtccactacacatgtgtttaattcactattagaggaagttattacaaggctggaaatataaagcagagacctaccaaaactatctcatctatgtaagagcaaattttagtaataatattcagctttaaaaaaaagaaagaattctaaatcaggatattgggatagtcctcaccaattagaactcttccaagccaacggggatggatgtatgatcactctgtttttcagccgcaagtctgctgtgctcttaatgcacaagtcagctgttgacatcacttataacttctactgaatgcttccatttgacttcagttattcaattttcttcagctttcttcaagtatttatatattcagttcattagagatggatggattgacatttactttgtatattttcccattatatattcttagttaaatcttttctgtttgtatttgtcctgttaccctcactggactcactctctgtgttcttaaggactatagcctcttttgtaaatctcagcacataaatattgttgatttactaactacatggctctaatttaatgtttgcttgaaattaatttacatttaatgaatataccatttaatgctaaacatttaatgaactaacaattcacttcttataaagatcccttattccaggataggagttaaagaaaaacccagtattttctctgggccatttataatctaagacttaggccttatattgccaagtctatttttaagatgtctcatttattcatttgaagtgacagctactatagatattttcctaatattttttgatagttttaggtccagttagtttgagctgtttagaattctcagtagtttcccttcaaacacaaatgtcatattaaaaagaaaacaaagactaaactactcaagtcattccctatt

SEQ ID NO: 62041 - DNA, 670 bp, Bovine  19866882017019
  misc_feature (1)..(1): n is a, c, g, or t
nctagaaatacaattttaaaaaaactatccgaaataaaagtctaaaatatttcttccatcaataaataaaaacagaatatttagtaaatgtgtatgggagattaacatgctagttaatagcacattattttaagtaagatttgaaagtgtatagcacagtatttatacataggcattgttcaattatgcttttcttttttactcttcctttcataatgtatctgaatttataatgcagttttgggaaaatattccagagaaagaattgcacaagattcagtctaaaatcatttgtcatatcagatactgaaaaggccaaatttcttagtgttagaggaaagatgctattctaataaaatcacattgtcagatatagatcttatcagaaaaggaaagaataaacatcaggattcctggaaatacagtctacaagaatcagaagtctatgctgaaagaaagaataaaacgttcagtaagaacttccaaggtaaaactctttactcattgatctgtcttagtccaatactatgaaatgcccgattacttagtatccgtttcaaagttaaatgcctctcttgaggggaatgcaaggttttcactgaaatagctagatgctaagtaagaaagagtctttcagttaatacacttttccatgtgcttatataaggca

SEQ ID NO: 62042 - DNA, 2225 bp, Bovine  19866880379112
  misc_feature (1)..(1): n is a, c, g, or t
nttaattttcattgtttttccctgttaagtttcacatggcctcagagaagtcaagaggactttaccaatgagcttttaatggcacttctaatgcctcagcttgttttgtgacatattatccatttccccgcctcgtttctaagaccgtatatgtccagcaacagctgaggaagtctcaacatctcccatgacgtagggcacctcttagattgattagggcattgtcaacttcaagagaaagaaaccaaccccaaacttacttcagaagatcatagctgacgagcctgagtgtggtgctgctttccggcttgcagctagatttgaggtttccatgtcagtcccactcctgttgcttccttcagtgggactgatgccacgttagggcccgtgtggtgtactgcgcctcccatggctccactccaggtctctgcccatgatggtacactggctgcagcacaagctcttggattaaagtccattcagaaacgggaagctccattctccctgctgctgcagaattcccgagacccattctgattgccttcgtttctgaacccccgaccaggcctggagaatgtggcttgctgaacccagtactggacctctcctcaatccgggtagacccagagtgggagaaagtggcttcaaacaaaaatcagttcttttattgaagaaccaaaaaggtcagcaatacctcggtagtgctcatattgaaactctcagatatgggctgaattccaaaattcatatgctgaaaccctaaccctcagtagcctcaaaataggactgtatttgagatagggattaagttaaaataaagttattagagtaaaccctaacccaatgtacctggtgtccttacaagaagaggaagtttagacaaagagagaaaaaaatagccaagtatttaagacactactatttcccaggaacttaaataagtatcccagacagtgcagacatcatctcctttctaagcatcttgccttttatattaagatttttgtcattctttttaatcccccctcaaagacaatagcagcttgaattcttcagagcttgtacaattaatacagaaaagagctgaatctcacagtcatgaaagcaaacgattgaaagtcagtttttcccactttctatttggtttttgttcatttgaacttagatcatgcaaatattgcacaaaatgtaatctttgggagagaatttaaaagctcgacagtataataaaaattctctgcgcctgagatctttgattcaatgaaagatcacttcagttggggtgcttgttgttttatcagcagtatgaagaaaatgtttttagctgacacaataaaaaaaatgccattaaaaaataaataatgcatagtatttgaatccttctttcaagaaaaataaaaacatcctgtttcagttatttcagcagctcttctaactgctgaatgcttgcttctccaacttgtctcttctccctcctcccagaaatttgtctggttcatgaaattctttcctggtccatgttcacactgctattgtgttctattaaatgtgggatatcattacagcacgtgtcagtcatcagaaaaaacccaactccgaggctctgtatgtgtgtacgctagctcaataaattttagacaacagatgtagccgcaggttccaccttctgccactttcccagttcaataagaggtccagatggttcgctttgccctggtgtcttgaatcttggtatgaagatgctgactctggtgatctttctctggaaccttcctttgacccataggtccatggcaagctaagtgtcaatggagactgccttgcacgtatctggccatttggaatcctgggtcccttaacagttaaaaagcatcttgaagtctctcttagcattctgcatggagaaactgtcgaattacattttctcctctgcttttgaatgtttctacgcgctgcctaaggaagcccagggctgggagaaaggtcatcggggcatcagctctgcctcaggaagagccggagcccatctactaggaagacaggagaatccagctggaacttagagtttcccagctcggtcaagagaaaccaaggcaaccaacagtggtgttgacaaaagaatttaagatattaaaaaataaaagttaaggtcctaaattgtgtgtcctatgggataaacgcagttttgtttccattctctggaaaatgctcactctttaaggatt

SEQ ID NO: 62043 - DNA, 652 bp, Bovine  19866880388470
  misc_feature (1)..(1): n is a, c, g, or t
ntcttgtgtgaatttgttttgaactttttatcatttttcaatatctttccgaatagatcctagtatacaccagacttctcagttatctaattttggaatcaggtttattttcctcccaaatgtcaacttcactagtgatgtatggcatttgggagaacagctggagtaaaacaaagctcaaagtctccaacattccagatgtcaaatagctgtctcttcatttacaggaatctgaacagcaagtgtgtaatgaaagttttagggaagactctcagacatggggaaacagaatatcaaagtgagaaaacaggtgttggactaattttgaaaaaagaagaagaagaaggtaaaacaccacagtaccaagtaaatcctctgcaatctgttgagcagctaatcccagaaaaggaaaaaataaaagcaggcaatttccaagcatcacagtatttgcaactgaagtttgtgtctaatttatgttgcttctataactacaagtgtagcaaaggtttaaggtattttttaagtgttcaaatgcccacagcaccaattcagcagccgcagctagagatgtgtctccagcatcagactagaagagcagcagagacgttcctcttctctcacttctcggtcttccttccttgcttttctttct

SEQ ID NO: 62044 - DNA, 798 bp, Bovine  19866880486237
  misc_feature (1)..(1): n is a, c, g, or t
nagtcgaacacgactgagtgactgatctgatctgatctgatctgaaacaacacaccctcccctcgccaaagcatgcatctctgccacagcctttggaaacacataactggatccattgtgctgtcaggaaaagaaatatatggcgggaaccataatttatccagcgggagaagaactacacgtttgttctcgtgtgctctaatcacagcaccagagaaagaccaaagtgactttttggtacggtaaaggattagaagaatgtgtaataatttctcataaaagtacaagaaagctgatattaaagacctttaaaggataaatctcagcatgttgcacttttatgtatgcaagtgatagagagacaggtacagagccggaagagacgagaatccatgaggctggtactttgattagaggaagggctactggaatccaggcaggcacccatcccttcccctttcaatttcgtctttaaaagtcatacaggtcaggccagccccattcaccagtcctcaactacaaagagttgggagacggtgcctcaagacagcccatctttttcaatcattttgaaggaaacttcagtgataaaagcagatctgtgagtgggtacattttaattcacagttaacaaaagaacccatcttcactgtggatggccaaacaccagcccattaaaagccagtgtcagtgcaatgggggaacgttaagcatcactgcatgtgcaagtagaaccgactggtaaaaagtaaattgaacacaaagacactgacgctttgcaaaagtggaacaaaaaat

SEQ ID NO: 62045 - DNA, 2023 bp, Bovine  19866880499901
  misc_feature (1)..(1): n is a, c, g, or t
ncctttattgagcccatctttgcatgaatgttcccttggcatctctaattttctttaagagatctctaagtcttccccattctattgttttcctctatttctttgcattgatcgctgaggaaggctttcttatctcttcgtgctattctttggaactctgccatcaaatgcttatatctttccttttctcctttgcttttcacttcttcttcttttcatagctatttgtaaggcctccccagacagccattttgctttgttgcatttttcttggggatggtcttgatccctgtctcctgtacagtgtcacgaacttcagtccatagttcatcaggtactctatctatcagatctagggcccttaaatctatttctcatttccactgtataatcataaggggtttgatttaggtcatacctgaatggtctagtggttttccctactttcttcaatttaagtctgaatttggcaataaggagtttatgatctgagccacagtaagctcctggtcttgtttttgctgactgtatagagcttctccatctttggctgcaaagaatataatcaatctgatttcggtgttgaccatcttttgatgtccatgtgtagagtcttctcttgtgttctctaagctcaggctgctataacaaaatatgtagaccaggtggcttccacagcagagttttctctctcacatttttagaggctgggaagtccaggatgaagtgcctgcagacccctcttcctggcttgcagacagcagccttcttgctaggtgctcacatgccagagagggagacagggctctggtctctctttctcttctcctaaaagcactaatcttattcacaaggggtccacggtcataatctcctctaagtctaatcatctcccaaaggtccaaagatcaccacactggggagaggagaggaacttagcttgtgaattttgaagggacacattcagtccacaacactgtccttattaaaagcgtaataattaaaatgaaaggagtgtccgtttgaaatggaacacatgtaacagtactcttctacttggacatctggctataaaacaaaatcctgtcacacactgaaatagaacgttatagccacagctgcacaaaggcaggaattaacccaaaggcctttgtgactccatggacatagcccaccaggctcttctgtccatgcgattctccagacaagagtactggagtgggtagccagtccattctccaggggatcttccccatgcagggattgaacccaggtctcctgcattgtaggcagattctttaccatctgagccaccaggaaagcccaaaagctgcccacttcaatacattcagagcagagatccactctcactcaaacacgaacacctcatgccttgctctctgcatcccgttcaaccaattattgttgttatttctatgattattaagttcttctgaacagaaagtccagaggtttctgcagtctgccagagcaggtgcccaagttcatcaaaggtcgttctctcactgggtgccaccaagcaccagggcagaggctgaaatggcacgtgtccaaaatctttaccaaaaataacttgagctttggccccgtgggctgctgctctcagtgggactgtcacagaaacacgtgcagccttggccccgcgaggcgaggccgcgccaacgaggaggatagggctgcagattggccacctgggaagctcagtcagtcctcattaccctttgcttattgagaagtgcttcctccaaggctgaatgaaatttccaggaggcccttggcccctttgactactaatgtgtcatgaagagttcagctgagcctagcaaccacagaacaccaacacctctcagcgcagggtgtatccgccagtccggtcaggcctgagagcgcgctggggttgggagcgggatcttcactgactttctgagctgcctcctcctccaggtaataactgcaggcgtcagagacctccagggtggagaggctgcaacacagagaagct

SEQ ID NO: 62046 - DNA, 1562 bp, Bovine  19866880560619
  misc_feature (1)..(1): n is a, c, g, or t
nttatatctccgactggttactactgaagaaacgatttacaggaaaagttgaactacacctggctatttatctgcagccatcgtggcataaacgttggatgtacagtgagctgtgctaagaaatgatttatctccacgtgctattgattctctcgtgagtcaggaaaggtgcaattgagcagagtgatgtgtgatttatgaagaggtatcaaagaatagaaatcggatgtctccatagctgggtccatttgatttcccctcttgctgcgttgaacacagatacatttcacaactgaatcaggtacctactgcgggtactgggtcccagctaactattcagaaaggcagatttaattgtcaacaagaacagtttatcattgctaagatcctttaaattgtgcttgtcaacccagaagtgttctttgcaaacgctgtgaggttcatctcctcgttcacagtacaagctcggcgtcctctcagcgtgagtcttttcagtcggaagtccttgctgcaggacttgtcacatccccagatattttagtctcttgtttcatctccttgaatctttgctgatttgatgtatgtgtgtaattagtaattattaatatataacacataaagtgtatcatgttagtgatatgatatgagttcctgagccaaaaccatccaacaaagctgtgtgttttcttaactctcagagactgtgcagagcaatatgtgcttgctgttttaagttgctgagcttgggggtaatttgttacacagtgatagatactttactggccattgcaaaccctgctttggcctttgacattcctagcctctgctctcttttcttaccatctctttctctctctccctttctttatttcttgttctatagcccttggcattcctttgttcattacttgtgtttattgtctcgctctctccttctaaaaggtaagtttcacaaagatccaggttttgatttgtgttgttaagtattatagcttcagtgcctggtatagagggtctcagtgaatgtctattgaaagagtaaataagtacaagaggcatgcaactgtcctgcttaattatggtttagagaagagtttcatattcaggtttttggctttgtttcatctagctttggtcccaactcagatctaccccagactcggaacattttagaagtttaggttcagagaactaagagataagattcccgctgtttgagggaattttttaaaaatgtcattaaaaatctgattcttttttctaggtggttataaattttggtaaatttgcctgctggggaaagagggatgaaacaaatggccttctgtttaaatgactttcacttgagtttaatttcatttgtgcatagcttcagtatgaagttggtttcggattcttttgataagtagcaaagctgaagaaatggtggcaatcacagtgggctgtatgtgtgtatgggggggggtggggggcacccaaggcttcggtctttctcttttttccttattgattccagcttttcatcttgtctgcctttccaaagagacgctaaatttttgttt

SEQ ID NO: 62047 - DNA, 1576 bp, Bovine  19866880586121
  misc_feature (1)..(1): n is a, c, g, or t
ncatagagagtgaacagcatcaagagcaccagggccatggcttcattttggcgcataagctggatggagagacgacgccaccaaaaaagacagtcctgcggctctgactcattctcctgatttatctaatttaccttgaaggttaatgtattctaaactaattccgagattaataaccacttaaagacacatgagagacatttcactctctgcgagcactgagtcataacctcgctcattgcctctccaatgactttgggagttatctgatgagacttaaagggagatttgattgcaggatatggggacggacaggtgcaatgcataaagggctttaggacttattcctgttaataataaaaacaagcttgtaatttgattttcagtactaggatccttggaagcaaatatttattttcggggtggaaatcatttttatttatcaagcgagataattgaatatgccgttatgcaaaaagggaaagattgctcttaggataaaaagtgacacgcatgtttttatttcacctcatttcatttatttagtccaaaccagcagcccgttgctgagagatccctgcgtgtgggcatcttaaatacaggttcatcaagagtgttttctctctcctatttccatcagttggacatagtatttaccaatcttgtgtggttcacatcatttgggcatcgttaaagctgaggtatttcttgttgtgaatttattgagtgctgtctgactctttgcgatcccatggactgtatcctgccaggctcctctgtccatgggatttcccaggcaaggacactgaagtgacttgccatttcctcctccaggggatgtttctgacccagggatcaaacccacgtctcctgcattggcaggcagaattctttaccactgagccaccagggaagccccccagcccaataaagggcaagatcctgtcaacaaagctttctcttctacagaaggcaggcagaaaaggggacgacagaggaggtggttggatggcatcacccactccatggacaagtctgagcaagctctaggggatggtgaaggacagggaagcctcgtgtgctgcagtccatggggttgcaagagtcagacatgcctgagagcctggacacagctccttgtggtatttcccctccactttcctcgaccttcttttttcatcattgatctccttttccattgatctaactcaacttgcaattcccaagtttaaagtgaacgctgatacgtagtcagtgagattatatgggaggggaagaagtggcggggaagcactgttagggtttatagttatcggagcgaatggaatgaaaaccagtacttccctcacctccgcttcgagctgtgatctgcagctacttaagagaacagaattgaatttaggcttttggacaaatccccttctcttccttctcctcatcatccctagttcagcatacatgagagatttcctagactgtttctcttttgctacttagagctcttccacgagggaggtgactttattgtctcccagtttacaaagaaagccttcattttctgtttccctgcaaacgt

SEQ ID NO: 62048 - DNA, 1275 bp, Bovine  19866880589887
  misc_feature (1)..(1): n is a, c, g, or t
nccatcgagtcagtgatgccatccagccctggaaaaactgaggtcatacataatcttaaatgaaaaattaatgaaaaaaggaggtctgctttccctttttctctatccacttctattattgtgttacctaccttcatatcctggtaataataaatacaaaagctaaaaataaatgttccatcacattcttgatctttttaaatgtggataaactttttggtttggaggaagtcctttctatacagaaattgctatcccagaaaactgactctgtgaccactttccaggatgcctagggggaaaaaaatcagataaaggaaaacatatttaattagtttttcttccaggcaaggagagaatacaaagcaaaggaaatagactttatgtcctcttactattttggtggaaataaggcataatggaaaaagtaacatcacagaagtggaaattcctttgagaaaagtgatgacagattcataagaatgatgagttacagctgatgctccagaatgtcagggtacattctgagctctatgtgcagaataatggactttatgagctgactgcacgtcgtgatgtatgtgtgcccagtctgttccagcacttcgttttgctttgtttttaaagaataaaatgacacacaagtcttttccttccattattagaaggaaatttcaagaccaccatatcaaaaaaggacaccaggcttcctttttgttagattttaactaatatgactttcagatttcagaaataatacatgctcattgtagaaaatttggaaaatgcagaaaatcattatagagaaaggaaatactgatttacactattactcaatcactgtaacatttatatataatgtacttgtatgtatttacatatgtcatatatgtgtgtgtctaatataaattcaattcataaaatcataaacacactcttctaagcactgatggcaatttttttaaaaaataaagtaattcattgaataccataattaaattgcttcattttattattgtaagtaatgtaataatacattaatatataataattgagaatttaattgtttactatcttatcacaaatttactgaaatggaattgctgagtcataggttagatttctttttatatgtatagtatgtttctccacttttatttggagacatccaaatttggccagacatcctggaatgcgaagtcaagtgggccttagaaagcatcactatgaacaaagctagggaggtaatgcaattccaattgagctattccaaat

SEQ ID NO: 62049 - DNA, 1066 bp, Bovine  19866880637445
  misc_feature (1)..(1): n is a, c, g, or t
ngaaaagttcccgtggacagagaagcctggcggtccatgtgggcgcacagagtcggacacgacttagtgactcaacaacaacaattctacagcaggaaggtgtgtttggggggtggggcgggggggtgaaggtaagttaggattgttttctgttctgccagaatctaatttctgtaatcgcatcaattttccctcttctccaggcaactccagaagttggtgatggacagggaggcctggtgtgctgcagtccatggggtcgcaaactgaactgagcgactgaactgaactgaactgaaccaggcatctctccaccccagccatatcatgtatcctcatcatatataagcctcatttctcacattctagtcctatttttatttattctctaaaacaagtcaaatattctctttgtctggggagttaatatcaataccaagcattagccgaaaactttctgcatgcagaatgctaattcctttttgtgcattatctcaactaacctacccacagccccataaaacagaggctatcattcttcccatttcacaacgaggaaatagaccttagtgaggttcctcactgggtgttagttactcaagagcatgaaactagagagacaagccagtattccaaccttggtttgcctgattctggagaaaaagctcttaaccattcctccaggattttcccagaaaagctggtctcctagagacattcaaacttctgctgagggtcgagccgtctgttagaagttgattttcatgcttatcataatctataaagagacatttagttgtaaccatatgctctttcatctggacaacgactttaccgtctagctatttcagtgtgacatttgcatttgtgattttaagttccctggcaccaagcattggccaagagtgaaaattttaatggagtatctctgcaattggggtctgaagaccctattccgggactgcaagcccagcagtttgtaagatgtgttttcttttaaaagaactccaccctctccttaagtgacaaagtattcaggatccctgaccgcagctcagaaactcaa

SEQ ID NO: 62050 - DNA, 1269 bp, Bovine  19866880645263
  misc_feature (1)..(1): n is a, c, g, or t
ntagacattctgggaagctacagtactccttcatttcctcatctgatccttttgcttaatttctacatctgatgggttttgctcttgaaaacccacttgctaatttgtatttactttctcttcctccctgcgtttcttccttccaacctcgcttgttcctctgagagcctacttcccaataaatcctttagcctgaaagtgttgattcagcttatttttctacagaactgggctaataaaattggaaagtggctttttgatgaagaatattgttttgctgcagctgataaggatataatcaaaagttatgtgctatttggcatcagactgcccctgaattgacatatgtgcccttctcttcaccttcttatgccttctcacttaagattctggtgctcagtgtaatgtggtgagttgttgaaaaggagcagatgagaaaaagcatgcccaggacactttctcaaggtctttggaccctctcagagtggccgctcttaataaatatgtaggatgtgtgtgagcccccgactccttgctgtcgtgcattatttactattgatgagaactgtgcactggtcctttacggagcatatcaggtcattgcttttgattcccttatgctccaaagggcatttaaaacaaagctcaatattcaagttgaatgttgatgctttgggagaggagagtggtgtcctcaagtacagcaggcttgccatgagatgaattgctggggtgttgagcaaccttatttttagcacttttattctgcttgtcctaagagacagagtgccttactagtttatcatgttgttggacacctaacatatatttataattgtgttcttagagctctcattcgtgtcagcaagtattgatcagtcacatttatctggcctatatttccatgcattcaaactggggaggatacaaatgtagtctgatataaagcttattcttaaatggtttagcatggagggactgggggaaggcctgtgacacacatgaggtgatcacacaacccagacctgagcacaggaaaaatacaagaagaaacgaaaactattatttttttttttttttgcatgaacaaagcatatcatgagtgctacccagcagtcacagtgagaagaaatctctgaggactcaaatctttgaggactttgagacttcttaaagaaatagtagtaataaacaactgttccctacaaggggaaacatatagtgtgggtcttaggaaataagttagagtaatggaaaatgcattcacag

SEQ ID NO: 62051 - DNA, 2260 bp, Bovine  19866880665021
  misc_feature (1)..(1): n is a, c, g, or t
ngctggctgaagccgagagtatttcttccccaacatggggcacgtcctcgactgtcacagacacctccccacctcccaagcattctaacaatgacagtgttagcccaaagcaaggcggctagaaatccctcttccataaaagcctcagtgacttgatggttgaggagataataaggcatggggaactagccagttctgccgcctctacagagagcagctgctgctccacctgtgggagtgctctgttcatctgtgggagctccgctgagagggccatccagggtagacccaggcccagcgtttctggtctgaacacaccttggttcggggtgagattacctcactcatcacctcgagggcagaagcgtgggacaactgcgtgggggtgtgactcgtttgcagggccttcccatcagctccctgcgggctcatgttcatcgcttctcccaggacctggtcctcagaggccccacacctgccgctcttgacggagtaggagggcaccttattgcctttgtagcatcttggttttgtgttaatggcagctgtaacaccaaaaattcacccatcatttatacttaccccttgtcctgccgcacacggccggcggtaaatgcgcagaatgaggatgtgtaaggacccggttgtgtaaaagttagagcttgtgcactgttaccttagtgccccgttcctgcatggttatgtgcttttaaagacctccatatgtggttacaacaccagttacaaacaccagtcactagctaaaagctattcaaatcctgcagacaataccatctaagctgcctgagggatttcttttcttccttctatgatttttcaaaggccttctagaatggttcagactcaaggcaaataggtaatataaaactttcaggaaaacctgtattctgagtaatacttgatgctatcatcctccatgtatttatattggctccaacaaactattatttaacctggaactagaatcatgtattttgaaaggctgaaagcatgactcactatttacatcaaggcctatttaaacaccagcgttttatagcatttcatcaattccttctccccaccccattccaaatcagataaaatgaaagcaaaataccatttccgtaaactgtggtctctttttttaaagacagttttctgctttttcattacattaagttttcactatcgtttgaactcaaatgtcatttcatgctaatgactaaatctttatagtaactatggcaattaaaaaaaaagcagagtctcttcccatcaaaacgaattctgccttcaaatgcattttttctcccttactcacccagagagacccaccgtcttcatcactggcactgataatccaacgtaattaggcccagtggacataatgcctggggcccagactgtaacttaggagcccacgaaaacattttcaattctttcaaaatcagaaagaaaaaaaaaaaaatactgaatgtactaacccagccctgagttacatttctctttatgccaaggcaatcataaactatactttgtcatatttgtcttatggaggaaaggctcaagaaggcgaaagtgctcgaggaccgtgaaaatgtctacacaagcagtgtggttcagggagactgtggaagtcacttagaatcaacccacacaacagaattcagtcaaaaccgtacaaatgcaacgctacgcagttacatggcgtcgagcggccactctgagcctccgttttctcgtaggacgagtcacaggagtactgagccccgtggtacctcaggccgggcggggaaggcgcggcgtttgctctcatgcagccttttggcccagcagccccagcggcttgttcttgtgcagcagctgatacaatcgtcaggacagcacagggccaccggggggagcagggactctgcacttagcaagtgtggtctcggccagtgtccctcctgggaggcggcgtacacaagggcgcctcagccacgagcctccctggggtgaaccggcgagccctgagggagctcaggagggagaagagagcctgccgccctacagccatcaggcggcagccattcctccggggagccctgaggaaagggagctcaggggagaggagagcctgcagccctacagccatcagacggttgccattcctccggggagccctgaggaaagggagctcaggggagaggagagcctgcagccctacagccatcagacggctgccattcctccggggagccctgaggaaagggag

SEQ ID NO: 62052 - DNA, 1997 bp, Bovine  19866880674740
  misc_feature (1)..(1): n is a, c, g, or t
ntttgtgttgaatattgtgattatatgattctttcaggctgatcagtgtaggcgtgtaagaagcgccagttctctcaaaatatcttttgaactttattcatctaactatggttttctttttcttttaaaagtttctttcttttaatggctctaaattaatctcagtagtcatttttatttgatgatctatcatgcatattgacacagtcatctttccaaaagtcagatttccagaattcaggaaactttaaaaagcctcaagcttattctaccaacatcttgtatgtttttgaaggattaattgataacctcatgtgatcatttaagaactttttttttttttctgtcctaaaaaccatccagaaattccaagaacttccagtagattttgtctccttgatattttatttctctctatggaagtttagggaagagagaagaaaaatctttggagggatacattgtaattttcttttcaagatggttggtactgatgcaatacctggcccctgacagtaatatctgctagacttacatctgctctgaagctggtgtgtgcctacaggaccccaagcatctcaaaccacaaacaagatgtcaggcagacactcggggatccttgtctcttcaaaatgcatcatttaagtggttaagagcttggagggtgccctccccaagcctcagttttgcttctatgtctttttgttcattgaacaatgtaacagagaacccacagttatgataagcctgagaaccacccgtgtccactggagaccgaatgactgtcagaaagattttcatcctcgttaggctcctactgtgccgaaaagtaacaggcagatattcctgttttgctacagttctaatgactttcttgagatggttctctctcttttcctctgtcttgctctctcaaaagtttgaagatgtcagattcgctttctttaggacttttaaagagcagtcagtattttgtagatagactcatttgtgccgtgttagagtccacgtataagtggtatcatacgatgctcgtctttctgactgccttcaccgagcaggcagtctctggttgcatccgtgtggttgcagatggcatcatttccttcttttttgtgactgggcaatgttccactgtcaatgtctactgcatcttcatccatttgtctgtcggtggacatttaggttattgtacagctgagactggcacaacgttgctaattattgttaatttgtttttaataaatgaatgatatagttagtaataatttattagttattgttattcagttgcaaagttgtgtccgactctttctgacctgatggactgcagcatgccgggcttctgtgtccttcactgtctcctggagtttgttcaaattcatgtccattgagtcagggatgctttctaatcatccatcttctggcatccccttcttctcccatcttcagtctttcccagcatcaggctcttttccaatgagtcaacccttcacatcaggtggccaaagtattggagcctcagcttcagcttgagtcctttcagtgaatatttagggtttatttcctttaggatggactggtgtgatctccttgcagtccatgggactctccagcatcttctccagcactgtaatttgaaaacatcacttctttggcacttagccttcttggtggtccagttctcacctctgtatatgactactggaaaaattagctatagtttaatttaaaaaaatagaatggaataaaagggccattactttgattttttaaaaggtattacttcttgctttgttccattattgagcagagaactgtaaaatggctcctaacaaggatgtaggggactagatgagcagtctccagcagcaatagtcaaaagcatcttgcttatactaaggcaatggtattctgtttgcctgctcacatcctgtctccctgggcaagtgaccagtctcccaggaagaaatagaccccaaacagcaacaccactt

SEQ ID NO: 62053 - DNA, 1147 bp, Bovine  19866880695078
  misc_feature (1)..(1): n is a, c, g, or t
nccctcaactccttaagtcgctgcaagaacgggaaaggcctcaatgcattgaatggtccacagatacactcggattgttcaacaacaattgccagttcaactctgtgctaataaatacttttagtgggacctgaaaagaaccacggtgtcagtgttctatccttctttgctaaccagtcagcagagggttcagcatccagtcccctctggagtttacatctgattttccacaaaaacccctaaactcaacattttcttgaatgtttcgctgtgtggtgcctattgtcgtctgcccacacccttttctagctcccattttcctgttcaatatgaaatttttgtttcaatggaagctgactcccaacatcagagtcctggaacaaggcaaagaacagttgatggcaacatgtaccttactatttttcccccttaagaagaaaatctcaaaagcccaagatgacagccaccatgaagaaagcagcagtaacagacactgttacttttaaaaatcaacaaaagacacattttcacagtacacaagtagaatcacagagctgaagcaagaaacaaaaaggaaacagttctaaaacttagagatgcttgtgaggacatcatgcttgtagatgaggactgcttaatgatatcagactggcaatcttcccatcaggcactcttgaggaaaaacatgagaaatgctggaagaagcaaaaaaaactttgcatgaagaaactgacaccttagaatgcaaagtggaatcaattcagcaggtgtgagcagatctgagagttgagttatatgcaacctctgggagcaacacaagccctgaagctgatgaaagctaagcattttataatactttaagaatgcgtttttaataagcttgagtagtgtttaaaataatttcccttcttcaaatgatatggaaagcaaaacttaaatttttttcacttacttaatggaaactcatggaaatttaagaggatgagatggttggatggcatcaccaactcgatggacatgagtctgagcaagctctgggagttagtgatggacagggaagcccagcgtgctgcagtccatagggtcgcaaagagctggacaagactaacgactgaagtgaactggatggaaatttgcctatttaaca

SEQ ID NO: 62054 - DNA, 1250 bp, Bovine  19866880702491
  misc_feature (1)..(1): n is a, c, g, or t
nctaatgtaattgatttagaatcctaagaaaacccgtttttccctttttttgtgtgagacatgttgatgtaagaccaaaagcagtaactagtcatctctttggaggacagaggtgacctgatgaaagaggaaagtgataaggagagagtgggaaaaaatacaaaacgcgatctgtacctaaacatccacttctgagatttaatttattcttttggagctttatttcccccaagtggtcgtcttcaaggacagaattcattcaaattcagatacacatgcaaagaatcagtatgtataccatgggcctgagtacctctgtaaaataaacaagaaacatagagctattaacaagtaagatgaagcaagaattacagacacaaaagcatcgtcctctttttaaaatgtttacactgggttttcttaagcactgaaaaccttgaaagggctttaagatgcttcctggagccatttgtctaattggatgtcgaggaattcgatgacttcttaaagaatacattaattcaaagaaaactgaaagtcatttgtaattataatgagtaggtttctctgcctcctttcagaattgatgatgagcttgctggcacagttcctccttgtatgcatctttatctctcttttaaatctccttcactatcagctatttattttaccaaaggtaatcactgcttttttaatcaccgcttgactacagcgggatttgaaagaagcttgtttggactggaaacaccacgcgctgcaggtggtggctcaagcttgggccgcttgccctttgtcttcccccttggcttccccttggcttccacgggaactcccctgtgctcctggaagggtccaggtgcccttgaaaagaaggtgttttctgcatccctgggaagagtgttctaatatgtcaattagggtccatgggttggtttcctgccaacttactctcttcatttttgagagagggctattggaatctctgactgtgattatggatttatttcttctttcaactctatcagctttgtttcctgtatttcaaacctctggtgctaggtgcataaatatttagaatatttaggttgaaggtcagctccccattgagagccaaattccaggttgtatgttattacctacttctgttccaagaacctttgctgaaactgtggagagtaccaaaacccatacacactatgttttttcctatctatacatatctatataaagtctatttataacttatgcac

SEQ ID NO: 62055 - DNA, 588 bp, Bovine  19866880814980
  misc_feature (1)..(1): n is a, c, g, or t
natttaatctctaggtcagcaaatacccaaagattatcccagaataattgctctaataatcgtgattttataaactggtgatcagtttaactgagtataatgatttatgaataactatttgaagaggtaaaaacaaggcaatgtaggatttcattttgcagcatatccaaacatgctttttccttattaaccatgcagcaccaaatgttcactgttaacatatttcattcaacatcttagtgtataaattattgatggaatcattttaatagttccttagttaaaattcaagtatgagtttcatttttagggcataaagtgcttgttctggataaaagcatctaggttgtcaatttctcctgtaactactggctttttgtgtagttttacgcagttttagccaacttggctcagttctatattctctgtgttgcgttcagtggctcagtcatttttgactctgcgacaccctggactgtagcccaccagactcctctgtccgtggaagtttccgggcaagagtactggagtgggtagccatttcctcctccagctatattccccaagtaccagagaagatgtgctgcg

SEQ ID NO: 62056 - DNA, 1506 bp, Bovine  19866880822894
  misc_feature (1)..(1): n is a, c, g, or t
ngtgctagattggggggttccaatggtactgtcaggatttggtttgcttctctgaacctcttgatctgcttcttctgtgtggcctccactcccaatgcttctgggctctgtccatctagactctatttcagccaaacctttggcccagtagtcatcaaaagtaacatgtgtcttagtgcaccaacttaggtcacgtgtccaggtctaaagccatcagtgtgtttgaaagaaggcagtgtacaaggctgcacacctgtgctggtggttgcacctcaggtaacagcagtgaccctagcggaagaggcttatttacatgctctggaagcaagcaaaaatgggtacatatgaagttccaagtgttcaaattgagttaaaagcagggattgaaataacgatttttctgtatcagacttatctctagtgaaaccgcattgtgtgtggctgtgtgtctgacttacacaagttgtgcaccgtgcaactctacaggcactatttacgttgtgcctctctgcgaattactactttctcttcagcagtaggtttccaaatgattttttaaattatttcatcctcttttggtgagagatttaaacttaaaacatcattttcattgaatgacaacatgatgacagagctgatggtttactgtataacaaagagagttctccttgtcagaagatttgatttttgatggtcccaatttagtctcagttcctctgtgacacattctagggtgattctcttctttaattgacacccatcaaaccaagatggctcaaagccagtgttcccagggagaaagattcctataatcttagagttgaaaacctttgaatgtcatcaggtcagagaacccactaaataaatagatgaatcttttcctcaatagctctgagcaaagatcacccagccttcactcggtcacctccagggcacaagcactgtcagatttctgactccatctttgcctctgtggacagtacaagtgattgtaaagattttttggaaatcaactagtaacctccctccccctgacatctgctcttcagaaggggtatgttgttgttcagtcactaagtcatatccgactcttaataaccccatggactgcagcatgccaggctcctctgtcctctacagcctcctggagtttgctattgagtcagtgatgctatccaaccatctcatcctctgctgcctacttctccttttgcttttaatctttgccagcatcaggggcttttccaatgagtcaggtcttcacgtcaggtggccaaagtactggagcttcagcacccagtccttccaatattcagggttgatttcctttaggattgactggtttgctctcctttcagtccaaaggcactctcaagagtcttctccagcaccacagttcaaaagcttcagttctttggtgctcagtcttctttagggcccaactctcacatccatcaggactactggaaagatcatagctttgactatagggacctttgtggcaaa

SEQ ID NO: 62057 - DNA, 848 bp, Bovine  19866880902365
  misc_feature (1)..(1): n is a, c, g, or t
ngagcactgaccggacactgtctatttttctcctggttgtggtcttggtggacacgccaaagaaaaatgtaagtttaaaagtggtagtttcccagcccacatttaattctattttttttttctgctgaatttctgctgtaggttgaagtcaatgttgtcaggaggccagattgggatacagatttagcacacggataacattttgtcagcaaggtcaaagcactgtctgtggaaaatgaaatctgattgctttacacagtcttctgaatcccggttatgggcaaggtacagagtctgtgagtggaagtgaatcctgaaactttgctgttgtttaatcactcagtcgtgtctgactctctgcaaccccatggactgcagcacgccaggcctccctgtccgtcactttctccggagcctgctcaaactcgtgtccattcggtcggtgatgccatccaaccatctcatgctctgccatccccttctcctcctgccttcaatctttcccagcagcagggtctttcccaatgagtcggctcttcacatcaggtgaccaaagtattggagcttcagcatcagtccttctaatcagtcctgaaactcgtctctccttaaatcaccacgttctttggacaatgagggaaaaggaagaaaaagtccacccacaagtgacaaatgatcgacaccgcttgcttgctgagggaagctgactaatctgtcacctctgaaatgatttctaggtgttacaaaatgagctcgcccatatttcacgcttgcaaggacaggaggcagtaaattctgagcaagcttcgttgccctgtaataagttgctcacatcgtcttcactctgg

SEQ ID NO: 62058 - DNA, 1966 bp, Bovine  19866880911328
  misc_feature (1)..(1): n is a, c, g, or t
ntccttgggactctgggccgctgcccaccccctggcctgcatgtcagagcgcacttctccatggcagctcgcctggactgaaggccaggtcaagtgtctttgattaggggaatttatgtcattatttgcttgcatcaagcagagctgagaaaggtgagtttgtgttcgtgtttttattctgctagtggaaggcagaattcccaaggtgagaagcgaagtaggagaccttccgagcggccgtggctacccccacggtgcactccggggccgtggagcggtctggggctgtccagagggcagtgtgccagtgggctcctgtgtgcttccgtgggaagtgccgtctaaaaaacgtgagaccctcttattttagtgtgataattcctttgtgaaagggtctcttagagcgtgggtgtcccaaatgacaagtgggttttaccctctattcgagaattttgagtgcatttttcattgctgctcacttctgatatacagaaacaactccagaatttagaagatgcctgtgaggacatcatgcttgcagatgacgactgcttaatgataccttatcagattggcgatgttttcattagtcattctcaagaagaaacacaagaaatgttagaagaagccaaggtatgttgaaatctctccctggagggtgaagtttacctcttaaattagggttttatgtcattataaagaatgtgtaattataggtgtagggaaaagaagggatgctagctaacatttcatggatccttccgatgtccgaggtcttctctgaatgcttgtaaacatgattttgtttaatctcaaggatgactctgtggcatatttgtgggaatcccagtttagagttgaagaagaacagagtcttaggttatgggactcacccagagtgacaaaggggatgatccctgagcccagaagctgtggcctaaattaatagttttcagaaagtacagaatatcgtaaaacagaaaatgacgaccactcgtagccccaccacccagagttaatcgtccgtggcagacagtttcatgtatttctttcatgttctcttcctctgggtatttttgcgtcacattttggccagttcacatcctagtgggagtactttattgttccactcagtgttcatttatccagcaggtcttctccaggagcctgttggggccacatgtgcgttaaaagcatcacttttgacggccgttcagtgtcgtgttagaggactttgattcagctcactgtcctctccttacagtaatttgttttcactgtttttctgtaggaatattgtggtgaacattcttattaaatctttgttcacctttaggaagtttctttaaggaaacaatcagagaagtgtaattactgggtcagaatatggattcattgacaacatttgggcttgttaaaaattcaggttattgagtccagcgccaagaattccttattcgtgaggcctggaaggggcgcccccggtgacctgggggcccccgctttgagaaccactggctagatttctaacatgttaacattgctgatactagacattcttcttttattccagatgttaacgggtatgtgtattatttgtgtgattccattttttctttgtcatatttaggaaaaatccttttgaccctggccaggaagggatttctgacattgcatgcattttgtgtggcaaagcttctctgtcataagtgagactcattacggctctttcagagtctgactccaggggcctcatagttaggaaacctgccagattttgataagttgttactcgtaattattggtgggagtgtgaatctttatcacttcctctagttccatagttatttttgtgggaagttggaagaggctgtgtcagaaggcaggcccgtggtaaactgtttacctaaaatgtttatatatcattctttctttattgggatatgatcatttattttatcctact

SEQ ID NO: 62059 - DNA, 804 bp, Bovine  19866881047962
  misc_feature (1)..(1): n is a, c, g, or t
naggagggctttgcagaattattcagaataatgaaagaggaggaaggtgtcaacttggcatccatcaagctggaagatatgacttccccaggggagacttcgtgtctgtatctctgaaaggagccctctattcaatgcacgtgtccagtaacaagagcagttacagcacaggagaggcagaagactctcaagtaatcagaatccaaaatccttagggatttgtcttgaattgtaccttgcagtgaactgagtgccaaaggttgggtgtcggtaattaaatccctttagaataagtaactgcagtctcagcattccagatgttggggtcattccaacatcattcaaattatacacatatatccccccaataacatttcctatttttttaagtcttcacaaaataagggtccacagcctgttcccctgttctgttgaaaacttaatcagtcccagtagctgaattttttcatatttatttcatcatagtaattctccttaaaatgaatcactgtctttttgttctactctctgcaagacagaggataattagccaacatcgactgcttaaaatccttcatgtatttgaaaactattaattagtcaacccacagcccacttttctccaacattaataatctcagtgtcttttatcttctttgaaagtcttattctgcagtcatttttgtgactcacttctgaattaagttaacctctccaaagcttgttgaatgaaccagtgaaatgaatggaatgatccgtgatggcaggatggcagcctgcaagggaataggagatttttatttt

SEQ ID NO: 62060 - DNA, 1112 bp, Bovine  19866881252893
  misc_feature (1)..(1): n is a, c, g, or t
nggctgtcgtctatggggtcgcacagagtcagacacgactgaagcgacttagcagcagcagcattgtggatcaaagtaggaaattttgtccttaattagtatgaaatgagcttaactcggaacatcattaagctgacatgctatacgtttccggattaatcacattttcctgtgtctgtagattcagaaatcagaaatattatattaataggattctgaagctcaggcctagtaaggtgacagggagataccctgccagtaatgaacaaaaggcaacattcataaaaatgtctcttttaatatcaggaggtgtgctagagagggaaagatagttactctgggaaagtgtatggtcatgactggaaaaattaaaagaggaaacacaatctcattttctttgggaatatgtaaagtaaggcattttattgggaaaagatttagtcaaatttacattttactcattagaaatttttcctagaaatgatattaaaggaatggaaagcatcctataaactgaatgggtcaaatattttaccagaaaagactcaaactcagttcaacattttgccaatttaaggtgtggtgggaagagtcaaatttttactcatctccctgagttgatttgcctggctcgtttcttgggaattgtgcagacaaccaatgtccaagttaaattcattgctttattcgagactttgagtgatggcaaaaaatattacggtagcattcgttacatgtctcattaaaagttaggcatctcatactgattcacgatccatcagccttttacatgactctttagggttctctcactgtggggttagcactgacttgatttgggtcccttagaccactagcttcaatgaagggcaaaaggtaagagacacagaaaccttttcctattagccaataggctagaataaggaaagataaaatgcaaagcatatatttttctataagatactctctgtttttttttctttttgctaaagtaaaaccccttctgggttcttgtcaggtggaacatgtctgttgatctgaaacttttcacttctaaatactgtacataaattatgtgattggggagtttactggcattcatttgatccagt

SEQ ID NO: 62061 - DNA, 707 bp, Bovine  19866881260301
  misc_feature (1)..(1): n is a, c, g, or t
nccgaggtttaggtgaaataaaaggttatttttacttcttgcctttatacacttttctaacttcaaaagttttacatcaagatgtcttatgtttcattatatgggggaaaaaacagtttaagaaaagagaggagaggactttctttacataccactctgctctctctcaactccggtggccagtaagtcaggctctccgaggctgatgtcattgacccgcgtccccacacactccatctggaggactttgcaccactcgtcagcctcaagatctgcggagacgccagagatgagcgcggctgcccggcgcctgccggggagcacagagccgcggcccccaccccgccaacacacctgactcgcaagcgaaggtcttggaggtgtcatcacggaagtaaatcccgatggcgtgcttcttggtgctttttggcagccgagctacgctcttcacgttgttgagttctgtaacctgaaaaatgaaccacagtgagctagagcacagaaagaaagctcccactgacaccgagcagaagggagcaggcccgtcccaggggaacacaaagggggcctgccagaagaagagcgtgtccggcgattatttcagtgttgccctcagagccctagcaaggaggttaacacattgcctccccttgtcagatttctctgaagctaacaggcgccacagcctcagagcttcacagacgtag

SEQ ID NO: 62062 - DNA, 1297 bp, Bovine  19866881281653
  misc_feature (1)..(1): n is a, c, g, or t
ngaaatactgtcgggaacttggcactggccttcgattcagaaagtgctcttctagtgtgaactggagaccctgtggaatgagactgcagttgttcgggtctatttaagtcttcacatttatgcattccgtcttccaaggactgggaggtcctcataacaccgccagtcggttaatgagatgtaactgagaatagaggccgtggtgttgaagcctaacctcgcctcatccgggcagatccgtaaaatcttggtgactggctgtgtcctactctttgcagccccatggactgtagcccgccaggctcctctgtccacagaattctccaggcaagaatactggagtgggttgccatttcctgctccaggggaccttcccgacccagggatcgaacctgcagctcctgtgtctcctgcagaagttggcggctgctttgcctccagcgccgcctgggaagcccagtcaagaagataggcatttgctaataaagagagttttatgattttagggaaatctgtgatgtccaaattcaaatcttgtctctatatttgactttttctgaatgtgcaattgacagaaatagctacaatctctattatgggtagttctaaaatagtcaaagataatctgtataatggaagctgtcatgtttctcaggagtagcaatagaaaccataaaattatttgctaactttgagtccaccgtgaccaaatcattttttaaaacatatgaaatcagacattctaaaggctgtcacaaaatgccaccaagtctaaattttcttttgcttaagggcgctagtgacaggccacagtgccacatatgggttttgagtttggaagtctgccatcagcaaggctagggctgcctgtggatctgctgcctcagactggaaaaaattgaattgtaaagagcattgttctccagtctcaccttccattgaaatggtgactgctcttctgagttagtgccaaggaaacgttagccgcactgacattctcatgtatatggtaccagaacacagaagaaactagatgagtggttctcaatctagcacggttttccccacctggagacacatggcaatgtgtagagacattgttgcttgtcataattttgggagggggtcttactggaatataatagagactgtggatgctgctaagcaggctccctggatggcagagtgataaagaatctgcctgaaattcaggagatgatccctgggtcgggaaaatcccctggagaaggaaatggcaaccccctccagtattctagcctgggaaatcccatggaca

SEQ ID NO: 62063 - DNA, 1176 bp, Bovine  19866881412514
  misc_feature (1)..(1): n is a, c, g, or t
naattcccatctggcattttcccagtgggaaagcctagggaacagactgaccgtctctttagaggccatcacttctgaggcccatttagcagatgccacgctgtattagagttatgcccttatttccttgtcatgcccctctgcatcacgaggtcctgggacgagcagatgctcagcacaggcagctgaatgaaggagtaaagaaacacacacatggttggatactatcaaatgcaatgctcagggttcacactgaagatattcacacaccttcagaaacactggagatacagagaaacccatgtagccagaaacccaagaccatatgggtgaagaatgatcttttattttaaaacgtttttggaaggtacatggaagaaaataaaagctttcttaaaagggagggagaggggagatggtgtaagaaattgtgaccctggtaaataatataaagggtgctgggaaaggtgacttcttaatgtaacaggtcacactgagtccaagcactgatttaaccaagtggggatataataaaatacgatggcccatagttaagcagaaccataatattaataactgaggaatatggtataaacaaataacaaataattaagagccgttttattgtcagtactgtcaaacaattgaaacactcagaaggaaaataaatcacaagaatccgcaaaagggtaaattcagggaggtgcagggcacacggtatctacaatagaaaaccacagccatcaaagggggaacacaaagtcgatacctatagagcaggtttcaagtatgctaattttttttttttaaagaaagaaaaggggaaaaaagaaaaagagtattgcagagtgtcccagggaccacacaggtaggcaggacgcggagctgcttgccggcacgtttccccgggcgccctctgcccatccgggtgggtctgcggctgacacggctcacgccaggcccgtcagtgctcagatgggtaggtgggaaaagtctctgttcgatgaagcttcagagggctggtgacaccttttccaaaagagattttaaaatcagcagttgcaaccacaaccaggttagctcatcgcaagtttctgtataacagacataaataacgtaggatacagaacgcttttcccccagaggctactcccaaggatagcaaaggagagtaaa

SEQ ID NO: 62064 - DNA, 844 bp, Bovine  19866881476654
  misc_feature (1)..(1): n is a, c, g, or t
nagagcaaggagggtttacagcccaaaagaaaaaatatatacatactgagtgccataagcttgtcatggctccgtgcgtgggtgttagtcactcagtcgtgtctgactcttcgagaccccatggactgtagccctagactcctctgtccatgggattctccaggccagaatactggagtgggttgccaggccctcctccagtggatttttctgacccagggatggaacccgctctcccacattgcaggcatgttccttaccatctgagccaccagggaagcctattgtgggtccatatattctgatatatcatagactccctctatcatgaactattatttatgagatgaatataaaaaatactaaagtgattctagacataaagcatatgttacgtaagtgctaattttgattttggtacctaatttggggtggtcaacaatatgatttattattttttttgcctctgggttgaactcgatggacaaaaaggaaaaaacaaaacctaccagggcaggaagatgcctttcattcctgatcaaggctcagcagagcagcactgcagagcatattgccagcttacaagggccataacgagctcagccttctgctaataagtgggaggcagagattagttatctggctttgcttttgagccaaaacctaagtccatggcacattaatttgacacagagcacagctttccattagaaatcagtgtgaggtccacgctgtggaacggcagcagtacattaacctgagctgccctgcctccggtgtgtcacgggccccataattgagcacggcaccagcatttctataagaggggaatcgacgtgagggc

SEQ ID NO: 62065 - DNA, 1030 bp, Bovine  19866881480393
  misc_feature (1)..(1): n is a, c, g, or t
ngagcctggtgggctgccgactctggggtcgcacggagtcggacacgactgaagtgtcttagcagcagcagcagcagcaaggtaaaggagtaggcacaaatatctgatgagtttatagtatgactttgtggaaatagatgtaatttgaaatgcaattaaaagaacccgtgaatgaaatgagaagagaatggaaaatgatgccttctgcagaacaccagttgtgcataacaatgtcatggataaatgcccatctgataaagaggttttaattaaactaaataatttattacccattatacttcaatgaattaaaaataatataagatgctttatttctctgaaacaggattgtgtgccataaattcagcacattgtgtgttctcaagcgagaaaaatgtccaggttaataaaatgtaggagaaataataattaattttgttatattttaacctttgacacattcatctgaatacattcccctggggtggagctagattccattttttcttgaaagggaatcacatgaaaacaagttatttataggaaaattttaaaaattaaatatgggctggtaaaataattaattcaataaggtagctattaactctgtatttcatatatatgcatgtgaacattcccttatatatatgaaatttcctgtacattttatatatatatacacacatatagccacacatatgtattattcatatacttatgtagataaatgaacatatatttatatagattcatgaaagctgctgcatatgctatgtcagttttatccacctttatttttaaatgcctaaatatttataattgttagatatccaataaaaggcttatacaaaaaagacataagtgaaacatgaaaggcaaattaaaaggaaacaaatactgaaatttttctttctaatttttctccttgcccttcttctccctaaagaaaaccacggttgataatttcttgggattcattcagaaaatacaatgttcaaactggcatataatgttacgtctattcttatct

SEQ ID NO: 62066 - DNA, 756 bp, Bovine  19866881524959
  misc_feature (1)..(1): n is a, c, g, or t
ncctgctacccatcaaagtgaattttttaagatgaccgcctggtgttagtcctttgctgaaatcctttcttttcaaaggctctgagaccattgctctaagggtaaagtgagttaagcccatacttctttttaacgtggatttcaaagctgtgaatcacatttgcccagcgcatctccttgctttcgctctctacgattcgtgccgcagtcctgtgataccaactgtaggaactccacccagcgtctggctccaggctcagggcacagttctttcccccaaacctgagccttgacagcgcatccatcagtgcacttactggatgggcacagtccacaagctgaattcatcttggagcccctattgtctggtagggactttggtatcctagaaacattaacagttgtcgaattgctttaataggacatcagaagttacccattcattcttaagctgatgttcccaaaacctcacaggtgctggggtggagagggttgacaagagaggtagcagaatggattttgaatattcaagctctgacacttatattaaaaatctgtcagtgagagggaatgagaagcatcttagtttcatgtactccactgtgactttaaatgattccctcgtcaagggaaagcatgtgtggaattacttaggataagacgattaaaaaaaaaaatgtcaaccattactgagaagttaattttgctttcaaatccttggttaacttttgagttgattttgatatgttcatttgt

SEQ ID NO: 62067 - DNA, 1210 bp, Bovine  19866881557240
  misc_feature (1)..(1): n is a, c, g, or t
ncctgttagatgaacacgatttccaagagcaagtctgtaagtacattgattcttccttttccctctactccatagccaatgaatattaaagatctacataacagtatgaaaatgacaatgtgaaccaaatcagattccaggcaactctacttctgccatgcctctgtcacaatcataccccagcagaaccaaagaactcacgttcttactcacagcaagttgcaggggcgtgacttccacttggctctgacttaaagaaaacctttgggagccaacatacatcatttccctaagcaggcacagaaaggtagcttagcaaactaaagactggatttactggattaagcacctggcttaaggagatttaaatccgacttaatgatattgccagtccctggagccactggttcaaatcctaactcaagcttttgctcttcatcagaaaatgccagcaaatttgcattattttgtagatcaggggaaaacctcagaaacattttcatgtctcctcgtcacagggtaaaaatgaatttcctaacgacaagccacttccctatagaggatggtgttaatgccagcaggccttattttggctcagaactcattctgttcccaagagagaatttctgcaacactggacaaagcattttgtcttccccattcctctcactcagcccttctgggcctttgttcaaatgtcatcttcacagtgaagcaattactttaaaccttcttaaaataaaattgcgtcacctccatttccatccattttctccctgcttcatcttcactgctctgactaccgtctcacgtgttacacagtttatgtattttagcctctctgtggctcagtgagtagagaatctacctgcggtgcaggagacacagattcaatccctggaccaggaagatcccctggaaaaggagacggcagcccactccagtattcttgctgggaaatcccatggacagaggagcctggtgtgctacagtccaaagagtcgtacatgactgagaaattaagcacacacatccccatctagaataaagctcagtgagtatcaagactacctgtgttcagcagtacaaccagagcctaaaacaagggttaaatacagagagagtcaatgtattcctgctgaacaatcacacaaatctcagcaaacggctttggtcttccaaggcccacaggtgcctctcacctctgctc

SEQ ID NO: 62068 - DNA, 711 bp, Bovine  19866881651938
  misc_feature (1)..(1): n is a, c, g, or t
nttgtaacattagctctctatttcttagaagcaaataaaaaaggtggggggtggactataattgctttaggcttcctaggtggcgcctggggtacagagtattcctgtgaatacaggagactcaagagacatgggttcgatccctgggttgcgaagaccccctgaagtaggaaatggcaacccactacagtattcttgcctggcaaattccatgacagaggagcctggagggctacagtccatggagttgcaaagagtcagacacgactgagtgcacataactgctttataatatgtgtgactttctgctatgaaacatgaatcagccatatggatacacatatccccttcctcttgagcctccctcctaaccccaaaacccacccttctagatcatcacaacaatcccttgtgaaccaaatacagcggggtatatgactttcctttatctgtggatgggagtcaggaaagagaggacggcggggctacaagagcttatgcgtatgtgcatacttgtgtttctcctaccacaccagcaactgcattctccccacttgattccaagcctcattaactctgattttctcattcatctcaaattgctatatttatcataatagtttatcccagctgaggtattctccttatggggaaaataaaggccctgatctttgtcacggcatgggaaagtataagatgcaggctgtaaaa

SEQ ID NO: 62069 - DNA, 905 bp, Bovine  19866881837681
  misc_feature (1)..(1): n is a, c, g, or t
ncagtttaatcttgagtgaaattgacataacatcataattgttttaaacataaaatgatttaatgaatgtgagattcttatactatgcataataaatatgctattattgttataattagataatttacatttctgtagatacatcataaatatctccttgtagttcagaagccatgacctagtctttgaaaaatccttatttatagccaatactttaatattatatatcttacttaatgggaaaagatatttatttctctgggaaaaatgtttttaaataatccattaaatattaacttagatttttatttatttgaatacattacgaagaactgcaattctccagaagttatagcttagactttactagtaaacgaagagcacgtacacacacatacgcactcaaatgtgcacaactgcattatgattcaatgtacttggtttacaatctaagcactaacacaaagaaacgtgtgaagtcagagtccagacttaatttttttaatggattttcagatagtgaccctaaaatcctttaatgaaggatgtgtatcaagccaagtcatacacatttgtgttagggaataattagattcatgaataaataattcaaaataatgacttatgaattgatgtgcattgtaaacaagctgaaattgtggtcactctcctagaattgacttccctggtggctcagctggtaaagcgtctgcctataatgtgggagacctgtgttcaatctttgggttgggaagatctcctggagaaggaaatgggaacccactccagtattcttgcctggagaatcccatggacggtggaacctggtaggctacagtccatggggtcgcaaagagtcagacacgagtgacttcactttcactttcctagaaggaaaattaagg

SEQ ID NO: 62070 - DNA, 1185 bp, Bovine  19866880379917
  misc_feature (1)..(1): n is a, c, g, or t
natttccttctccggggatcttcctgactcagggatctaacctgatctcctgtattgtaggcagattctttacttgctgagccaccagggaagtataaaagaatctcccttggtgcttcaaaagctaaaatgttccagtccatacacatgtagctattatttttcaaattcttttcccattgaggttattacagagtattgagcagagttccctgtgctctacagtaggtcctcgttgattttctgttttaaatatagcgtgtaatgcagtgacttttaatggagtttggcagcaaacttaccaatatcagcatacctgtaacaggagacttggtggtactaaactcatttgtgcaaacatctcagcctctggctatggagacgtgtgctgagagacacttggctatgcagaatacagaaaacatttaaactaatcacagtacctctgaggattttgtcctttgtaacgcttttactcatggcacaatcaaaacacaaaattgatatttcttgtggtggtttgtgctcttagcaaagtcctctgtttatcttccttatggttgatatttcatccccctacccaaatacttacgctctcttagccaaaccccagttctttacacactcaaagcagtgaattacttgttaaaacatttcagataaacagatataatcacatctctgtttggacttcatgctggagggagtgtgcagagaccctggctatttcatattgcggagaccccacttttttcatactgctacctttgatgccagtaaatcaaccatttacaatactgcttctgccaagaaatcccccaggcccttgtgaggatatatgaaaagactgaacaaatatcagcattttatcctcattcctgtcctcaaagcctttgcaaacttacacaagctctttttcatggtgtcttccacacagaggatgtctgaaatctactgaaaccattcctggtactgatactttagtctgggagttggatagcaaacattgcatctcttaaatgttttgataaagcaatagaaataaaacagaagcttaaatgaagcccaaactaaggtcctagtcagcatcaatttggatgtatttctcttactttccacagttggttctttcctacactctaagacacaggcttatctgagttatcagttttgtagaatgataaa

SEQ ID NO: 62071 - DNA, 2493 bp, Bovine  19866880450237
  misc_feature (1)..(1): n is a, c, g, or t
nttcttggatggatttaataatatcttaaataagatcccagcaaaaagggaaacagaaacattgaaggatctttcttgtctactaatgtctgagatttctgtctctcatttccttgctctaaaaaaaagagacaaaataactccaacacaagtgaagagaaactaaagaatctaaaaggtgaattacgggtgaaagaggagagtgaaaaagctgggttaaactcagcattcaaaaaactaagatcatggcatctggtcccatcacttcatggtaaatagaaggggaaacgtggaaacagtgatagattttgttttcttgggctccaaaatcactgcggacagtgactggagctatgaaattaaaagacacttgctccttggaaggaaagctatgacaaacctagacagcatattaaaaaacagagacatcattttgccaacaaaagtctgcatagtcaaagttatggcttttgcagcagtcatgcatggatgtgagagttggaccacaaagaaggctgagaactgaagaattaatgcttttgaattgtggtgccagagaagactcttgagagtcccttggactccaaggagatcaaaccaggcaatcctaacggaaatcaatcctgaatattcattggaaggactgatgttgaagctgaagttccaatactttggccagctgatgcaaagagccaactctttggaaaagacctgatgctgggaaagattgagggcaggaggagaagagggtgacaggagatgagatggttggatggcatcacagactcaatgaacatgaatttgaacaaactctgggagatagggaaggacagggaagcctggtgtgctgcagtccatggggtcacaaggagtcggacacaactgagtgactgaacaacaacaactccaccacaccacaaaagtgtgttaggagacaaggaactttggcacaggagtattgctaggaatttctggaagatctctagcccttggaggaccctttattccaaaggcagcttcatatagaaatgtttggatagaaagtcacagtacagctcaacattattcaaaaaagagatcctgtacttaatgatgataagggaaatgataagagtgaatgttattcattttcttgagtctaaggagagcttgtggatctgagccagtggacacagctctgctaccctcacttccctgctgatctcatcactggggcctgggcatcacaggctgtgggtaccagaacaccacttcctacagactgaaaggaaggtaccatcattgtttggcaacaagaggccaaacagaagcttggagaaggcatggtgagggtggtggtccacaggaggggccttcacctgagcacctgcctcaggaggctgacccgccttccctgtcccagtaggagtgaatgttgcccttacccgggtcctcagaggccctctcagtcaccccctagggaccaggtttcttttccacacctactatagatgggtatccccatttttaatccaacacacccagtgattagaaacactagcaacttcctgccacacctgccccatgggagggccctggagaagcctcatgcagttagctcacctctccttcctgtttaaaatttattaagttttattatttaataaaaatattgctaaatagtaaggaaaaaaatagatgttgtgaagtctttttcaggaggtagtgacccagcactcggctggtttgacctgagtgacctgggattctaatcactaattggctttgtgattttagacaagattttccatctataaaatgaacaggttaactggattatctgtaagataccatcaagcccccaaattctcttctatttgtaaatagtggatatcaggatcccatattagagattttgtttttatatgaatttcatgttcaatatttatgtgagggataaaaaacataataaaaaagcgatcaagattattttttataagaatggaaacttcaggaataatcaaatcacagtgaccaaacaaaaagcaaacaagcaagcaaacaaaaaaccctttgtatatatctatacctgcatttttgttgtgtatggattatttgtgttactcactcagtcatgtccaactctttgtgaccccatggcctgaagtccaccagagttctctgttcatgggattctccaggcaagaatactggagtgagttgtcattcccttctccaggggatcttcctggatcagggattgaacacaggtttcctgcactgcaggcagattctttatcatctgagccatcaggaaactgatgcagttataaattgatgcaagattgggaataaacatttttttgagcaaatatttcattccaggaatgtgttcagagcattcttcttgacagtaagactgtaaagataatggcattccctttatagaccaagaaacttaggtgtggcaagttgaaacaaattaccctgtgatgccatagtgctaagacacaa

SEQ ID NO: 62072 - DNA, 1726 bp, Bovine  19866880475028
  misc_feature (1)..(1): n is a, c, g, or t
ntattttctttgctgcaagtggccctagctacaaagctctaccaaaaagcacataggggaactaaattccaaattccaaagcaattattccttctttgtgactaaacaaaaggctacgacgttagttacacagaattttccacttgagaaagtgaaattgagcttttaacctccactggcctgagggcctagctttgtaaccagtctgctcccattgatgttatgttgcctagagacaaatcaatcatatatgtttgcatgtgtgcaagagggagatggtccttaatgctgtggaatgtcagcactcctgactttccaggaaaatggttgtattctctggttccatcagaatcacattcatgtaaaaatctcaaatgtctccccttgtcagaaaatgagcttattacacccccctcagtgtttctctcctttagcaagtagaaaaatctcaaaagaaaccttttggctatatccaaatcccaatttgcctcatttgtatttttgtccatcgatacaaggtgatgaaactgaactctagaacatatcttgcataaggccacgttttagtttgtgtgtatactgtcttttctttatcctacaagtcggtgtccttcctcttagaaaggaagatcaagcaaagcttagcataacacctttaataaaggataaacttaccctacagggtgattatgcaatgccttctcctgtataaacaaaaacaacaataaatatgtatctatatatctagatagatagacaaatacagacatcaatatatatctgatttacccagagtttaccttagatctttacctattatttggctacataggcaagaactcttgttattaaaatatctaaattgtctacttttattgataagaatcttaagggattggcctaaaatcccataacagagtaagaataaagcaggattggaaagtaatttttactatagtttatgtaatatttgtcttgctgatcaatctcacttgtcgggagttaatcaagtacctaccataagagcaaataaataattgaatatggaaaaagatcaccttaatttagaaaaaatagtcatagaaatttagctattattttggtgatgaacacacacatagatatgatagatggataagtagatagagacaaacagataaaagtataaatcatatgattgctataacatgctataattaattccctgcctctttaggagataagatccattagacagagagatggcctatagaagccgaggaatttagcagaaactctttttcagccccaagatgattctctaaattaaacttccacaatagactgcatggtttgctttgcaacagttcactaagaagcacaagtaataaagacagaaccagtggtcaaatcacaagtgacaatgagatgctgtatcatttcaaagcaaatttgtgctgtttttaacatttttccagtcacacttcttggtttaatctcttgaattcagacacatcatgttgacaattccacaaaccttgttcaggtagtagataatcttattgaacagcagatattttgttttctgcatttgatcttctagtttaatgaagtgtgacatattatctgagtgatgtcaagtctgtgaaatgtaaggtgatatttttctatttaatggcaaatgaagtggcattatgtggagtgtttacctgcaacttttccccctccaaacaagattactggcttg

SEQ ID NO: 62073 - DNA, 1443 bp, Bovine  19866880616833
  misc_feature (1)..(1): n is a, c, g, or t
nctcccccagcttaccacacctagcccagaatctttgaaattatttccggtgatagttctcttcctggaccaggccaccttttaggcaattacgggagatgtaaaagtttttcctgaatctgctgggtcttgattgtcttcagctcaaaatagtccacgtgccaaagctagcacattttggagagacttgttctgaccccctgcactgtcttcattccctaaaagatctgattagcctttaggtttaccaggctgtcacaaaactctgtttaatgtaagactgaacactggttctcaataaatgctgcaaaagcatcacatagtgtagcagactctatggatgtctctctcagttctctggggagccctttgaaggctgctgtggttactgatgacagtgactcagtattgaaaacctttcggcacccggaaccacctcatccagaagggcttgtgggttccatagccatttcacgaatggtagaggtaccagatacccactatcttgcctccaggtgggagatagcagcctggtatgatcttaccaaatcagaatgaggctgggtgtaccagaagtcaatcccttgtttagcatctctgcttttcatcttattcctatctcttctgctggtcactcccaagagtactcccttaaaaaaataacttccagaaaaatcttactattaggctctgttgtttagagaactagacataagacatgtggcaatttaacctatagaattatctccctttcctatatttcaaattgcctgggttcaattttgaaatacataggtcctttatagtgattaagattgccgcttgtgttatttgattcaattttcccctttttctgcgctcttctttcactggtggaagaatactgtggttatgtatcataaaaattacaaagaatttcataagctgttgaatgtggaaagaaaatgttcttattattggtatatttggggaaattcctaaaagagcatgacatatagcctagtcacaattaatgataatctcctcctttctttctatatgttttataaataattttataatcacttttctggcagcttctcactgtgttttttatgtatttgtcattttaccagactggacgtacaacagatatgaaaacagaacctgattttttttactcccatcttacatggatatcattaatttataaagacattgttttgctttttttaaaaaaaaaagacaaacagctggcttgatagaaaatctgccctgatctccagagaacagggagttcagacatgatataaattgacagagggtgaaaaagtaatcttcaggcagataagttagtgcggccaggatgggcaggacatgatggcatttgccagagagaggagaacacaggctgtacagccacacagcgctcttggaaaaggtgatgttgggaatgatactaat

SEQ ID NO: 62074 - DNA, 1368 bp, Bovine  19866880619484
  misc_feature (1)..(1): n is a, c, g, or t
ntggtgtaaacagagtcccagcatttgcttttctaacaagttcccagatgagctgatgtggctggtctgggaaccacactttgagaaccaccgtcctagcatcacactgcttctcactcaactatgaagtgaaaagactgataaagaggatgaatagacttaagcagcaaaatagttgtaattttagtcaattcaactaaatgagtctcagagatgccatcttgcattttgcatcctttttatccatttgatggtcacatgataaaatctgggaaaggctaaaacaaggcaatcatttatggcaatgttacttccagtgcaaatatttcctggagattcttcctaagatctttggattcattttcctttttaaaaggtaactgcaaactcttcaagttttcctgtgtggcttgagttcctttcacagttcccctaagtcatttttaatacagagatttggataatacagctgtgtaatttatctttccaagggccaagtaccacctcacttctgtgccaatgactcagcatcgaaaagtaatttactaagatgattatgatctggtacactcatttcttttctcgggaaaattgaaatatctatcagccagagtgtgtttttcttatcctcttcccccaaataattttcacctatccaattcacaatctgtgattgctcaacctgtaaaataatacttactcaaacctgttcattatctgagaaggaaatgaatgaccttgaaggaaaacttggataagtcctgctctgtcctacaaaacttttcatgtgggtcatatcccaggcctatttcatcagaaggccaatggtcaggcaccaaccccatccatttgctggtcattagcctgtatagggcttccctggtgcctcagatgtaaagaatctgctgcaatgcaggggacttgggttccatcgttgagttgggaagatcccctggagaagggaatggctacccactctagtcttcttgcctggagaattccatggacagaggagcctggcaggctacagttcatggggtcacaaagagttggacacagatgagtgactaacactttcacttttacttcagcctgtatgtggaagtcaattgagattgtcattgtgccaaacaggtggcctcattgcaattaatgccagttactgttttttatcatgttattttgggatctatttgctgcaaaagtgacagattaaataggaagaaataggacttctttaaagtgggtagaactaagtggtcttctgaggaagtctggaaaatatttaaatggaaaaaaataattatgaattggtagcacgtgaacttgttcccttcttaaatatgacaattctcagacagtcttcaa

SEQ ID NO: 62075 - DNA, 2055 bp, Bovine  19866880683514
  misc_feature (1)..(1): n is a, c, g, or t
naaaactcgattacaaaagaaagatacttgttctagaatgaaggaggtcatggtatgtataattgttgttcctttaaactgcattttactgattgtcacaaagtgggcatttctctcttaataatccattatgttatcagtaagacagttctaacttgcccagtattcttagaatcaaaataagaatactggagagaaatggaaaccaggtaattaattcacagacttccaacctgggttatttggcaagtaccacttttttgtctcaagttctcaactgagcataatcctaaaagaggaaaaaaaagaaaagtttgctgaagagtcatgacccatggaagcttcatggaaaatgtagctaactcatacagagcctgctaatgacagcctgaagcacatcttttgttggaagtgtgtgtgcatttttctgtgtggttgcaaataagcaccaaggtctacatgatcattattgattaactatatatttcccccactcaggttttaatgaataatcataattagaaggactccaatgccccgagatgtctactgcttcgaaggtaaatcttcatcagattctgcatgtcactgataaaatccactcagccccaaacctttattaactgctttaagactccagcagcttctttatacgttagacacttctctgactgtacctttagctgacagtataaacacattcattttgctgtcacatcaattgatcttagctaattaggagcgttttaggggccttaatttgataaggacgtgtgaatgcgtttttcccccgcagcaggtttgctgtttgctggggtattaggggagtgttaattaggcacagttcttctgtcgggttgatggtttttaaacaacattcaccaaacggaaactcaaacggtcagagcagaaactgggattgtggccgttggtgtggtttgtcagatcaggttagttacctctggaatcggaatctgacagaggtgagcatgttgtgtacccttccagcaccaaatctgacttttccttcagcaaatgttccttatggtggaggtcttcctctccgcatttcagaacgtctctggaggaggctttctcccttcagtcactgtcattctctcgcaacccaacagtatccagtttggtgctcatcccggcccttcttagttttaaaagccgaaagcacagcttttgaaaattcactggccctgaagtacatgcagaaaatcttttgaacagtttgggtcctgggatttctttgttcagtctcttctgctgaaggcaaagcggggctggctggctggctttgggtcagccaggagcagtgaagcaaagggaaacaaacaacagagcagctgagattcctgcttggagcttgtttgtagatggagctcatacagtgtcttttgtttatttgtgagactttacttagggaatgcataaaaaggaacttgaagtaagtaaccatttaagaaaccgaggaaaagggatgtctgataacagcattttcaattttaaggctgagagaagtgctcatttatatactgtgagtttttctgcaaagatacagttgctttcttaaggcatatacattgtgttccctttgtttctcttgtagctttacactgaccatttacacatttgtcttccatcctgcttgtgatcaatctataaataataagttcaaataaaacaatctctgaatgtcctccagtaataaccatttgattctgcaaatcaaaccttgaatgttagcctcattaccaaaagaccagttgaattattaaaaccttcattgaaaatacctgctgttatctgctgtttataactatctttgagtcctagactatatgtgcctaaaataaatgaaggaagcccttaagagagtgcctggctctctgaaaaaaatcttgataaagtggaaaaaatatcgtatttggagactccatccatctgttggttataaacgtgttcacacggtctttgtgacttaactgtcttctatgtaagatgataatgcctgtcttctgacatacttaacgggatctttttttt

SEQ ID NO: 62076 - DNA, 3598 bp, Bovine  19866880711356
  misc_feature (1)..(1): n is a, c, g, or t
ngtacagcatttaatttgactcatgctcttcatctgaatttacaacattctttgtttatgcaaacaatttggcaaaaaacccctacattgtctagttacacatatcatattcttgtatattgttacttacttcttagattggtttgtttcatatgtacatatggcatgtcttcctgtttagagcctaaatgatcttgaggtcaaggactgagcatattcattcccaaaggacccatcccaattgctttcacatagtgggtaccaagggatttccctggtggtcctgcagttaagatttcgtgcttccactgtagggggcatgagttccactcctggttggggaactaagatcccgcatgccacacggtgaggccagaaacaaacataaatgagcaccagtaccaccacactgcaaactccaagggcattgttcacattatgctggtgatgctcccctggtggtgtatgatccacggtaagcacacaggggatatttgttgacttgaggcaactatggaagtctggtgcaatgaaaaaaaaaattcttttgttttgtttctgtgatctagggtaaaggaaagtacctgaaccttagttaaactcagtgctgctgctttgaatatgtgctctttgaattctaaaatatagagcaaaatcatactagattctatttctgagtgcaaagtaatctccatatttgcattctagtactaactgaagacctgaatgaggaactctgccaaccactcagacaaagaaacagaaaccttaagaaggttgctcaaagttagaaaagtctttttcatggagcgaagtttatgtggccagcttcaacattactgagttggtctccctgccctaatgatcagcttggatctagtgagaattagatttaatacagattcaactgggcttcctgggtagctcagctggtaaagaatctgcttgcaatgcaggagaccgtggttagattcctgggttgtgaagttcccctggggaagggataggctgcccactccaatattcttgggcttccctggtggctcagagagtaaagaatctgcctgcaatgcaggaggcctgggtttaatccctgggttgggaagatctcctgggttgggaagatcctggaggagggcatagcaacccactccagtattcttgcctgggagaatccccatggactgcagcctgcaaggctcctctgtccatggggattcaaagagtcacacttgacggagcaactacgcacagcacagcacagactcaatggaataaatactgcatctgggcagagaagaaaatgcagaggtttctgaatagggggattcgtccattttttcttccagctgttttttggagctttagaagtttatttctttggtaggaaatgagatgctttcctctatggatccccaaaatgtaaagtgcctattaaataatactacagatattctctgaacagatagcacatgttaaaactgcaaatggccacctgtaaccatggatttctgtgatcaaatcattagtgaccaatggctttctaggaaaaaagcggtatgttcaaagttgactttataattcagggaaggtactataatccagaaaggtaagagggaaaagggaccatttggtggagaaaggccctgtttcttgattttgcagagtgctaataatgttggctcagtttgactgcacaaggttggacagagacaatactgtagcactgctgattggctttgaggagaagtttctgaaaagaaatgaatatgtagaagtaaatggaaacctcgacaaaacttgattataataaatcagctgtctggacttgaaaacaaaattccacctgatcattctctttttcctttgtcctttccccctttctgctttctctctcatctctttttcccctttatgtaatatgcttctgtgagaatactattttcatcttcaaatacagcattttcaagaaaatgtggaatttttaaaatacaataagctgatttgcaatcggtgaatgcacaccagtatggaaggaatggctttgaatggtgctgacattccactgatgtgaacggacgcatgcaggagcccggggtctttgtagactctggcaggacaaggataagtaacaaaataaagaaagactctccatgaacagtgtgatctgcgaagatgagacagagatcctgggatgtgagtggctgtgaaatatccctaatgaactctctcacttcgtctcctctgagctcccttccagagcacagaggactacaaagcaagccatcacgcttgaaagtgcggctactaggaagaagaaagacaaaagtctgaagttgaagagaggttctgaattagtgattaagccgctgcatcccacatgcagcggcttccttccgttcctggggaaagtgttttattaaacacaccgtactcctttgcagtgtccttcattaactttcttttgcactaatatggttactggaaacaagcagatgagttttctgtttatccacatactatgtaaacagcttctacaggcaggtgagacaaacagcagggtcctatctgaagagttttgttacatttatattgaatccaacaaaaaaacactggctacattcagggctgcggaagctatttactaaagatgtgagctggagggagcttggtgccagaatatactaggtgtgaatatggttttacctgtttatcctcccattactcacccttccacctctctcttccaaatttatttggtttcttctctagaggttcttacacaaagataacataattaattaattggatcagtttaaggtggaaatgcttaaacagataatttagattcatgtaactaaaaactgaaaaatagaaataaactgccggccaccaccaccaccacaacagtcaaactaggaacttcactggttttaccatcttttgatagttgtgtccaaggtacttggggagagggtttttcaaatgtaaattttaagcgtgaagaatgattgatttggatcagctttcatggagcagcacatgcattgagccaggcactcccacacaaagagccgctctctgggcagagaacagccccagaaccaggagcaggggtgaattactcattccagagaacacacagttgccagtgttcctgccttttagaaatcaagtgtctgatggtggaaaactaacaaaactcacaggcacaatgcactttatttttacagcacacacatgcacaagcgcacataccataatttagaaaatgaattgttcttgataaatgaataccttacaaacttttgccaattctcaatgaattaaacactgtagagcctcaacattgaattctataaaattactgaaaataattttgtctctctctttgatgatgctaagtcctgtgaaagctttgtagcatttattagctatgggagctgggatgctttctcatctgtgaaatgggaataatcgtagtttttgctgcatctctacactgtaagcattaagcaggattactgacttagcaccatgcctgacacaacataagcagtcaaaacatgctgctgctaagtcgcttcagtcgtgtcca

SEQ ID NO: 62077 - DNA, 1051 bp, Bovine  19866880715318
  misc_feature (1)..(1): n is a, c, g, or t
ntgttaagcaggaaaattatatcctgcaaaattagctgtcaaaatgtgagcttgtggttttggagtagtcgtacatcaggaaaacgaaaagaagatctttattaatgagctggattaaataaataaaaaggttattgtaggcgacatgctgctctgttgctacaatatgtctcctgatttcccagcagtcagataatatttaccaaattgaatcacgattagatatgacaattacttgttttcagggacatcatatcacttaaatatgatatttttacctatgctccccttttgaactaggtacaaatgaaatgcatgtacttttactttgttatttaattacagtgattatgggtaaatattttgatcagagaaacatttggaaagtatttgagtgggaaatatttcatatacaatcaccccaccagtgttgaaatcagaaagcagaagctcagagaagagcagagaatttagaaagagaattagaaattgagaaccttctgaataaatcaagaaatcttgaaatcagctatttcactagacattactttgcaacgagtacaattaactttatgtcattattcttctgatgtacaccacttacttctttgacttataattacctatgtatatggtcgtcctctcccaagccaggctgaaaactccatttctgaactatagcagatattcagtaaatttaaaaataaatgatgaagtagaaggggatactgaataaagcagatgatgagaaataaggctcataagattggttgtatagataactaatcacattggtaaagaatctgcctacagtgcaggaaacacaggagctgctgctgctgctgctaagtcgcttcagtcgtgcccaactcttgcgaccccatagatggaaacccactagactcccccatccctgggattctccaggcaagaacactggagtgggttgccatttccttctccaatgcatgaaagcgaaaagtgaaaatgaagtcgctcagtcctgcccaactactttgtgaccccatggactgcagcctgccagactcct

SEQ ID NO: 62078 - DNA, 2701 bp, Bovine  19866880800306
  misc_feature (1)..(1): n is a, c, g, or t
ngattgaattggaatctcctgtgtctcctgcattggcagtcagattctttaccactgagccacctgggaagccatatatattataatgtaatggggctgcagatactccatgagtagtttgcttctatttttgttcacatgtgtgtttataagagcatatgaaaaagtgatttttattgatcaagtaagattcatttttctaagagatgattagttgccagttccacagaaatctgtttatacagtgtagctgaagtcataatcatattttcaatcagttgactcagagcccagaagtttcagtcctttggtgaaatgcccaagttaaatggccatttaatgaaaattcatgactgaaagcacaagggatttggcaaagtagagattgacagtgacactcttgtatacataaaagaggtagaataaaaagatactttgtggttggctttctacctcaacagaattttagtttcaagtggaaggacaaccagtgctttccaggatataaaggaaccatcatctcactctcctaagtaaagtcattgtttaacatacacagataagacatcactagatacacagacacaccaacagaggaaatgatttcatgttctgacctgaggaaacaagcgcacatagcctcttatttttatttcattttatgtgacttggctgatacattctctttaacactgtaaccagtgagtcttctctgtctttcacaaatcccttggctaggttggcaagagtgatgacatagcttaagtgacttctctgaagcaaccaagattgccttcatttggggtatttttattttttagttgtctgaatggccaatgtccaggaatcaatcatatcaccatgtggccaacctaatatagtaattattccaaaataggatttgcatgataggttcattagtaaccagtcaacaaataacccatcttttcagactcattcccaaggtgaaggtagtgcttgcagatttctgaaaacattgctatttgaaagctctattaagatttattgattaattcacttcagttcttaatttgaaggaatatttgtattcaaatttactgactactgtgcagtgtatgaattttctccacttactttcttttagtttatttggtggttgtctattagtttattaaatttaccaaattgaacaatttagaaaacttttatatatttttttctttaattagaacattcctgttacaaacttaatgcttatatcttctcaaaatttacatgttgaagcccaaatgtaacacgatttagagatagagcctgaaaggagatgaaaaaggtacaatgaagtcataaaggtaaaacactaatctgataggtctgaagccctaagttgaggaagagacccagagctctctcttggccatgtgaggccatctgtaggccaggaagagaggtctctctggaaaacagcactttggtcttggttttaccagtctaaggcaatggcaccccactccagtactcttgcctggaaaatcccattgacagaggagcctggtaggctgcagtccatgaggtcgctaagagtaggacacgactgagagacttcactttgacttttcacgttcatgcattggagaaggaaatggcaactcactccagtgttcttgcctggagaatcccaaggacagaggagcctggtaggaggccatctatgaggtcgcacagagtcagacatgactgaagcgacttagcagcagtagcagcagcagaactgtgagaaataaactttccattgtttaagacacccggtctatggcattttgttatggcactccaagttgaataatgggcttcccaggtggcactagtggtaaagaaaccaccctggccaatgcaggagctgtaggagatgtggattcgatctctgggtccagaagattccctggaaaagggcatggcaacccactccagtattcttgcctggagaatcccatggccagagaaggctggtgggctagagtctgctgaataggacagtcctgtaaataaggttttacctgtcttcttagattttgatgtattcttaacttcctttgatcagcacatagtttgtaatatctgatttatatgcctctttgttaatgagagttatttagaatagaggttttaacatttgtaattaaattacttttgttaatttaaaatttgttcatttaatttaaaaattgtttgcataatacatataggattatgtttaatttaaaaattatatttatataatacatttacatttcctaaatgtattcatacatttaggaaagagaaatcataagggcagagctaaataatctattacaaagtaaacatgcccgtgtaaccatgcccattgttataacagcattgccaccacacagtactgcgagcatcccagaagaaactcgcattccaaagcatcctccactctccttccaagaatagtcactattctgacttctaacaccataaattagctttgtctgtttttgaagttcatagaacttgaatcataagatatatatttgcatgtgtctagcttcttttgactgatattcattattgctctaaattgtcctgttaattttcattgctttgtagctttcaattaagggaattaaaaaaatattcattctcatgttgacagggtatttctgttgtctccttttggggaactatttcaaat

SEQ ID NO: 62079 - DNA, 1363 bp, Bovine  19866880897627
  misc_feature (1)..(1): n is a, c, g, or t
nacttacaagtcagacactgggaggggagcttatacacattgaaattgtattcaactcagtggtaaaatagctcagtgaaagcaaataaacaaaaaccattctctagacttgtttgaccaacaaataacccagagttgctgaattcagaatcatttttggtagtttagataaaacaaaggtggtattcgggctagatggaatattttagtaacaatcttccctaattagagcaaaattcctgcttagagagctgttgagagcctgagattttgaggtgtttgtctttgtttcattgttaatttcagagttgggttctctctgatatttaatcacttactccttggtttagtcagaattagttaaattgtgctacggtaataagtaatcccatcgtagacgcttaagtttatttaagtttattaagtttattgacacagaagtttacttatcattcatgctgtgtggttcacattggtcagttagagctctgttggcgttcctaagcacaccaggtagatagaggctgcaccacgttgtagctcttgaatctgaaacatgggacctctttagtcctgatgataggggaagagggaaaaattagaaaattgaccatgcctcagactaggagtattaatgaaccacatccgttcatatttgattaggtaaaattgagactagtagagaagcagattgaatacttggtgaatattactacatctcttatttctctcactttggtaattttaaaattagtgctctaagattcagtatttatttccaatataggtaatgaacctataattcatcattatgaaccctaaattcatcaacatttgtgattaaaataattaaatttactctttcctcaaagatagtggggacttcctggtggctcagacggtaaagagtctgcctacaatgcaggagacccaggttcaatccctgggtcaggaagatctcctggagaaggaaacggcaacccactccagtatttttgcctggaatatcccatggacagaggagactggtgtgctacagtccatggggtggcagagtcggacacgactgagcgacttctttcactttcactttcaaagatactgggctttctcatcgactttgctttataacacaatccagttttctgaggtttccatttaataaaagttttttttttttttttaatttatgtatttatattagctgtactgggtcttcgctgtgcatgtgggatctagttctctgaccatggatcaaacccaggccccctgcactgggagatcagagtcttacccaagagaccaccaaggaagtccctccatttaatgtttgaatcatatttatctattactaacttataca

SEQ ID NO: 62080 - DNA, 1038 bp, Bovine  19866880924495
  misc_feature (1)..(1): n is a, c, g, or t
nttttgacattgaataaaacaatataaaccctatcttcactctccaatttttataatagtaatttgtttaacttaagcctaaagtttgctgatccctgtcactgtacagttgttatgttttccaaaacaatttgagttggcagtggaaccacttaaggaggtaattctaaagaacccagataaatacaggttgtcacagaaaaggtgcctgctatgggccaggtactgttctggggactgcatttatgctatttcacttaataaatttaaaaataaaaaagggaaaatccacgacacaagggattctcctcatactcttttctgaattggagcttttctcttggtgatctccctggtggctcagaccgtaaagaatctacctgcagtgcaggagacccaggtgtgatcctactcacccttcaactctctgttcaaatgcctctttctcagggaaaacctgctggaccaggaagatttatgaaatgaatatgtggacacaaacatttaacagtttaccataggccagtcacgtgcactatgatctttggtccttctgtcaactgatcagcctgcaaggagtagccagtctttggcatgtgagggctgtaacgtgctcaatattgttctagggcagtgccgaacgtgggacctcctgtacttctggtaaacaaagaaggatgttttcaatttctacagagcaaacaggattattgtgcactgtctacctggattacaaatggtctagaattatctaggaagaggtgtattttatttccccatacatgaacactgacagggaaagatgttggatcttttatttttctttctcagtgcttgactctgtattgaacttaaagaaatctaatagatatgaaatgctttaatataaaaaagtcaaaataatataaaatgatttttattaataaatgtttgataaatgacttaaagatgatgcttaaggaatatcttgagatttttctaaactctgtgtgcaacacaaaatttgaattttgacagaaaaagatgaccataacttaa

SEQ ID NO: 62081 - DNA, 753 bp, Bovine  19866880973843
  misc_feature (1)..(1): n is a, c, g, or t
naatgaaggctgagcatagaagaactgaagcttttgaagtgtggtgctgaaaaacactcttgagagtccctggacagcaaagagatcaaaccagtcaattctaaaggaaatcaaacctgaatattcattggaaggactgatgctgaagctgaagtttcaatactttggccacctgatgcgaactgacttactgggaaagaccctgactcaggaaagattgagggcaagaggagaagggggtggcagaggatgagatgcttagataacatcactgactcaatggacaagagtttgagcaaacttcgggagatagtgaaggacagggaagcctagtgtgcttaagttcatagcatcttcaagttggacatgacttaactactgaacaacaaaaaaggaaaagaatctgaaaaagaacagatatatacatacgtataacagaatcactttgccatacgcctgaaagtaacacaacattgtaaatcaactatacctcaattaaaaaaaaatttgtttaatttcaagttttttatttaaatgaactacttgaatattcatccttaaagatctgatcacagtttaatgctgtaacatttaattaccttcatttttgggccactataaatcaaaagattgtaattcaaatgtatactaatttattcttgaccttgaagttaattactaccatcagaggctttaattattgttggcaaagtgggaatatatcaaaagaagacttgcgaaacaagaaataga

SEQ ID NO: 62082 - DNA, 1562 bp, Bovine  19866880980626
  misc_feature (1)..(1): n is a, c, g, or t
ntaaattccttttggaattgctgaaataaatatggagttactcagttttctggatttggacttgtctgggttccaagagccaagttctttctgactgtgcaaacatgtgagacttcgggtaagccatgaaacttttaacaccgaatgttcacaaaagtctgcacatatttggaatctttttggagtcaaccttaggaatatttttgaagccagatgacataattaccctcactttttagtcaaccacacccgattattgaacaacaaaaatgttattagtcataccgcaaatcctctgtatagcccaaagtggtttcgatttatacatagcaaaaacttgggatactttcaaaggacaaatatctgaccccttatgcatattaaaaataatatcccaaagtctaggaagacagtttctagaaaagcactccaacaattagagagcaatgtcagtgtcattttaatagtggcctccaaggtggccgctttaaatgacttcactcatttggatgtttggctccagaaatgtttatataatcaatttaagaatccatcttataatgaagataatgacaatgtgtcattaatttcaatagtaatgttacattttgtttatatgttattgacttctgtgatttttctttctaattgaaatataccttgtggtaaaggacccagatctcatgtgcgaagcctgaagaattttagcacacgtattaatatgttctttgtaatgagcatcaaggtcaagacatagagcatttcaagcccctgacaaagctccctaggttccccactccaggctgactgacctgacctccaatcgcaatagataaatttagtttacttttgaacttcatataaatagaattacagaactgtactcttttgtattggatttctttcatttaatttcatatccagagatgtacccatggtcttgtgtgtaacactatttagttctttttcttgctttgaatattacattctatggttagaccacaatgcactggcccattccactgttggtagaagtttggattatttatgttggggttgttatggataaagctggaatgagcacactgatatgtgcctctgggtggagttaagtcctcatttccatttggtatgtttccaggagacaaattgctgtgtcatacctattttaactttcataggcactgccagaaatattttcaaagtgtttatactaatttacaccctggtgtttgttaaatgacataaaaggaaaaaccgtttaagcagttgaccttcctggattcatcagtgtttctttacatgagctgttctttttttgaaggaaagcttagagatattaaaacaaaatctctgccatattattttcctctttgctttcctggactatttctaacccattaaatttgtaaagtctctgtcttctttcttgctatgttctccagagacacaaggtgattccttgatagcgctttactgttgatttgtgtgtcttgtatttgcacttggggtgaactgctggcaagagagtgggcctactctctcacctactgcctgtgtgg

SEQ ID NO: 62083 - DNA, 731 bp, Bovine  19866881059978
  misc_feature (1)..(1): n is a, c, g, or t
ntccgagactctcttccttttacagaaaacctcagcaaagcactaggtcatgtaaactaatagttctgtagacgccaataccttcaaactgggagcgatgatgaaacaagaaagaataaagggaagcacagagactcctatttactgagttcctattctctgtgttagacttgaagtctttaataattattgtagaaaacttctcttcaattagtttgaatttcaagagtaattagtttaagccaaagagatttacgcagttttaacctatgaagaaacttttcccaacaaaactattatcccaaactttgtgaataatcatggttttgctacaccaaattaatagttttctatgcaatttatgtgctaatttcaatttcaatttcactgtcaatcccatctgttattgcttcaattctgaattaatgaggcaagttagagctggaaaatgtcacatcatctgagggcattgttcttttctaaggtcatataaaatgaaagagtacttctgtcataattcaacaatccatcccattttatagagttgcaacacgttggagctggaaagtttataatatcatcaaatctagatttataggtaaagaaactgaggtcccaagaggcaaagtgattcactcaagtttttgtagccattgttcctcatccattgcttctagctttacaagtctagacttaaccctttcattcatctggacgcctatgttctgcta

SEQ ID NO: 62084 - DNA, 971 bp, Bovine  19866881116944
  misc_feature (1)..(1): n is a, c, g, or t
nggaaatcccatggacagaggagtctagtgggcttagttacgtggtagaaaaagagtcagataagactttgtgattaaataacaacaacctggatgccatacttctttgtggatggaaatcctggaaactacgttggctgaaatctctgtgctttcataaaagcctatggtgatcttaaaaatttgctataaggcagcatgaaccccatatttagggattgggggagctgaagtaatattatttgtttctcagataagggaattaagccatgcacaagacaaattataggcaacataaacctatatttgtctcaaatctctacacattttacatgaaaatttttttttttcagcaaaatttgtcagggaaatttccaggtttgccgaattttggaagtcactgcctttggcaacacttgcttcaagtactctttaactgatatttcataagatgatgtgcatatatcctgttgattaaaatcacttaatttcttctttatgtttctggaccactgccaaaaataataattactaaatttaataagccacatataagacttgcagtaactggtagaacaagttgagatcctatacaacgtgacttggatagaacagattatagtgggttgtaccctcttctccatttaagaaataaaaactataaacagaagataaataggacaatagcatatatagaagtgggagccagtatgaagacttaactcaaggaactaaataacacaagtacgattgaaacacagaagcatcagaggtagcagagctgaatgaagttacagtggggagccggggtcagagcatgcatagtcttgagagaaagtcatgataattgtggctttctcctaagggcaatgtgaagtaaaaaaagaaatttaagtcaagcagtggcatgatgagaactgcatttttaaatggtcactcttgctgctgtgtagagaatacgttagagggaa

SEQ ID NO: 62085 - DNA, 749 bp, Bovine  19866881154816
  misc_feature (1)..(1): n is a, c, g, or t
ntctgtatgttctgtgttctattctggagtaacttgaaacaagatctttaaaacttgattattttgttcttattctcaaaaaggtatttagctgattttaactctgttaataaaggaaggttttgtaacagcgaggttcaagtaaaacaatttaaaggaaaagaaaaaaatgtgtgtaaaggcttctctccaaaaatgactataagggaatttttgtgttttatgaagcagttagttatagctttgagaagataagtgaattttctatagtaaggttataaaaaataatacagtagatgaataaggtgagttaatgtgcacaaaataagtagctattagcagttttacaaataacaaaaatgatgattaaaaggttatcagtaacttgtccaaagtcacacagctctagtcagtagtagcactgagatttgagctgcctgtcattttttttgctaatggaatatccccattggaaaattatttcatcattgtctgactaaggacaatgaaatgatttttatatttacatgtggctagattctttcctggagaatcccagggatgggggagcctggtgggctgccatctatggggtcgcagagagtcagacatgactgaagtgacttagcaggagcagaaaatttatctaagaaaagcaccaactcaacttccctacatggaattattttgagaactgaaatcatcctaattattcttgacaagtgctcctcaattgtaagaaaagaaaa

SEQ ID NO: 62086 - DNA, 1098 bp, Bovine  19866881208794
  misc_feature (1)..(1): n is a, c, g, or t
ntataaacttataattaaaagaatatatcctaatcctttagcaagtaattatattgagtgttattcacccttcatgagaaatcccttaaagatctaaagggtgacagcctcatcaagttcttattgcctcccttgatgcatttccatttttggaagtctcctctcaatttctgcttgacatacaggaacaaaaaaaaaggaattcaaaggaaggtaccttgcaagaagaacttcattaaatcattatcaaattggaaaattatatacccaaatatcccacacatgtataataagatgacagatacatgtgtttgcatgtttggatgagatacacagtcttggcaagtataaatatgcataattttctcatacaacataattagagaaaattaagtatctagccaattagtctttggaacaattttcttcatattttctttctcctgagctcaaacgttcttgataacctgccttccttttctggagtctaaccctcatatgctccccttttccgctctcctctatcttccttcacattgtatgccttgcttgcagggccacctctttcctcctcctcctctggttctgttcattttcccagacccttccaagtctcagataccgggcaagactccagctgtttgtgggtggaaaaagcaattacatagaaactctgatagaaacacagaagactccctgtctgatgtcatggatggccccagacctccgctggttctctgcatctgtttgtccctcagtcacaaagaagagaagatgtgatcactctagccagaatttggttaccatggagtccttctattccagtccactggcttaaaggaagcccagtatagctgaagcacttccttcagagtatctccctatctcctgagaaggcagaagcttgcaggttttggaaagccagcatttaaggctaagcttttcatgcacatcagtcccaagagtggagcaacagtgggaagcccagccatgttcctacaagcctgagctatattgcaggccctggaaaacccccatttgcaagttaaaggtatactcctgggttgagctccttgtgttaaatagcaaattcccatt

SEQ ID NO: 62087 - DNA, 1048 bp, Bovine  19866881359577
  misc_feature (1)..(1): n is a, c, g, or t
naagaaattttgtttgcgactcagaattacttttatcttattcaaatcaatgtaaaataaatgttttttaaatgcaactgccctctggagcacacttaaggagaacacacagcaccatttgggagagaagacaattatctgaaatacatgtctcattatccaactgcacagccacactgatgaactattaacactccctgcaactcttacagctgtaggaaagataaaccatgaatggcttcctcagcagcaagtgcaatttcagggggcaatgattttgccaggtcattttcactaatggccttccggaagaagattcttgaacatggcatgttgaaagcagatttgatccaaacatgctgtggctctcaggatgtcaagccctttgtaaatgcaaggcactcaagacagcctcacatgatcaaaaatgacaccagcatcaattaatgccaacaactgcaattaggaaaccacagatgagtagggacatgagaggctctaatttcccttttcctgggatctctgttcctggtgacacctgtcatgtttcattgacgtgaatacttttggagactagtcaccatcttcctgaaaattgcatttctgaccagagctccccaggcatggtgtcaatttatcttcatttgcaatgggtccctggacagattgtgagtgctcccagagatggagcttttacatttgaagaacagtacagagcaatgactagctgcagccttgtattttaatacaggttcatgggaaaaatatgattagttggtacaaagtcataggtgccaagaataaaatatggcagtgatgcttagaaagacccttcttgccctgttcaggaaatcagggtcaaggaaatagatctatatcttggatctgtaatataagggatttagaaacagttaatataatttcaaacccatgctaagaatgctgtttggaaaaatgaagtgaatataatcaaatagaatatctattatctgcttttaaattttaaaaatgtagatctggtctgtgacaacaaatatgtccagtttta

SEQ ID NO: 62088 - DNA, 782 bp, Bovine  19866881366025
  misc_feature (1)..(1): n is a, c, g, or t
ncaaccatttcttgtctttttctcacttaagagaagaaatattatttgcttttactgagtaactaaaagatgaggtgaaaaagagtcagtggagtatttccactgaaaactctgtccaacgctgtggttgatagtaataaatggtctcagggcctcctatactgggccccatctgttacagtggcacactgcctaactgccagatggtgtactagcttcacagggacaaaggcgccagaaagatggctttagaagacactggtaacaccatacccttgggtctcccacctcggttacagctcacccatgttggccctcctgtcacctcacaccactcacataatttctagaaataagtggttccaaacacttacgaagtcacttccttcagctgtctactggtttctgatcttaaaaaggctgaaacagaatactaaagtggggtaaagagaagttgagagtattcaaacacttcaagttgccaacatacataacaagtgcctaaggaccactaaaatcatatgatgtgtcaaactccattaagtaaggctagaatgtgtagggaccacttgtgaaatttaaccagtctcaaaaagaagagagaagcactgctacacaggaggaccagtttcttttacactcacccaaaacggaaaaaaaaaaaaaaaaatgtagctctagtgactcaaaaatcaaaacaaaacttttctcaatggaagaaaaattcatttattagtagtttaaatattcttcaaaacttgttctaaataaacaagaatgag

SEQ ID NO: 62089 - DNA, 677 bp, Bovine  19866881545976
  misc_feature (1)..(1): n is a, c, g, or t
nttgatgaacaatccctttgtgctatataggcaaatatttggaagaagtggaaaactggggtccctgagattttgggttcttcttctgcagcatagatcaaagtcttcttcttcattacctcatttatttttcctaagttttaagtaagaggaaaactggataagtttatcactgattgacgtgggctctctctctgccactggagcagctcagaaagcttcggcctccagatgtctcctagggttctgtaatgcacgcttttctcctcttcccatccagtccccgcatcctggaagtcccacagagtttcctcctctgacttctgggatgcactggcgcatggcaggaacaaaaccgtcactgacactgggctgcagccgcttcaatctggacactggggaacgtggatgtcagcactgagccccattctctgatgctaaacagccctttctgtcttttcataaattcttaggttgaggaggaattggaggctgaagttaggttgttcacgtgtgtgcttgtctcagccagaatggcatctggcaccaagcctactcttcagtcagatgatattgttttctgttacacacatgcgcacacacacacaaacacacacccagggagcatgagatcatcattcaggccatttgtctctatgcctgaaagttacattgca

SEQ ID NO: 62090 - DNA, 1316 bp, Bovine  19866881751705
  misc_feature (1)..(1): n is a, c, g, or t
ncttattagctgttggacactgggaactaaatctatttactaaacttaattactaaacctaattagtatcaatttggctaagtgtcaattttctcatctgtaagatagtcaagactaactacctacgtgtgttgttgagaagattccaagagaaaatatgtctaagttgtctagagtgacttgcacaggatcacttcagaaggcagctgttattatgacatgcaggaatcaaccctgtcctcaggatgcatggcagactgccccaaaaggtcccttagaccacatgccggacacatgcttcttgaaaacccctgacatagacttttatggtgtttgttgcatagcttggtgaatgctccaacattcacccactcagtcagcctcctacagggcagctgcttcccgcccccccccacctgttctatgttttagtcagagcatgtatgtacagtgttcaagagcttaacgtgttcaaagtcatccaccctgtatttctaaagaaagtcttttgatatatttgtgtgtttcttgggtttgttttatttgtgggatgcagtgggactcctgatgcttgactgcaagtttctttagaccttatgtctgctgctctctaaaacaaatccagttttacacagaccttttcatagcacagtttgcttctctgaatatctcctaaataattaaatacaatattttataaatattaaaaaattttggctttaaattctttctctgtggattagtaatctatctaaatctcaactctcgataccttgttctaccaacaaagttgatgtccaataggtatttgttgatggattgattttgctgagcgactgaactcccaggcctcttacagtgtcttatgcacagctgtgtaaactcttgaacgaaactgaagcttgtcacactccagcagtaataaggaatgagttagccaagtgcctcttctctgacatgtcgtccatcaaacagccttaatatcttgctggcctaaaaggagcttcaggagaataagcacactatggcaaaacccaaaatcacttactcaaaaggttaaacaatgaaagtaaccaatgtatgtgtctattgataaggggaagagagagagagaggagatcactttcaaactgcaagtgaaaactagacacaattttgtgaagttcccatgggtttcagtttcatcagtgtataattccaaatcaacaatgctagggggcagatggccttacattagatcctcgatatgctccagagtttaacaagcaaccttacaccgttagacagacatgctgggtgcaggaggaatggctcca

SEQ ID NO: 62091 - DNA, 1437 bp, Bovine  19866881917923
  misc_feature (1)..(1): n is a, c, g, or t
naaaaccccactctattgggttgcaaaagggaagatctgaccctggcatcaccctagttaatattcaggcagtgtataccacaggctttccaggtggcgctaatggtaaagaacccgcctgtcactgcaggagacaaaagagacgcggatttgatccctggtgtcaggaggatcccctggagaagaagatggcaacccattccagtattcttgcccagagaattccacagaagagaagccgggcaagctacagaccatcgggtcacaaagagtcagacataactgagcaacttagcacaacacaatgtacaccacatgtgtaattttaaactaaacaatggcaaagcctatttatttacagacactcaagatgatctcttaagattcattctgtccaagatagagaagggtatggggtgttccctccagggtagagtatcctatggggctgcaatatcatcactaccagctttcttgcatttgtaggggttgttctgccttctttcagagtgaatgagtatagggacaagtgaaaaataataataataatacataagtcagagatgaatgttactagaatctaaagaatgtaattgagacaccatccacaagcacagagaagctgaagttgacttatctacagagctcattcacaggaagtaaatgaggtctagaggaggattatttggagagtttcttgttgaccagagctaaattatttgtctttaagtggcaagaggatgggggcttcccaggtggctcagtggtaaagaatccacttgccagtgcaggagacgtgggtttaatccctgggttgggaagatcccctggaggggggcatggcaatgaagccagccctctccaattccaccgttcaatctcttacccagtccactacacataattcctctctctgtggagaatatgattgggcctaaataatgtatgccacagattccacagtatagcaaaatacattataatatctgataatgtgtgcatatcactcgatggaaaaacaacatgaaatatgagatatttataaaaacaccaaaaccattccaaattactgggtgttatagagtaattgtttttcttcctttgtaaattatctgggatgaggacaagtcaaatgatctccacatgtgtcctgaagaaataaacaaacttacttactttccttgactggttctcattttgttatctcttatagaggtgcattctttaaagaaaaataatgatttggctgtgtggccattgtcaaaatcacttgtaaacactcttccataatggaaaagaatcaaccttgaaataaactaaaacagctattttttcttgactgaaagtactgcctaagaaagaattttaatttactttcaactatcaaagatatgttttaattatagcacagaagagcaaagaacaacaaaaatcaat

SEQ ID NO: 62092 - DNA, 1062 bp, Bovine  19866880361843
  misc_feature (1)..(1): n is a, c, g, or t
ntagacaaattatgagaattcactggagtacaataccataatgctatgaatagaaagtttgatttacgatgaaagcttggaagagagacctagtgaaaactggcaaacattgactcagagggggttggggggggtagtgtgaggaggacataattatagactgaaaatatttgaaggcgctgttgcccactaagaggaaacaatattcacgttttatcttttccgtcttgtctttggcattttcattcactcctgcagatttttagggtgttttccaaagctttcgccctccagtgcacctgctgacggaatattttcagctggttatcttactattattgttttgaaatcgtattcgatcccctaaaaacttttttttcccacactcaatttgcctgattttaccagtagaagtttaatttcctaagcttgggctgcttctaacgccagcatcgtacacctagtaagaatcacacaactcaatcacgtccaattagtccttaagtcttgttgacttttcctttacgcggtctttaatttctgtcaatgttctttgagtctctgccagagctgccattttagttcaggtcatggatatagtataacaagcttcaacatctccatttgtttgctccttctccaagccgtcttgcgcatttaattgttacttgcacactctttacccattgagggacaaatatagtgttcttaatataggagacattaaaaaaaatatatatatatatatataggttcagtggagtaacactgtataaaccatatagtgacaaaagaccaaagtgaccaaaatttttttctctcagaaaacaatcctctgtgtacactgtgtgtgtgtgtgcgtgtgtgtgtgtgtgtgtgtgtgtgtattcctgtgtatacttatgcatgctgtcatggaagtgaatcccttgagaggttgtgatagctccagaaataaaatgctgaaatacctaaacagtagacttttgacatgttgcaaactatgagggaagaaaggagctaggtaattgcaaactttaggtgtggggaaagcatgagcta

SEQ ID NO: 62093 - DNA, 1246 bp, Bovine  19866880451889
  misc_feature (1)..(1): n is a, c, g, or t
ngaccgtgttgcttcctacctttaaattttactgagtccctcttgttctgaaaactccagttgtcttcatacccactgcccttcctgctcttattctgcccttttgtcctgttatctgttcccatacctctcattgcactctgcttcaacccagctgagggctttgttgtggctgtcgtgtcatgctcagagaaaattcattcttctgcctgaaactcaggtttccctctttgacctgcagctaactccttgccacctttcagctttgtttagtcactgctacattcagtgtcttcaatagacttcctgaatcagcctagattatgagttaccataacatcctgcatttcttttttttgttgttgtcttagtacttaaccatgctgttctaggatttcctagttaaggaactgtgtcccccttatactgagttcatggagaactggattgtgtctgtcttggtatcttaccatagcctagcaacatgcctggcatgtactatgcaatgactaagtaagtcctaatagacaaataaatgaatgtatagtctttcaatttccatttctccatgttgctacttgtggcttggctggtaaagaatctgcctgcagtgcagggagacctgggttcaatccctgggttgggaagaccccctggagaaggaaaaggctacccactccagtattctggcctgaagaattccatggactatatagtccatggggtcacaaagagtcagacacaactgagtgactttcactttcattcacttatacaactttgggcataaatgagaaagatatgagctttctatttctttcctgctctccactccctgttctaataggaaagggaaatgtggattaggcagaatgcttgatcattaagggaaattctacacattggcaggaaatgttaagatattctttcctaacaggtcaatcttgaagaaacaggcttgatcagtagaaagaggtgactttttataaagttaattattaaaaatttgtagtgtactgcatatatgttataatttcaattatatcaatatatgtgttcatatttaatgcagaggaaaaataccagaaaaaaataaggaaaatttcaattaagcatctcttggtgtttttattttcttttattttctcatgtttttctgtatagtcaaatttttaaaggattaatgaaaacaaaaatatttgaaaagaaacttaaatttttatttgtaccagttgcaagaagagaa

SEQ ID NO: 62094 - DNA, 765 bp, Bovine  19866880824138
  misc_feature (1)..(1): n is a, c, g, or t
natagaagtcaatagcaattacttgcaaagtgtcattttgaagtttctgagcccaatcaaacttatgggtatataaaggggtttctttgtatataaatgtaaatatgttttaaaactggaactattgaaaatatttgaagaaaatataatgactctgtccctttcatcctaaaatttggccttagaaatcataattcttcatatgctgcatgaaaaataaaaatagaacaaaattgaaatgctcactaaaaccttaagtatgctttcagttcatcagctgtatcctgacaagtgaatgttaatttgtacaactttcattgtagggtagtattttatgaaagattttaaaaatcaataatcagtattaattcaattatggagggattaagtgtatttatactgtggttcttacaaacatattgatttccctatattagtagaggattttactatcattaatgggatttcaggttcagttcagttcagttgctcagttgtatctgactctttgcaaccccatgaacctcagcaggccaggcctccctgtccatcaccaacccccggagtccacccaaacccatgtccactgagtcagtgatgccatccaacaatcttatcctctgtcattcccttctcctcctgccctcaatctttcccagcatcagggtcttttccaatgagtcagctcttcgcatcaagtggccaaagtattaggagtttcagcttcagcatcagtccttctactgaacacccaggactgatctc

SEQ ID NO: 62095 - DNA, 376 bp, Bovine  19866880827380
  misc_feature (1)..(1): n is a, c, g, or t
naattggtctctaagtggcaatgcctctgagagagaagaagccctgagtggtcctgaacaaaactgtgacatggctgagactatctgtaaagagatggccccagaatcccactgtttagggaaaacccattgtcagttgcctggaatagaaagtgagaccctgggggcatggacatctaaaagggagctctctccatcagcttgagaaagtgaaaaatagttgtcattgcttacgaggagagaataggtaatgggataaggttgagcccaaaagggagacagtgtcgatgtaagtgctggggaactgcgtggctgaaagtgcaagtgaaaatgtccctgggatttctggggcagggaggggcatggggaggaggtt

SEQ ID NO: 62096 - DNA, 2407 bp, Bovine  19866880858303
  misc_feature (1)..(1): n is a, c, g, or t
ncttggcttccctgtccttcactatctcctggactttgctcagactcatgtctgttgagtcagtgatgccatccaaccatctcatcctttgtcacctccttatccttttgccctcaatctttcccagcatcaggatcttttccagtgagtcagctctttgcatcaggtggcctaagtattgaagcttcagcttcagcatcagtccttccaatgtatattcagggttgatgtcctttaggattgactgttttgatcttcttgctgtctaagggtcttctccagcatcacagtttgaaagcaagaatttctttatatgttaacaaagtgaatccctctgggaaaatgtccccctttcctttcaaaagaaaatgagcttttggttttagggtcctctgtcctagtagacggagaaggtgatggcaccccactccagtactcttgcctggaaaatcccatggacgaaggagcctggtgggctgcagtccatggagtcgcgaagagttggacacgactgagtgacttcaatttcacttttcactttcctgcattggagaaggaaatagcaacccactccagtgttcttgcctggagaatcccagggacggtggagcctggtgggctgctgtctatggggttgcacagagtcggacacaactgaagtgacttagcagtagcagtcctagtagagtcttaaccctgcaaactcaggggaaggaactatggttaagaggtgcctcatccagacatgtatctttgatctcatctgtgtcctctgctcttcttttgtttgctgattgaacagtaatctcaacactgtcacattcatgttgccatttgcatcaattattaaagccagacccgctcctatggttggtcctagtttataagtctcttctatcctaattagtcttctccaagtacaagtcatatatggcattcaaataaacccagttttcaggtgtggtgtgatcaacacaatcccaggtttggattatcacctcctttgttcaattaattctacctaaaacctaatcggtttttctggaggatccaccacattcatgactcacattgactttaccttcccctaaactgcctgagtcattttcagacatcatatgtattgtctcccttttcccaaacctgtgccactggcttttgaactttagagcaaatcccaagatttactactattagatttagttgattgttccagctggccaagatccttttatcccattgctacagcctgtcaagatctttttggattttaattctttcatcctggctagtcactcaatcatctgtaaaccatgctttgataatcattccttctatatctgcagatcagtactggaaaatgctaaactggatagtactggttttcagtatacttttatggacttaaaaatattcataacccaaaagttgagagttatgttctatttggggggaatttttaggtcataagccagggaggtaaccttacaggtaatctcaagtaaccctgaaagaactactttgaggaggtaagagagggagccaggttatataaaagttttgcaacaaagagcaggtattctaaacattaaaaaaaaaaatattaattaaagaaaccagatatcccaagttaaagaatttagcacttttctgtgtatgggtagatgaaagagtctaggctctctgaaagcattcccttgacatgcatcttagctatctggggctagtatcccgtgtttttacatgctgagtttcctcagggctcactgtggggaggggtgcagtctgatggctagatggcaagtattctttccctaggtgagtttcctcaggctcaccggctcactatccatagtggctgcaattgctgatgaccgtgacatccttgtttaccgatacaacaggaaatattccatttcttactttggctacaattgtttaaacctattatcaatccacatgattatctttacttataggccatctttctccatttatccaacaggaactcctgagaaattgtcaaatgctttcctaaagtccgtctagagcagggttaccaggtttcacagatttagcagcatcgtgacttcataaaggtgtgcaaaatattcttcctgactctcccaattcactccccaccccattttgtgcttctggaacctgtcttctgtgttctctatttccttgattccattgtctgacattatagaatgggattaaggtatgaatttcaccatccctctcttcacagctgcaagtaatcagtggcttacattaaatataagtggtttagcttctctttggtctttccagtggactcctccagctaaagatacagctacaactctctccaggttctcatacatgttaccctccttgccctttgaaacttaagggtcagaga

SEQ ID NO: 62097 - DNA, 1442 bp, Bovine  19866880945341
  misc_feature (1)..(1): n is a, c, g, or t
nttaaaaaaacactcaatcctccgacatttacaagcttttataaaagtgtagtgatcttggtagaaaacatcctgactggtaatatagtgaacagatgagctcaccgctggtatgcaaagctgccgaattagctggttaaacaggctgctgagataattacattgtctgttttgtgacacattacaccggtgcacttgggattaacctgttctcttgtgtctacttctgatcagttttttagacagccttttatctgatgaaggagtacagacatcaaaagagaagggggcgtgtatgaaaagaaaggaatcacataaagctgaagagttaaattttctatttaaatttctgagcatatagccatttccataattttagttgctctctagagacctctgctggaaatgataggtatagattttcctttccagtttgttgtgttttactgtggccaatatatcataaacacagtaactaaagaatggagtatcaatgtcatgtcatacctatgacacattagttgtaaaaccatactcaggaaaggacaatttgcattgtaagagtttcaaaaggcaccctgatgctagaagtacactttgatagtcaatcaacacacatttatgcatttattaggcttccccagtggcttagtggtaaagaatcctcctgcaatgcaggagacgtgggttcagtccctaggttggggaagatcccctggaggagggcatggcaacccactccaggatttttgcctggagaatcccatagacagaggaaccaggcaggctagagtccatgggattacaaagagtcggacatgactgagcgactaagcgtgagctatgatgtgctttagcaagcatgactttcagtttgtttattatttccatattgttttaatgctgttgaagaccaaatagaatcatttattttgaaaatgaatgtggtaccttacagccaccagggaagcccctataaaaacaacaactgcaaaagctatccctaaagatttttatgggcttttagttccttatcattatcctgaagaggaaaaattatttagaccttctgattatgtgggaatgtggtacaaataagatttcatcatcagctgataattcagatagtgaacaattaagagaataaatagaaaaacctacccattaagagcccctggcaacttaaattgaatttaaccaactatggatcctctggctatcaggaaatgcaatttaaagcaggtataatagattttaacaactaaaatttgtttgtcacactgtaccaactaagatattagttaaatggggcaagaaatttcccttcatgttaatgaacatcaaatttatctcctgctgtccttttttttgttgttttttgtttttctttctaaaataactgcttgacttggtaagccagcattcaaatgaggttcgagcaa

SEQ ID NO: 62098 - DNA, 1959 bp, Bovine  19866880957752
  misc_feature (1)..(1): n is a, c, g, or t
ntggtacaagatgttaagtaacttggtttaggtcacccagctagtaggtggtattgtcaaaatctactagctggacgactactaggtcttcggatctgatactctgacactacccaaaacactttttacagtatgtctcatcattaaatgatgaataaaaatgcagaaatatccttcaaggttgagttaagaaactggaaatatttgtggttatgtattttgtttcctccattgaaaaatagattgtgtttcacagttttaaatcataacaattccattagcattcagcttttgctgtgaaagggtttggatctttgccataatatgccctttaaagtgaaatttggccaagttgtagcctaggagcaatagtggggcagaattgatctattaaaatgaaattgccagacttgagtggtctagcaaccataacatattatgctgactgcatagattccaaagttccttttaatgccaataaagcactaatttttcatgttcaaagattttcacaatagtttacctaatttctttcacttattttggagagcatgtaataataccagcttgtaaaccacaggtagaaaaagaggcttacttcacatccccataatctctatctaacccaaatttacaagaatttaagatagggaatatgtaggctgaagtgtagcttatggaattactgtcttatttggcaatttaggattcttggttataagtgacaggaactcagaagaacttgagcacaaaatgtattgattcctctacatgtaaatgtgggggatgtttgctttgaggtatgcctgaatacagattatctaacaatattgtcaggaacttgattcactttagccctcagctctgttttcctaatgtctatgaaggcaatattcaaattatggaaggatggtaaatattctgaatttcagttcagtcagttcagttgctcacttgtgtccaactctttgcgaccccattgaccactgcaccccaggcttccctttccatcaccaactcccggagcctactcaaactcatgtccatcacatcagtgatgccatccaaccgtctcatcctctattgtccccttctattcccaccttcaatctttcccagcatcagggtcttttccaatgagtcagttcttcgcatcaggtagccaaagtattggagtttcagcttcaccgtcagtcctcccagtgagtattcaggactgatctcctttaggatggactggttggatctccttgcagtccatgggactctcaagagtctttccaacaccacatttcgaaagcatcaaatttttggtgctcagccttctttatggttcaactctcacatccatacatgactactggaaaaaccgtatctatgcctatatgaacttctgttggcaaactgatgtctctgctcttaatacactatctaggtttgttatagctttccttccaaggagaaagtgtataataatttcatggctgcggtcaccatctgcagtgattttggagcccaaatgaaatctgtcactgtttccatttttttcctcttccatttgccatgaagtgatgggaccagatgccacaattttagttttttgaatgttcagtttcaagccagctttttcactctcctgcttcacactcatgaaaaggctctttagtttttcttctctttcttccattagtatggtatcatctgcatatctgaagttgttgacatttccaccagcaatcttgattccagcttgtgcttcatcaagctcggcatttcatatgatgttctgtgcatatagtttaaataagtatggtgacagtatatagccttgctgtactcccttcccaattttgaaccagtctgttgttccatgttcagttctaactgttgcttctggggctgcatacaggtttctcagcaggcaggtaaggggggcctgggttttcccatctctttcag

SEQ ID NO: 62099 - DNA, 1335 bp, Bovine  19866880999552
  misc_feature (1)..(1): n is a, c, g, or t
ncccggatcgatggatgtgagtctgagtgaactccgggagttggtgatggacagggaggcctggcgtgctgtgattcatggggtcgctaatagtccgacacgactgagctactgaactgaactgaactgaactgaaatatcttgtaaaagtggagttgaacagtatttgtttatacctaatgtatactggaatgcagttttgaggttacttaatatatgtcctacaaacaagaccataccttttcttccctctgcactacacagtaggttcttcatagttatctcttttataaatagtagtgtgtatatttggagaaaatcataattccaaaagatacatgcaccccattgttcattgtggcactatttacggtagtcaggacatggaaacaacctatgttctccttatttgtggtagctctgtcctctaaaattggcttaaatattaaacctctattcctagaggaaataaagggataagttcctacaatcgtcacattttcaataactgattaatacataaccttgctttgtttctgtttaaaagcactttatttactattatcattgattcattaacattgacctcacagcttaaggcactgtaagtcttgcttgagtgaaccttatctaatacacatccagaagatacaatcacagacgtcttgtacttaggaacaatagacaatacttcatcactgggtgatggagttcattttaaacactgaatcacaacaaaaagcacaaacacgcaaccaaaaaaagtgttacactaaagagactacagaaatgacacatttccagtatgaaagcgtcactttgttctactcactgggacatatgcttgctgtcactgctctgggcttgtgtatgaatgaccacgaaactgtgtgatctgtgggttacaaataaatttttgtgagtaggtgaactcacaaaggcagaatctgagaacaaagagactcaactgtaaatgcaaacaaaccatacaaaactcattttcatctcgtggccacttacattcctatccacactgaggaatcaatgaacctaatctttatactaggagttaggtgatcaattattagtgtaatgatcaacctcgcttccagtctgtaccctttaaattataatgcattttctactgaagttttagggataaactaactgaaatataaattttaaggttattatatcacaaaatgaaatcattcagaaggataacaaaataaatgttagtaataatatatgatagtagggccaaaattggaaatgggaaagaattggaagatggtttcgtgtgcatgccagactttcgtttcaacataactgttt

SEQ ID NO: 62100 - DNA, 1159 bp, Bovine  19866881076864
  misc_feature (1)..(1): n is a, c, g, or t
ngcttagggaagaagtgggggacagaggagaggagagaggattacagggggccatgaagaaactttgtgggggtgatggatacattcgttatcttgattgtggtgatggtttcattggtgtataaatatattgaaacatcaaattgtatattttcaataagttctgtttactgtatatccattatatctcaataaagctgctaaagattagtaaaaaaaaaaaaaaagattaagcagtactacatagaaactctaaaatagaaaaatttttttaaaacacaaagggaaaatagaagggaaaaaagctactgaaatttgtaggaagagacaaaaggaaaccaagaatgaagccagtgtttcaaggaggattgagcagttaaaattaacatgacacagagataagagtaaagactgtccaatgtatttggcaaagaaaaaatctactacatattcaggaaagggtggtgggttgggagccagaatgtcagaggctgaagggaggcttacttgaggcaaggatgatggcagcatcctgagaccacttgtttaaaaagctcaacaatgaaaatgagagaaagaagatggtagctagaggggacagcagagcaaacttttggtgaaatgtgaaggcagaagaaaataaaagtggaatgaagcagaaactaaagattctagagatgaaggcaaaacatgtggtaacaggtttcttgaggaatttggaagggatgggatctaagccacaggtgccagagtgagtcttgggaaggagaaatttataattgttaactcctgacagtcctccctaaacaatgggttacagaacaccttaagtggattttttttaaactttgggggaaaaaaaaaaaaaactattattttgccagcagatttcttagaaaacttggatgactggacatttctgacatttcttaaaaccaatcatgataaaagaagatatcatatgaatcatcacctctgacccccccaaactgtgacctttccaggctgtaatctactgaccacagcccataggtcgttgtcccaagtgacataatagtaacttctgcttcattagcctcagtatcttgctgcttcaggaagattactctgagtcagatgttttagaggaacagagagcaggaggagagtcagggataag

SEQ ID NO: 62101 - DNA, 1043 bp, Bovine  19866881107703
  misc_feature (1)..(1): n is a, c, g, or t
naatcctcctgcaatgcaagagacttaagagacacggttttgatccctgggtcaggaagatcccctggagaagggaactgttacctactccagtattcttgcttgcagaatcccatggacagaggagcctagtgggctacggtccatggggtcacaaagagtcagacacaactgagtgatttacagctatttgcatagcatttatattgtattaagtattataagtaacctagagatgatttagtgtatactggaagatgtacatagtttgtatgcaaattctgcaccatttactataaaggacttgagcacttaagcatccgtggattttggtttggggtgggaggcagccctggaatgatctgctgcgtatacggaaagatgactaaaatatttgggattgtgagatagttattttaggcaaaaggagtaggaaaaacaagtaagagaagaaagggagcttttagttttctcaaaaactaacaaagtcccaccttagtcagggagtatcaggttagagcagttctgaaaggatcacctggccctcaacccttgggaattctcagccctgtggtgtttgcttttgtctcccaatagaggtgtggtatgaaggggtcacacaggaggtgagcaagacgttaaatgctccacttccccacagtaaagaaacacttcttcagtcaaaccaggtgagctgaataactggatatgcttctccatgaagctaatacatttttatcaaacacttcaacaattcttattccctgactgaagcatttttggctattaatgattacaggaggatgaaactagtcaaaacacccccaagaaagaaaatggcaaagagaattatagtttatgttttctataagagagataattcatagtacactatacttgaatgagtaagagatttgcagcttggtataaaaacagaataacatggtaaacttggagtttggtttttttgtttgttttagctttttttttagtcagactggtttaccaagcattggtagtatagaatcaaccgataatatttg

SEQ ID NO: 62102 - DNA, 1065 bp, Bovine  19866881116714
  misc_feature (1)..(1): n is a, c, g, or t
ntaaatatggtatatgggtgcattttgttcctggatttatcttccgctggatatggtaagtgaaccttgataaatatgtagcaggtatccgcagcagttgtgagagtcaatttggcttgaaagtctaccattgctatccactttctgaaacagtacatagatcagtgtggttaaacacagagatattataatgcaaaagggattaacaaattccctccctgttttgcacttagaaagtattgaatgtacttaggaagagcgataattggtttattattctgaaagttaaggaaagtcagttctttaaggcattttattttatttatggaagaagacttttcattaggaacttcagcttccaggcataactagaataaatgaggtttttccctttgtttgttaattgacaaactgatgaaagctttaaagactctcacacaatgtgtaaaacttttaattatatgaagctctaaagttgtttatgctgacttgaaaatgataaaggctgaataatgggatattataaaaaatgttctacaggaaattaacaagattatttgttttgcctgactttttttagagtcttgtatataggactctgtatcagaatataggagtctctgtccaaagagcatttcctatacttaagaaaacctcaggagatcaccaagtgtctttgtgcctcagctcacctattttcaaagtagacatttttagcaaattaataattattagattaaatttattatggaaataactacaaagggaatttagggaaaaaagtttgttatataattttttccaatacagtatattttgaatggtattacaatagtaaaaaaaagaactccatttatctcaaatatctctgattgtatgattaaacagtttttcttctgaaattagtagaaactaaagatatagattgggcaaaccatattgtatgtttgagactagcaaaaaggaaggctaaagtcagtgaatgttttccagaatttattttgctgattatagcatttgaactatttacaaatccttttttaataatcagttctattttcttta

SEQ ID NO: 62103 - DNA, 983 bp, Bovine  19866881139628
  misc_feature (1)..(1): n is a, c, g, or t
natgaaaaaaaaaaaaaaatgtagtagatcctttcaaagtaatattacttactttagttgtgctcagagccaaatcaaagtccaggattgggttatcaactcattccagtcatgatattaagtagggaaaaggtcatgccagaccctttataactcttaagtcatggaactcagaatgcagtcaactgccaccagaaggatcaaatgggcaaggggtgtgctatctttagcaaatgcattctggtctctaagaccacactccattttttgcacttgaactagttcttaactgtagtgtaaacctggagacaaaggtgattatgatgtattagtactacatgtttgcatttccagtaatgattcagacatcttattgctgaggttttgcattcattgcaaagatatttcataaatttttttccttgataaagggagaatagatttagtttacagattctagatcctttaaattgccagatagaatgcgtgcaatatactataggttgttctaaaaaggttcagtttaattgtatcaaaagccataattcagcagtgggcctaatactataattaaaggaggttcaaggtactatgtggtatgcatttaaaggattaatctactttaaagagatgttcctttgatcccagtgaagagttgagttgctatgcctcacatctggataaggatctatactcagaaacgtcaaagtgtgaacatgtgctggggcatgggccatatttcacagccttacaaaatacaagaatgtcggggattccactcctccttggggattcatcttctaggatcacaggaccccttacagttactgtctcctcactgcaggccttcacttgtgatgagaggggaggatggttatattaagacccactatgaagccagtgagaaagcaacatggcaatgtggagaaaggccaattgtctgcattttcacgtcatccccgcctgctgatgtgttatctgac

SEQ ID NO: 62104 - DNA, 702 bp, Bovine  19866881165411
  misc_feature (1)..(1): n is a, c, g, or t
ntattttcttacagttctagaggtctgaagtccaaaatgtcttccactgggctgaagtcaaggtggcagcagggccatattccttctgggtgttccagagttgactcatttctttgctttttccagcttgcagaggtaacttatatttcttggcttcacaccccttgttctgtcttcaaggacaacaacacaatagtgaatctctccgccacccccccctgccctctcctttataaatttcctgtgcctacactgggcccatctgggtaactcaaactactctccctgtctcaagatcttaacctagtcacacctgtaaagccccttttgtcgcgtcacatcacatattccctggaggttctagagattaggatatggacatctttgggagccatcattaagcctaccacagtaaaaattaatggggtgtctacagtataatgcttattctaaagaagatacttagtcttcaaaatttcataggaaatcaaaatatttactgttcactagaccaattaaccccaaccaggtcagaattgttagagtcaattcgaatgaaaatctttcccattcaactccacaaatgcgttttgggtgcaagtattacacaggaatgttgagaaaatccaacagttcattgggtaaaaggagttgtcaaggtaatttctttctaggctgtggatttctccgcagatgttgcag

SEQ ID NO: 62105 - DNA, 1117 bp, Bovine  19866881351523
  misc_feature (1)..(1): n is a, c, g, or t
nagcaggtcaggaaaggggttatggttaccactgcaagatgaaagataagcagccaggcagttagaagccaaagcattttatctagaagagcaggtctggccttgtttccatcttgataagaattagattggagagcttgtttgtctgtagactaggatggggtggccgggctgaataaaggggacagggaagtcaggggcttagttatggagttgtggcaaaccactaatgtagtgataagtccttcttttgtgttgtacgtctacctgaactttgaaattgttagacttgtctgtttagataacatggctgtgtttctttcaaatgtgcagacttaaatatctagaaagtttaagtgacctgaacaggcttattatcctcgtttaaaatattaagacaatggctaactggttaagccactgactcaaaacttgaaggaaatgacattaactcctcttttttttttttaattattttattttttaactttacagtattgtattggttttgccatgtatcaacatgaatccgccacaggtagatcaactaaactttaaattaactcctcttttaaaaattttttttcagcagttttatcaatttttattggaggatattgttttacaatgttgtgttggtttctgctgtataacagtgcaaatcagccataagtatatatgtttcccctttctcttgcgtcttcctacccctccaggtcatcacagagcgccaggcgggctccctgtattatacagcagcttccctctagctatctattttacacatggttgtgtatatatgtcaatgttattaactccttttaaatggtatgcttacctttattctgaagcatatgcacaaaatactctggattacatttaaagttatgtttttatcccacttcaaacccccaacagattacaattataagagcttctactttctgatgatttaactgcttgaacagatttttaaaatataattattaaaatcaaaaacttctgaagtcatcaagtttcattctcggtgtatttaaaaaagagacatggctgcaggttttcctggggttttacttgctactgctcttagtatctcagtttcgaaagaaataagaaa

SEQ ID NO: 62106 - DNA, 1280 bp, Bovine  19866881380111
  misc_feature (1)..(1): n is a, c, g, or t
nagttcattaccaaattgatctctgaagctcctcttgtgtcactttgcatatttattttagagaatattttgaggttcaatattgatatacactgaagacagaaaaattcaagaattcatgtaagtaaaaagaagtgaaacaacttttacacctattatctgtgaattcaactctagatatactaaatagtttcttacgtttcttgccaatatttttctgtaaaaagttattcagtgtttaaagcagagtgtctttatgtatgtgtgtatatttaatgttgaattttttaatcacttatatgctgtgctatagtagtaatgcaatgtgattctcattgttctttatttgaattattatatgtactttgataagcatattgtaaaatattaagaaatccaaccagtccagcctaaaggaaatctgtcctgaaactccaatatattggccacctatgtgaagagctgactcctttgaaaagaccttgatgcagggaaggaggttggaaagattgaaggagggaggagaaggggacgacagaagatgagatggttggatagcatcactgatgcaatggacatgagtttgagtaaactccgggagttggtgatggacagggaggcctggcgtgctgcagtgcatggggttgcagttgagcgactgaactgaactgatgatagcatcagttaagagagacatatttaaaatactaacgcatactcagcactgctaaagcagataggttgccagttaattatgataacttgactttttgatgagtaaaatctcacattctgtggaaatggagtttgggtatgtgtgtgcagttagctggaaggatagtaggaagcaaaataacccattttaagaatgctatctaaaacttcaagggaagtctgtgttctattcccccacttcaaataaaaacaaaaggggggagtgggagatgcgaaggttttgaggggagggaggtcacccagcagtcatagattataaactctggaagtgaagttgataaggtatgggcaggagagtgtcttttagaaacctgacaaataaggcacaatcctacaaatgaaccataaacccatagaaaaattcaggtttttaaccaatttttctctgacctaagaaactgtgagacaaaaaagttctataaggcagaagcctgccttggagagaagccagggtcagtcaactgtagcaaagcttattgttgttttcataaggtagatggatgtggatccaccagtgaatgaggaaggcatagtcaaaggtggtg

SEQ ID NO: 62107 - DNA, 807 bp, Bovine  19866881691881
  misc_feature (1)..(1): n is a, c, g, or t
ncttttcatatactaatcccagcaaagattattataagaaggcatcaattttaagcaaaactgtatgactgaagcgaaaggtgttgttttcatatttgtgagaagtgtaaatgtctaacttttttgaagcattccattcccattgctctcaggccttagcatatgactggatgggtggaaggatttttttttttaacttatttcatttgttgctgaagtttaagtctcaccaatttacgtgcaacttagtatgttactgggaacagggaagcaaaattgaaaattagaacattcatcaattctttagaaacaaatgagacaagtggtagatttcctgaggtagaaaaacatgaagagtcaagggaagcacaatttttgatgttgaaaagacaattgtggagtggacagcagataaacagcattttcccctgctggctccactgcagaagtaacttgatcactctgtacaacctggcaagaagcttcaggcaggagcaaagaactatcccaggcaagtagggggtggggtgtggaagttgttagattggcttaccaaacccttccctaacagccaagaaggaagtggattacctatggctatgactaaggaacttatggccaacaagaccagttgcctgcacagaattctgccaagttcagtagcttcagctttcgtgatggttttacacaagtttggaaaacaggtgggaatatatgggggggaaagtccaggaggtagatttcattttaaacagtaaaggaagataagcaagatttccccagtgcaggagaaggataaattaggag

SEQ ID NO: 62108 - DNA, 1672 bp, Bovine  19866880126314
  misc_feature (1)..(1): n is a, c, g, or t
naaaagaatacatttgaatcagttctaaggagatggatgaaactggagcctattatacagagtgaagtaagccagaaagaaaaacaccaatacagtatactaacgcatatatatggaatttagaaatatggtaacaataaacctgtatacgagacagcaaaagagacactgatgtatagaacagtcttttggactctgtgggagagggagagggtaggatgatttgggagaatggcattgaaacatgtataatatcatatatgaaacgagtcgccagtccagattcgatgcatgatactggatgcttggggctggtgcactgggacgacccagagggatggtatggggagggaggagggttcaggatggggaacatgtgtatacctgtggcggatccatgttgatattggcataaccaatacaatattgtaaagttaaaaaataaaataaaattttaaaaaagtatgtatatttaaatataagtaactttcacttaattaacaaaccttatggctattggggaaatgacttatttgagaaggaatgccccatcttagtgcatactgccaagcgaactgagaatgcaaatggtatgaatcacatttgacccagtaacctctaccttaagtgtagggcatctctggtaattaaattattatttaaattatttaaggatgagacaatggcaccccactccagtactcttgcctggaaaatcccatgggcggaggagcctggtgggctgcagttcatggagttgctaggagtcggacacgactgagtgacttcactttcacttttcactttcatgcattggagaaggaaatggcaacccactccagtgttgttgcctggagaatcccagggacgggggagcctggtctgctgacgtctatggggtcacacagagttggacacgaccgaagcgatttagctggcaggcaaggatgaggaggtttgtccctattgcattgtttcttagcagcatagttctgtgtctaaatccccacggaccactatcattgtgttagttttgctaaaaacttttggaatttttatttcatttggtactatagcaaccaaatggtcatttctgaaatgctattttgccaccttagtggttcatattttaataaaattcaattacatgttttagctttccaatgtctccctgatgttataagttaataataaaaagtatcaaatagtctaattttcttcaaagccagtaatattccactgactctaaaactgtttcattaagggttgatgttctgagctctctaggaggtagagataaaagggcaaaagaacttagtagcagttcagttcatccaagccccctagtagagagagacatattaggaagacaagaatctcccaaatgatgtctaaggatacatctcttacctcagctattgaagtacctcaaacctgggacaatcccaaatttattctgagaattgactatgaccatcaacatatcaaaaatgggtgacaacattgcagccatgttggggagcaatttggaagttcctcaaaataatatttttactcagtggctcagtggtaaagaatctgcctgcaatgcaggagacacaagttcaatccctgggtagggaagattccctggagtaggaaatggcaatccactccagtaattttgcccaga

SEQ ID NO: 62109 - DNA, 1251 bp, Bovine  19866880375369
  misc_feature (1)..(1): n is a, c, g, or t
ngatgccaggggaactgaccaaggatgataagggctgtgtggtgggaggaaggggtgtctgaaggatcgttttggagactcacaggcaacagtcatgaaaggttacaggacaggacgatggacaagatcagggcactgccagggaggttggccatgagctggacacctatggtcttggatgggtcagttaatatctgcaggagtccacgtgaaaagccagagtgagaggcaggggctgggtcttcagtgatggttggaagcatgctgtggcaacagggagaaggaagctggtccattcatcttgctggaacttgaaagaacaggagcttctgtaagaagactgaagagaggcaatagggaatagaaacattccaaaatcaaataaaaactttttttttttttaaaaaggccagagtttatttctatttaaaccattaaaatatccaagtcccaaggatttccaggtttaagatgatattacagtcaggtggcaaccgttggttgtttttctttctaaagccttacaaggatcctgagcaattctcctccttgaaaatttttcttgtatgaaagctgataccttgtttgcttcacacaagtacatcagtccagtgaggatgaaaaacacaatgccggtagcaatcattgttgttaccagggcgaagggtggatgatcagaggacaaagtgatgaaaacaccgccgagtagcagtgctaacgtcacagcgtagaacaaatagaagcacaaccagcatctacgcgagacctcttcttgcgagattctttgaaaccaggtccactgactgttagctggaaaagctgggatcatgatgagttttagctgagtggactgaagaggagtcttgagttcaccaggcttcccagggccacttgggagggcagaactctaggtctcccttctcctccccatgctccccaggaccagaaaacaggtggactttcctcgtactttgcaccatcctgtcctcctctttctgactccatctacagttgaggtaggaatctctcctctacactgtgggagagttctgtaagctcatttctccaagcttagttagttgttggtatgctaaaaaaaaaaaaggcattaaaagaatttggaaaatattttctcaagatagcctggcaagtctgatataaattagagctgatgaagcaaacttaatctggccagctaaaggaattttgattgattgtaaaggcaatatgaagagccacgactgttataaa

SEQ ID NO: 62110 - DNA, 1148 bp, Bovine  19866880380963
  misc_feature (1)..(1): n is a, c, g, or t
nttagaaggaaagactgtttgaaggatctcattattgcctgcttttaataacacctcttagtggccttggatcaccaacatcaccagaagcgtgctcatattcaattccattcaacccatgtggtttcctctttagtactgatggggactgagtaagtatgaaattataatgttgacaataatttcccttgttctttttggcaggcacaatcagggtctgatattcaggttatactgccagcagcatttttcaattagcatttaatactccccgacaaaatgctcaacctttcgctggcactgaacccagtgtttcagtgaaaaattgctcagaagcaaaggccttttctttcattgatctccttgttcccctacagtttctgtacttggaatactctcagctttcagggacactgtagatctcaaaaatgttattttctagtttgtgcttgctttatttgtagtgcttactgctctgattttaaaagttgacaggcattgccttgcaagtcctggaaaaatccattatgaaggtgttaggaatagacattcacacagactcactgtaccatcattaatgcatcctccatgaagagctccatgtttttcacctatcttactgtgattagtgagtcagactctaacagaagccaggactttttgcaaagatgttattaaaatttctaaattttcaaagcttgtattcagaggacaccactcttacgagttattttttctaattcaagtaaactattctgctgagtaaaaaggagtttcatcatatgaagtgtgtgtttagacttagattctgccttagacactttgactataataccagtttaaatgtgaaacattcaacttaaaaatagatttttttttccaaaaaataattggtttttgtcttttttttctatcaaactttttatatgatatagagaagctaatcaatagggagctgagtaaattgtggttaaatgtccttagaattctgttcacatcatcttagtgccaacaaaatgaaattagagtaatccagggcattggaataaatccaagaatgacaacagggactccatgcaatgccttgccttacctctgcagaaatcatgattccaaaagctaagctgggtttcaaagggtaataatat

SEQ ID NO: 62111 - DNA, 1228 bp, Bovine  19866880535493
  misc_feature (1)..(1): n is a, c, g, or t
naggactgtcatcctggtgaggcagagagctcctctccatacaccggggcccagacatcaaggtgcatgtgtgacctcgtggttcctcacatttgattctttgacggatccaaagagccaccaagaaagaaaacgggctcccgtggtgatggagccaagttgggcgaggggtgctcctgcgtccccgaaccatccaaggcagcgtgtgaaagggcgcgctttttaccttccgccctcggggacgtgggttcccacacccattcctaccgggaggaagcagctgcaggcctgacttcatgctgtttggcatgaaggcaacggaatggaaaagagaagcgctggaaccaagtcaggccctcgaggctccgacagcagggctgagatctgtcacatcccttggtcacgtggatgagccgagccccagttaaggatagcattcgctcccctccctccttattctcccttcttactgactgaggagccttggaagatgggtttaacctctccacacctgagcctcctcctctgcaaagccaggaggagaacagctatctcagagaattgttgagaattaaatgtgataagacacgtcaagtggggtagtccacagctgagacccaaccaataaaaggcccaataaatggtcccctggctctccgttctctggggatggtcctctctccttctctgtttcctgggctctctaggacttccctggtggctcacatggtaaagcgtctgcttagaatgcaggagacccagattcaatccctgggtcaggaagatctcctggagaaggaaatggcaacccactccagtattcttgcctggaaaatcccatggatggaggagcctggtgggctacagtccatggggtcacagagagttggacatgatgagcatcttcactttctagggctcattcccccatttcgttctacactgggacccagcgactgccctgacattttgtccctcgccagcacaacacgtgttcacgtcctcacaaagaggagagaaggaagatagaggtcagaaggccttcccaccacaggaggcttccgctgaaatacagcctgaaaactggatggaaggtctctccgtggactcgggtggggtggctggggactccagcccaagcaggcttaaaagaagtgtgcaacaggactgaatcactttgctacacacctgaaactaacatgacatgacagatcaactgcacttcaat

SEQ ID NO: 62112 - DNA, 1257 bp, Bovine  19866880688652
  misc_feature (1)..(1): n is a, c, g, or t
ngggtagaactgagcaaacctggatttatgtggagtactaaagttttgcaaatttcccgattttgatattcattgggtaacttcactgaagtttatttaaagtaatttcaagagtgtcaaattcatattcatgcataactgcaaaagcatattacaaagaagtctatattttgttttttaaactattttccccttgaatttaagatattcatttaaagacctatactttattgaataacaggattttgagggaaatggtacaaggaaaatacacatggtttctaaggtgcctcttgatttcagaattattgaaatgtaaaaaatcaggcttcttagaatcaaggaaatagtgttccactgagaatagacaggtaattatactctttatttttaaccatgaaatacataatagtttcctatattatacttcatttgtttctggcttggtcttctttgacctacttagtctctgggatatatttataacactcttatttttctaggtctgcccttctacctttctgacatatgtaggtccttaagaactgattctgtctattttgtactatgaaaaagtaaaactttattgatggcaatgaacacttattttgcatttagatattaaaacttaacatcttattttaattaatttaaaaaatatgtctgagtgtggcaaattctatgtaaaatacttttcactctaaaattcctgtagtccaaaaattgaagcaaataaattttaacttaattttgtgtctaaagtttgaacaagtcatactgagtcatcagtggagtcatcaaagacctcatattttgccttcttttaagtcttatggatagacaaacaggaaaaatttcattcattattttttactccccaaacttttcctgcatctcatatttttaaaaagttttattgagatatatttcacatatcataaaattacactattcagatttacaacgatttttggtaaatttactgagtgatgagccatcataataaatcagctttaaataattttcataatatcaataaaatcctttatgcctttacagtcaatcttcattccccatccaggcaaccactattctactttctgtctttatagatagatttgctttttctctacattttatataaaagaataatatagtattacatgattttttggtgtctgtcttttacttagcattatgttttcaagattcttctatgtttgagctcatgtcaattattcactaaacagtattctg

SEQ ID NO: 62113 - DNA, 5052 bp, Bovine  19866880714020
  misc_feature (1)..(1): n is a, c, g, or t
naggaggatgtactttgcccaagtgctccaaagcagaagccctagctttgtccttctggaacacacatcacagctggggaaataagcatgcagcaaccagcaatatttccaagttgcacacatagagtccaggttacctgcgcactctaaaggaaacagagttaaagagcttttaaaagagttatgagaaggatctaaacataaatgaccacaatctacattttcacagcacactgtagtttgtgaagtcctttttcttttaaagaatttttttgatgtgaaccatttttaaagtctttattggatttgttacatcattgcttctgttttatgtttcatctttttggctgtgaggcttgtgggattttagctccctgaccagggatcaaacccacatcccctgcattggaaggcaaagtcttaattgctggactgccaggaaagtcccagtttgtgaagttctttaacatgcctccttactggtttctcaaggcaaccggttgtactctggttgtacaagaacttttaatgaacagtcaaggaaacagtgactctcagagggccagtgacttgcttaatctggactcagggatgaagctcagttcagagtcgacaatctagggtcagaatcctgcagtactttcctccatatttgcatgggttggtgaaaggagaagaaagtcaagcaaggaaagaagtaagtatgaggacaagactaaatggggtatgaccatgaccatatgtcctcaggcaagtctccctccaatccagcctagttagatagtgaggccctgccccagccaaaggttccttgaggtttagcatatggttacataggattttagatgagaatgtaaaaaaggcaggggggacaggggtaaatgcacaacgtccagggctaactgtcttcctgtagtgtctgctgaacaaaatgaatggggaaaacacaaacaaggagtagaatttataagtttataaaacataaggagtttataaaacataaggagtagaatttatgttaacttcccatcaatttctcaaaaatattttactatggaacatttcaaaggtatataaaagcagggagagccccattcattttcttttttaaaaatgtatttatttatttatttagctttggctgtgctgggtcttcattgctatgcacaggttttctctagtttcagtgagtggtggctactgttcattgtggcgcttgggtttctcatttctcttattgtgaagcacaggctctaggaagctcggatttcagcagttgcagcttgaggactctagagcacaggctcagtagttgtggtgctcgggtttggttgccccatgccacgtggaatcttcttggaccaaggatcgaacctgtgtcctctgcattggcagctggattcttaaccactggatcaccagggaagccctcatttatattctcacttataatctgatttgtttttgaaaccatttgaagcaacttgaagagattcatacagcaaactataataggatggcaagttagtggatgagaaaaaggaaaatattgatatgaaatgtaaatggtgtcttgaagtaaaattaatatacaaagtgtatgtgggaaggttctaaagtactcttgtactttacaagagtacaatgggaaatttaattctaagtttaaccttcaatgtaaagggtaagaagcaattagctacagattcatgatcacatctcctgagatgcccggctctctctctactaacactagagaacaattcttctgttagctttgcctcatactcactgtcttagcttgagctgctgtagcaaaataccctagactggggtggtttaaatgacagacacgtattcctcacagttctgatggctcacaagttccacgtcaaggtgacagcttggctgggctccagtgcagactctcttcctggcttgcagacggccaccttcttgatgtgtccttggagggtggaaagagagtgattgttctcttttatgttcttttctaagggcactaatcccatcatgaggtttccatccttatgagctctgaaaggcccatctacaaataaccttcacactggaggttacacttcaacatctgaatttgggggtggagggatacgattcagttcatagcaacgatacactggggaatgagattaacggtacgtttgaaaacttcctttgttttattgagctatctcttataatttctcatgtaaaccaatgacatgtttctactggcccagcttactttagtaacagattttaaactttctagtgtaaatttttttaaaacattttgaaggtatgaagtattgttatttatttttagtatcacctccttggtggcacttgaaatgtggattagtgattattaactttcatgtgtcatagaccaatttgagactctggtgaaagctgtcaatgcagacacacattaaactctgtatacaatttcagggaatcacagacctcctgaagtctcagcactctaagagtaaataactctgcaatatacagtaatagataggcctttagacatattatataaatattgtttactgtaactgagcatttgacatggattgagaaccagccagttggatttaatgctcttggcaagcataggaatgcagttattccatgcagcagattaaacaaatgcttcaataacttggagaacaggaaagctgcaggcacatttaacaaaatacaatgctaatatttcaaagttggaggggatgtctgtgttagccagacccaagtcttgtgcccaagattctcaagttccttggggaacatcacaaatctccagctaccaccatttcatggtcccaggagaggacgccccaaacatggacataatcctcaactccctcttcacccccttccccccatcattaccattgctcaactgagaccaggctgtaatgtgagaaactggagctaaacaaggtacaaatataatacagacttacaaagaaaaagctctaagaaactcggtattgaaaaaacatgttagaaatgacaataaatttcacattttaaaaagctgacaaaataccagaaacagcacattagtcagaaaattaaggtcatttaaaaactaactgcctgacagatctctgaaatactttgcccctacatgtttaggtgtgtgttctttggtggcctcgtcacacgatagtgatcttagagtcatttttctctagatagcatagaaagataatccagtctgtctggcataagctgattggaattgttttcatttttactgattgttcaaaaaaaaaaaaaacttcttttgggcttcacagcttattgctgataatgtaaaattttagggtttctctctcctgttttgttcgaccgtgagctttaaaatttggaaggattttccccgaacttgcttcaggtttatttgaaaccctgtttcccttcacttgtcatagacacagagagacctatttacactatgatatgatctctggtcctgagccatcctttgactgtgccaggtgagtcggccagtggaaaatagagtattactggaagttattaccacactgaacagctggcgggaacctaattgtacaaagagagtgcaagcaacatatatattccagcaacaacaaaacaagtatatccctctctgtatgcctgctctctgaactcgtaagtcgcagctcaacctcgtgagagttttttgctcttctctctcccaggcggctcaggggtaaagaattcaccctgcagtgcatgaaacgcaggttcaatctctgggtcaggaagatcctctggagaaggaaatggctacttgctccagtattcttgcctgagaaatcccatggacctggcagtctacatacagtccataggatcacaaagagtcagacatgattctgaactaaacagtgaacagctctccgcctactccaagggctgccgatatatggctgtggccatttttgtaacacctccatagaaccttctaataagtatccttagggttcaggctcaagacagccaagacagaaagaagaggaaaatttttctcctcctgatgatgttggttaaccttaataggaattactcattttctattgaaaggagaagagatgttctttactctttacagaaaggttgctctccatttcctttgctttctttgggcttgcatcattttctttttttttttttcagttgatacagttttcagttggtacagtcagtttcttgtatgaacaaattaaaatgtctcctttattggagatgatataattgactataataactcatgaaatgtttgggaagttagagttaagctgttggcctaaatttagtttgttattaaggtgttctaataacaattagaacaaaccaattctaaaaagacatttgggggacagtttaagagattgttaaatcaaagtggtgtgtatgtgaaatatcatcatcctatgttttctaatatgtcctcaacgttttttctaagaaaatttttctatattttccatagttctctaacacagaaccagttgatcctgaatcgatgtttttcagtgaattttgagagaaacaatctttgctttctgtcattatgtagctttccccttcaaagaacacagaaatattaaacaatgaatatttgatatggcaccaatcattgaaccttataagttattggtcttgttctcaaaagcacttctgtgctttatgtgctggtttcaaatgttgaaaatgtccatgtggacttttacattgttctgcaccctaggacctcctgctcaaaaaccaagataagaaaagaatgctcttcagagcattacggctcattagggtgccgtccaaaatctcatacatgcctgataaagttagtggaatgtcagggcctctgctatgattaaaggatctaaatgtgacttgtcaagtagctcaaatattagctctaatccccatttgcacagagctctgagttgtggctttgtagacacaaagctgtatgtatagaatatcccttgttacagtccaaattttcca

SEQ ID NO: 62114 - DNA, 1144 bp, Bovine  19866880743371
  misc_feature (1)..(1): n is a, c, g, or t
naattttgaatagtagcaggaagtaagcattttatctcagtactttaatagatacagcattatattcatctttttcacagaggcaataatatctgtgaactgatcactttgtagtgaaatacccatagcatggagatagtctagttaaatattctcagctaaatagatatagttccttcactccccagaggcttttctcattacttcattggtcactgaactatttttctgtttatagtcatattcccagaggattacctgaccttggaattaaacacctgacttgcacaggtgggtgtttgaggtgacttttcaaacagtcctgtattctggttggaactttaagcacagaaaataagcataatatcatgttctcagtaagagacaaggtcaccatccttttccaagtcatcaaaagttcagaggtaatacctttaaaacaaaatcacccaactagtaatatctttagcactagaataaagctaatctgtttattccatagccagttgttgctctattggctttctgctttatagaaaagcaaaaaccagagaggagaaaaatgaggaaggaaaataccaagagaagcaataaaagctaaatgattatgctttagatgacagaatttcaagatggttttataatttcttttcatccttcattcttcagaattacagacataaatttggattaatttattatttccacattattatctaacctactctgtcaatgttgtagttgaattaactcaaatcatgagccactctaataaacagaaaattacattggctaagagcaattccatggtattgaactagtgaacttatctgtccttggagaaataatttatattttctgtgccacattttacctacctagcctagaaaatctctaggtttccttctggccctataagcttatgagtccatgaattttctgaggagaaaggataaattttcccttcatgggcaggggattcagttgttatttttattatcataaatgcaaaagaagacagttttcatatttgagaggaagctttgtattgaattacataaagtaaatgttttaaaaataaattcttccattgattcccttcttgcatttttccttctgttgttagctttctttgcaatagatg

SEQ ID NO: 62115 - DNA, 1175 bp, Bovine  19866880761714
  misc_feature (1)..(1): n is a, c, g, or t
naaatgaaatagacaaaattctttaacatatcaatgcaaaaaaaaaatgatgaattcagaatgcctgaatcaagtaaagacattcctaagttccttttcagaaatgagcagaacggaagaatactgacagtaaagaaaagattcctttcagccctcactcaaaactcttctccctgtaattgacactatcagttacttgctgggaaaactcgtgattgttcagaattttgtttgttttctttctagaacttacaggcttagagtaccttctttgctaagaactttttttttttttttaacatctacgcagtagaaaactttctatttgtagctaaatagatagatgcaaaaagacttatatttatataaaagaagacgacagatgtttcctgggagtttgttgtatgttaacttgctgtgaatgtgtgcgttgaagaagtacaagtgttaagaaattgatgtacaaaatgagaacattcttcccacaaacactgcctgagaaaggcagctaccaccagcctttgtttagaaaccaacttttacattacccttaattactcacccctgcacttgtaaattgagggtccctgcagaacacacagtgtttcttaaacttaattaccttttccttcatgagaaacgtcaccacccaaaaaggcagtttcttaaggaggggaacttctaaaacaggccccgtctctccaaataccactcccttgttccccagcacctctgcgtctcactgatacccagaggcattatgtcctggctccaacacgtctcatcagtaagacaggaagttcttcagtggctactgaagagcaaatctttaaacatcctctgcctagtcttgtgggagaaggaggaggttaactagcaatcccaaagggattctgcattgttagctactagaaaaaatcatcttcagaataataaagcttgctgctgctgctaagtcacttcagtcgtgtccgactctgtgcgaccccatagacagcagcccaccaggctcccccgtccctgggattcttcaggcaagaacactggagtgggttgccattgtccttctccaatgtgtgaaagtgaaaagtgaaagtgaagtcccttagtcgtgtctgactcatagcgaactcaggtttgcagtctaccaggctcctccattccacggggttttc

SEQ ID NO: 62116 - DNA, 1062 bp, Bovine  19866880827560
  misc_feature (1)..(1): n is a, c, g, or t
natagcaacccaccaaccaatgaaaccaagacacttgtttaccaacatagcaattgggatgtttaagaaagcaaaatagaaattccaaatcctctaataagttcacagctaaaaacaaatgagatgttagaatcttcagcatatatttagcacattacactgaacactgtaactcactttgaacagtatttatcctcttaagtaaatttgaatctgctgttgtatctctgcatggaaaaaaaatgaaggcacaagggtttgggtttctatggaaacctgtactttgattactgatggatttcaagtgtataatttttcgtcccactggtacaatgttcgggggaaataaagggaaagaagactgcaaaattatcaggaatatttccttagatgctaatattttcagaaccatagattgaaagatgctggaagacacttcaaattaatttttaactttaatcaataaatagttattgagttcctattagatgccaagaactgtcccagtggctattgcagttaataaaagagataaaatttcataaaaaagctttggatataactttaccaagaaacttgagcaataattaggtgtttgagttttgagttatttgaattttgttattttttcttacctgtattcataaacttttaataaatgaattcttgagatagactttgaaaagtatgtgttttcttggaaaataattttttaattaagcaagtagagagtttgtttctgtgttcatcctttgctgaaggggatcctttgttctttttgttggtctcctgacaaaggttttaggacacagtcctcagtggtttcaataacatcatttgcaggtgtgacatgttgagccaggtgcttctaagaaggaatgacaacttagaaaacaatactttttggttcatttacctaatttctatttagcataaaatgtctgatggtttccatggaaaagacaagcaaagaccagtattaacataggatctggtacaaataacacgcaatagctgaaactactacttactagtagcatataaatacatgtttgttcaatt

SEQ ID NO: 62117 - DNA, 1280 bp, Bovine  19866880834501
  misc_feature (1)..(1): n is a, c, g, or t
nttcatattccttgcttgatatcccatgaattgattttgcaatcaaacctctgtgtttagagttacatttaatttcaagtaatgatggttttatttagaagaaataatagatattattaataatacaaatagagtctatagacatctaaacactcgagggccatttttttccattgtcaattatatctatatcatccctaattccttgtcagtaatacttgctttatttttcccaacctaaagtcagcaagtaaaaaaacaggaaactaattttaaaagattaaaattgctcaccaaaggaaagcatattaaaatataaagaattagagaggtgacacggagaaggcaatggcaacccactccagtactcttgcctggcaaatcccatggacggaggagcctggtgggctgcagtccatggggtcactaggcgtccgacacgactgagcaacttcactttcacttttcactttcatgcattggagaaggcaatggcaacccactccagtgttcttgcctagataatcccagggacaggggagcttcgtgggctgccatctctggggtcgcatagagtcggacacgaactgaagcgacttcgccagcagcaaccttgtatttattaattccaaaaatcacttttattcttttatttattttttctgaattaaatgaagaaagaaatgttcttctgccactgaaatccaatatttgagtttggtatttagtgcattagcttttcccttttcattcagtatgttttgtttttccctcttcattctggggtcaatttcttctgtaaatgaaaacattccccgtccatttcatcaccccatctcctacctcctaccacttatccagtgaaagattattgtttcaaaagcagaattttcttttctttggcaccatttgagactgtatcttgttggtttaaatttttattgccttcggacacaaagtaaacttgttaacagaaatgttaaacattcaaagtgtgagactatttgtaagatttttaagatctctgaaaatagtttcaagttttattcagttagaaaagcaaaatattccactgaaagatttggaatattctactaaaaaacaactgagcatctctgtaattcccataatataatttctttgaacacagatctgacttaaaatgattttttagtttgtcatctatgtagtgactaacaagattgtttggagcaacacataaactaatatcaaccttcacattagaaatcagtattaaaattgctttttaaaatgttgga

SEQ ID NO: 62118 - DNA, 986 bp, Bovine  19866880851589
  misc_feature (1)..(1): n is a, c, g, or t
ncttggagagcctagcgaaagtaaagtgaagtgaaagtgagagagtcactcagttctgtctgacttctttgtgaccccatggactatatagccatgtcagactcctctgtccatggaattctccaggcaagaatactggagtgggtagacacattcccgtctccaggggatcttctcgacccagggctcaaacatgagtctcctgaattgcaggcagattctttaccgtctgagtcactgaagtttcaccgattgacatttcagtgtccatattttataagtgggaaagttggaagctgtttactcaaaaaatgttcttccacccttttgtttgtttttgttttattttttgggaaggagacctccttctaaatcctaaatgcctcttcatgtggaacctctgagctatgatgtctacaatcacccaagggtgcttgtgcacattttcttagatcgactttgtgctgtgtgcagggaagatagtaatggacccatggaggaaactgaggctcagaatggtgaagtgacttgtccaaggttgcgaagagttggacacgactgaacgactgaactgaactgaactgaactgaggctctaatctagtctactgcttcttataggatgtttctgcctctggagcatcctattgctttatcagtcagttgtctctactgatttatcatttaggtaaagtttgatttcaagcctaattatcttctgctcctcactgtgtcctagcctgggtcatcccattgagcaagtatccttagcttatattgaatgtttcggaaggcctctccccacctgtgttggaggcttgatgtcagtgcctactgcataggatcagacaccaaacctattttggctcagagggaccgtggactccatttggtctccattgatcactttatggatagggaatggaggtccaaagagcttttgtgatttctcaagtgtgagcagctcgttagaggtaacgctcagtt

SEQ ID NO: 62119 - DNA, 1629 bp, Bovine  19866880859309
  misc_feature (1)..(1): n is a, c, g, or t
ntctccttttctcttttttttaatataaatacttttctaaattctaatttcatattagaaaacactagattattcccttattttaccagattataaaaagagcaaaataacaaaaaaatgattggcaggaaaggcatttggtctctctcccactgtaaacagaagccaagttcattatcttcacctcctttgtcttctgtggcaaaataaaatgaattttgtctgacaatcaagtgtttcccatgcaattgctctccttcctctcaagtgcatattttagttttcttacataaaataacaggactttaatttccttcttctcataaggcacactgtagtctatctcatcaagcctcacaagttccttgccgaggaagatgaaaactatttttatattacagatgataaaaaatgtagagattcttgaaaaacagcacgcaatctttccaaaatgtaaatcgatgcaaaattaggaacaagagttcagttccacgctgtgcaggcctgtgcaattctcgatgagtttcctccaattttaataagcaatcacctagggatcttgttaaaatgtggcttctgattcactccaggacagcaggcactgagatttaaatttttaacgagctcctcggtgatgtcagaatggctggtccctggacattctttgagtagcaaggctgggttgcttcccaacagctagtcacacagaacctgtctcagttcattggaagagaaaggggctgaaattacaatcagaaagttgggactcatccagaaagcagcatctctttctctgagccatagcttaatttaaaaaaaaaaaaaaaatctggcttgctcaaaggaggatccaagaatccttgctctaaagcattagtatctcacacattgaattggtaggaatttgaggtcaatgttagcaaccctttacttctgttagactcgctcagaatgtctgaaggggtcagacataaaacattctccaaacttaggttaataatctaatgatttagactcaagaaagggatgattattttttgtttttttttaacaagatctttcttgttgacatgagcaaaagacaaaacaacacttctaactaatggttactagttccttcctttccaagatgatgccaaatgcatgcactcttctcttgcttcctcccacatactcagcctattgtgtgcttctgatgggacacacacgctccagtaagtctggaacttggttgtcgagaacactgtatgaagattatctctttaaacgctgtactgtcaacttggcctcccccactatcttatttttggcgcttccttgtgctttctagactgtgggctttttattttctgttcagaacataaaagccgactttaggagacaagagggaaattcacacgccatatttcaaatcagaatttgaaaggaaaactttttgaggttggaaaaatctaaatgctctcccaaggaagatagtcattcctaaatatgaaacacttaaaaaagtttacgtagaaaacagtatttcctgtttcatatgcagtgttctaagtacttgagaaaagaaagactattggaagttacttggttaccaagagaagatataactacacagtcatttgggacatt

SEQ ID NO: 62120 - DNA, 700 bp, Bovine  19866880860099
  misc_feature (1)..(1): n is a, c, g, or t
nacttacatcactctgaggacatcagaagatggaaccaaatagccagccaactccttgggttttactatatacatggatttatgactgaaacaaaacttggaaatagcaaatatatccatgccaggataatttaagaaagtgaaaataggagttcaaggattcaagttacccagaaaacaacagtcagatgagctgccttcatttgaggtttatgaactaggaaagaatgcaactcaaccgaagactttcaccaggaaactctggcttccaagatgcaggtctggcaactcctcccctgtcccctcccctgtctgaagttgtgtcagactctgcacaacttctgatgctgtgaaagggcagcctgctatgcccccagcatcctgagtccagcctcaaaggggagaccagagtggggacaggggaaaggacagaagttactgttgtctgaaaccatcgtttggggaagatatttatactgctctaaatcactgaaaaagcactgacatgcgaatcagaatcaaccaaagaactgatggtctacagggatgatgaaaattcagaatgtaataagagctcagcactgcattccccttcccttgcccccaacccccaaaagtatgataaacctgaaagataacaccgagggcaggaaagaaattcaacagtgatggtagacgtctgcagctctgtgtgtgcgta

SEQ ID NO: 62121 - DNA, 1158 bp, Bovine  19866880862034
  misc_feature (1)..(1): n is a, c, g, or t
ncctggcgtgctgcgattctggggtcgcaaagagtcggacatgactgagtgactgatctgatctgatctgatggacacggaggcctggcatgctgcagtccatggggtcgcagagagtcggacacgactgagcaactgaactgaatcagaatgtaacaaataataactgctttgcccacatcagggcagcaactgagttatgagggtgtgacacaggggaagcagtctgcaggaagtttgaagaaagggcatcctttctcggaatgtagtcactgggggatagtgcagagtggtgcctccctggcagctgacctatgaaatctctgttcagtagttttttagagctttctgagtctgcatgtgattcttgggagacccatctgtgagcagctcctcacaaataaatagctgaactttatatcatttttatggttgatggtgaaataaatcataggtctgggaagagtgtgagcttgaaagttggagttcttaaaaatcgtacttcctctggggaggataaatgctgtggttcttttgttgtgctaatgacagcctgtcactgtctgtctgccggagtcgcgctcactgaataaatgctggtaattgctaattacttcaagaaactgactcatagcctgcgagtgacttgcatatcaatgttgcaggtcccttgtgctggttttcctttgagagctgacgtcttgttatcagagtctgcacactgatttcttcaacttcctgtgggttaggattggttcaagtgtgactttttgcagggatatcattaccaggaaatttaacatgtaggcagtggggttaatgttcattgtttctggccatttcagtctgcagatcatgttttttttcattccataaataatggagacaatgaaaagcttttgattaaatctccagtgtgctaggcattaggggctgatgtaagtggctacccacatttgctgggtccatcagtgtctttgacttctcagaaactgtatcagcctaccacagtttgatggctgtgttagacccagctgcctggaggagggcatggccacccactctagtattcttgcctggagaatcccatggacagaggagcctggtgggttacagtccataggatcacagaggggacacaaataagcaactagcgtg

SEQ ID NO: 62122 - DNA, 2363 bp, Bovine  19866880863576
  misc_feature (1)..(1): n is a, c, g, or t
ngtaaacttatctctggggagaaagataataaatatttctgcaagatcgaagtcagttttatctcgttgagagagacacgtgttcttcataggagttaaaaaacgtgaaaacaggtgtgaatggcctgtatttgtgcatccatatgtgtttatgtgtatttatctattatgaattcttaaagatcattgctttcttaatggctattttaaatgtttatggtgaagtgaggatggtcatgccagatgttatatagggggtgattgaggtatgaaatacaggcttatttataccatctgacatatttacatatgctagtaaaactagagaatctggctcatttattcaacatatatttcctgagagttgggcctgatttaccatcttatacaaaacagatgtagttcttgcccctagagaactgccagtgtcttagtcaactgttcaagaataaattgagaaatacgtaatcatgctgtaatatttcataagatagaagtctggactgaacctgtagtgatgtttcactttatattggagtttttcatttgtttttgttttaagctgaactctttgcatccactgtgtttctttcctgggcacaaaaaagaagtaacatgattatcctcctccttgagtcttggtttgcccagaacttattacagcaggtggagcagtgacctcagtgatcagggcattccggttggtagataagactcttccccgtattcacagacaagggttcctgtggttgttggatcttaagtgcgtttaaaactataaggagctgtttgttgctttgatgaccagcatgtgaactgttctatcagaaactgtagggaggatcaccccaacacccctaatcctgaatattcttgcctgagtctcagcgagggggtcacaagagccatggcaagaaaaagagtatgcacatagtaagggcaagagggaactggggctcttaatgtatttggagaagacatgtggggacacatacatattgaaagacaccattaataaagcatattttattaggaatgaaacatgcaaatggtcacagaggacaagcggtgagtgtggaaagcgttgcaaatggggaagctgtattccaggtttaaaagtatagaaggagacagattcatggtggcagtcagggtgggtacaagtagcagactcactgggaataccagtaggccaggctgatctttagactgtttggacttagtagactctgtatttatataggttgttttgcaatgatcccctaatagaatttactaaatgcaaaaaagttaaccagctggtaactttggactcaactaaaattaattttataagtcttagtataagctggcattcagaaagaattaagttgcaggcagtggtccaatttttgctgattttctgtacttagttcagaaaatagacagtttccattggtcactataaaggcccctttgtagtttttgacatcattttcaaatctaacaactgccatacttcaagtgtcttctttgcttgatcttggcaaagatactaatcttggcatgagaaaaaaggtttggttatatcttcacttgtggtgtctgtagtaaacaggagatccagttctactataggataggtgtacagggaaaccagagctagcttttcaaaggtatatttgtatcctttaaactacatatacgaaaaagtctcatttccccttatttagtaggatcatgatatttacttttatttaataggatctttatgtatttgagaagcagctgtgcttgaaaaagtattgctctttcctccagaggaaaaggagaatttaagttgtcttctgtgtgctggcaatagtatgcctcataattcttttgtttgagaggatctttgtaagcaacttaattattgccttccatcctgcagggaagagaatgggggttctgtttacggattcagtaaatgtaaacagccacagcctggtcctaagggttccgagtcccccaattccttcctggaccaggaaagccggagacggagattcaccatcgcggattctgatcagctgcctggctattccgtggaaaccaacattctgccggcaaagatgagagagaaaacgccatcttacggtacgctgcggggtgtttgtcctcttcccctcccccttccttatttgggactgttggatgaatttggcagacttgcagggtaatctgaggaaaacataaacctcaatgaaattccaagtatgagacctttattcatctctccaaagccaaggctggttgagtcatcacaccgcctggcatccaggcccagtggggtgagatcatgtttcggttttaactttcagtgcctgcatttcaacttgcag

SEQ ID NO: 62123 - DNA, 1851 bp, Bovine  19866880891110
  misc_feature (1)..(1): n is a, c, g, or t
nacttctttttagatagaattctaatacaatccaaactttcctctgttatcccacaaaacaccattgtgcattcaaatattagggtgtggcctcaagcagaagatttcaagctttactatgagctccagaataattttggagtaactctaagaaagactggttcactgagtcagggtagggtccacaaatctgaatgttgaataaagcactaaactgaaaactccgaattaaaatatgacttcatccaaatattatcacagttactggtgtgtctaacttgagtagcccattcagtcaagatgactggcccaatgttcttcaccaaatgaatcttgtgtttagtaaaatgatatagataacctttgataaagccttatcaatcagtgagtcttataggagaaagtaagacaacagtgataaagctaatgttatgctgctgctgctgctgctaagtcgcttcagtcatgtccaactctgtgtgaccccatagacggcagcccaacaggctcccccatccctgggattctccaggcaagaacactggagtgggttgccatttccttctccgatgcatgaaagtgaaaagtgaaagtgaagtctctcagtcgtgtctgactcttagcgaccccgtggactgcagcctaccaggctcctccatccatgggattttccaggcaagagtactggagtggggtgccattacctcctgccaactcctcatcgatatggcaagcccattcctaaaccctttggttactatttttaaagcagtttcttgacattttaatcaaagtagtaagtcaagaaatgacatactttgcatttgtattaattatataattaataattatatattaattatatcattataatcaatcatatattaattataataatataatatatattaattatatatattatattaatacaaactatattatccctagctaaactaaaagcggaagcctagtttgtcaaatcaactacatcattcttaaaagttggctctcagtgttttttacaagacatctctggagagccaatttaagatggaaaagtattttaattccatgacaaaagacccaaaatgagaatagctcacaaaattaccatgcttgactacattaatacatattttatgaatggggtcaaagtggctatgcttgcaattctttgacttaaaaggaaaacagtcccagttatgagtgtgtgagtgagagagagagcatgcatgtgcatgatgtaggtgtgcctctatgcatgtgtagtactaaaggatatctaagttgaaaatgaatcccaccattcataagtagcagaaaaaataattatgtttctttaaattgactacagtctgggaaaagaaaatattgtttacttggaaatatgtttattcccacaaaatatttggctactagtaataactgacctgaatagacatttctccaaagaagatatatggatggccaacaggcacatggaaagatgctcaacatcactaattattagaaaactgcaaagtaaaactacaatgaggtatcatttcacataaatcagaatgatcatcaaagtctgcaaacaataaatgctggggaaggcatggagaaaaaggaaccctcctcctacactgttggtgagaatgtaaattggtacagccactatggagaatagtatgagtttcctttaaaaaactaaaagtagagttatcatacaagcctgcaatcccactcctgggcacatattcagacaaaactctaattcaaaatatacacggcactccaatgtttattgcagcactatttatagtaacataaaacatgcaagtaatctaaatgtacattaagaga

SEQ ID NO: 62124 - DNA, 1121 bp, Bovine  19866880990542
  misc_feature (1)..(1): n is a, c, g, or t
nagaaggaaatggcaacccactccaggactcttgcctggagaatcccatggacggaggagctgggcaggctacagtccatggggtcgcaaaagaggtcggacacgactgagcagcttcactttcactaagctaaatttaatccatatctgggatttttatgtctcttctctataaagttacatgaaattccaaagtattttctatgttttagtgtgttttactaattctacataaaattcacgtgattctgaatcccaggaagggaaaaaccaaatatacataatattgtaaaaaattaaagtctgtaattcatttctgaaacttttccattaaaataaattttaaaaccacttgtgacctttgaagattattattggccatctaccaaattagtattttaaatggcaatacaagggaaattgattttgttgttttttaaatcaggaacttaagcacttctcaaatttcctagagggaaaacacagtatttgaaatctccttactaagaaagttcataatcttctcagtggcaatcctcacactggctgtgaaaatccaataatcaatgttacagtcagtaaagtttgcttgaaaggactaaaaagagagaaattaggaaaaaataataaatgaatataacacaatctttgccagatagcaatttcaaggttaaaacataactcagctcatttctcttatcctgaaaagtttattgctaactttttgctaactcacatgttagaaagtggtctattctgaaaatcaataactttggtattgaacacttttggtaacatagcacttctcattttacaaaaggcattattataaactgacttatttaatgacagaacctgatttcagtagcagatattattcccatgattcctgcacagaaagaacatctgctatctggttaagtgaacccacagcttagatagacttaaatgactcaagttgactttgatttatgaatttacaaatgcacttaattgatagtgtcaactacaaattggcacttgccacctacctctacaaggattaaatcatgtgctactgcagctgctgattttcaacaccctctggaagagttcagggggtggaaagcagaaatgaggca

SEQ ID NO: 62125 - DNA, 1596 bp, Bovine  19866881084869
  misc_feature (1)..(1): n is a, c, g, or t
nacagcctctaaatcacaagcagtatcacagaggtgaaccagacacttaaaagtcttttgaggagaggtgctgtaccagttccagccatatgtaaatttatggacatatacctctttgtatgatattccaattgaaagataatattttgatgaagtccacagaagattgagtgagtaatttaggtgcagaagggggccacccaatagtcattctgtgttgcaaagctgccgtgtctaaatgaagtttgaggatggatctcctcttcggtctaatatttgatatttgattggggttttccaattggcttcaccatccaattttttttttgagggggggagtatagttatatataagagaaatagagtcctagaaatgtggagtgactgcctacctagggttttgtaatatgtcacaaaaatggaagcccccaaaactagattttaacaactcataggaaatggactgaggtggatcagtcattcctctagcacccagagctgctgtctcagtgaacaagaaaacgatctcgtttctatgtgttgtgagacaggaagccttctctacatcttcacccttgcacacatcaccacagaccacagagaaaacgaagaagaaatggattctacattttgaataatacttctgtttctcgtgctgtgagaagacttcgctgccctgttttgatatttctttaccttgaatccaaaaggggacgcctgccccagggagatgatgaacatctcatcataaagcccaggattttattccaccatgtcctttaatgtccttgcatgatgcggatgtgactttttgcactgcatgatgtttgggggcaaatgttaatgtcaaaacgataccttcaatctcattgtactctcatctcccctcttggaacaaactgaaaaaaaagaggcatgactcatttctcctactttctgtgtttgaggatgacttttcagataaaaataaaaacagaagaaaatatgtctagtaaaatgacatgggaaacagtggaaatgttctgttcctgttcgttttctgccctgcaatgttgcttggtcaaaataaaagttccctgggaagtattgcgtggctgggcttttatcgtctacaaagattagggcgccctctggtggcatcttcaaaataattgcttctagacgatttttaaataaaagaattttattgagaaatctatttcaacaataactcaggtggccttctccagtggtcttcagctgacaggttttctcaatgcagatatatttatacttttcaaaattgttgatgcaaacaatttaactcgtcattgttatgtacccacatcttgtttagagaatcttaaaaatctgcagattacaaaaattacaaccagtagcacataagctccttaaaacacataagatatgttcgtgaaaaagggacaatgaaaatattgaagtagcatcataaatcgcctttattctgatccactgatgaaaggaggttagtttgtgttgaacttaacacctccttgactgctgtatacacaaagtgttttattttttttcctccctccctccaaattttcactttacatgcctgagtctcatcct

SEQ ID NO: 62126 - DNA, 1408 bp, Bovine  19866881104405
  misc_feature (1)..(1): n is a, c, g, or t
natatcatccaagggtttgcaagtctccccatccctgcaacccaaaagtatgctggagcatgtaagaaatactgtcccctactcccgattacagttttagtttggtgcagttgatcactgaaaccttaacagtacatactacgaacatttcagatgcaagcccagatgaatcacactggctctaccagaagcggctgcatgggtattcatttctgaggtcctgaactctggaaggacacgcagattatacttaaaactaatgggacttgattatggtagggtgaagaacaacaaatggggacccacctctgcagggtgtggctgcccttcctcctgctctgcattgttctgggtggtgggatgtggccacatcattcccagggttaaacatatacccagttctgggaaagcttccatcttcaacagtccacagtgatcattcagtggaatgtggttttaaaaataatttaacaaggtaaaattttagtttttaatagttaccacttaaaaatcccagccagtttttctgcttctatcctccctgcctgcttccctttgatttctgagtatggggatctcttcgaagatctttacagcttttactgtaatcaatttcacatcgttcactatatgttttagcaattggaagttctgtaatatcaattctttttgcatcactgaaggtgttcctgtttctccttcgtcttaaaaaaaaaaagccttagaatggatattgcaaaagtattttattagctgctgtatagcactggaactctgctcaatatttcgtaataacctaaatgggaaaagaatttgaaaacagatacttgcgtatgcaaaactgaatcactttgttgaacacctgaaactaataagacattgttaatcacttacacttcaatataaaataaaaattaaaaaagcattttattaaggtagcatgtatatagatacctttttcctattttctgttttaaaactagttaccttgagatagtatgtaatgttccagttctgctatagaaattccagcttctaaaatcatgttataacgaatcaaggagaaaaggaacatttatgaccattatgactaatgacaaaagaaaagaaaagtacaaatgcctagaagcaaccatagaaattcagggagaacgcaaaggaactaaggaaaagctctctcattaaaagtagctgtggtaggcttcctggaagtggtaaatgcagtgaaatcaatcttttgtaatgacataattgtcatcagaatatctgaaaacagtcttatgggttaaggaaggtaattgggcttcccaggtggctcagccgtaacgaatctgcctacagtgcaggagatgtgagttcaacccctgggtcaggaagatcctctggagaaggaaatggcaatccactc

SEQ ID NO: 62127 - DNA, 1424 bp, Bovine  19866881178901
  misc_feature (1)..(1): n is a, c, g, or t
natgaggggtgttcagaaatgactgcctttaatgtttgtcaagtctaagtctcacttgtggctctgtttctaaacgttggagtaatgagttaatatgtttgtgactcactctagggtatgtacatcaaatcgacctatgatggattgcacgtgattactggaaccacagaaaatgtaagtgcatatccatttaatgcaaaagctattgtaccttcaagcagatttgacagcgtccctattcctttcatttaactatgtgtatgttgttctattatctgtaagggagtgtgggcgcctgttttgtttatttctgttgctagtgtgctgctcatcaccagctgtcatcaatgtattatttaaattgtcctttattgctctcattcacacactttgcccagcttttgccatcctgtgttattttttttgcgctcttggaagtgttaacccataaatacaaaagcagtgatctctttgttgttgagaatcactcttataagagctggaattggtgaccatatgtgttaaatatagtgtttttttttttaaagtggaatttatatgtgtcaccaaagcaactattttcgggtttttgcatgacgaagtttctttttatagagctgtatttcataatacttgcatgatactgaaatttagtttttccccccttaatcatttgaatagaaaaagcagggccatttctgttgtgaggaacttgtactctgttatcatcctttagaaaattctgctacataaaaggttttcccttagttcctcaaacattttgaatttgtgaaaagtagagctaattgaatgctttctttatgccacctacaatacagctagcttttgaatgacattgatacagagcttgaaatgtcagaaaaacttctctgcatctgtgtaaaaatagcatgtgtctatggaattaattgctatttaatcaaataagacaagaggatgtaattcaagacacaagaaacttggtgactacttttgttcatcgttgttgttttagtcgctgagtcatgtcggactcttgtcgaccccatggactatagccctctaggctcctctgtccaaggaattctccaggcaagaatgttggagtgggttgcagattccttcgccaggggatcttcctgacctagggattgaacctgggtctcctcactggtgggcagattctttaccactgagccaccagggaaatacttttctgatctgatggaaatatgtgtcgaagtttgagcttcagctgctaggtctgttgataaaataaaatggcatgatctttgatgagagtttgtgacacatttgatttttataataagaaagaaagtggcactgtaaggcattcaatgaattacaaataagttgtgtggttctggcagacaagtgagggaagctggtagtgtctttaagca

SEQ ID NO: 62128 - DNA, 857 bp, Bovine  19866881260208
  misc_feature (1)..(1): n is a, c, g, or t
ntctgactctctatgaccccatggactctcctttctggattttataggcaagcatactggagtggttgccatttctttctccaggggatctttccaacccagggatcaaacccgggtctcctgcattgcagacagactctttactatctgagccatcagggaagcccaccaattttaaaggccatctattcctggtggaatatccatgagctgaaggaaggcagtgtgtcctccgctgggctttgtattctagtgaacaagaaataaaaccattacattaagctaaaaaagaagtgacagggatgttggaatgatatgcatgaaacacctaatattgggggaaacagaattctagattaggatctcttcttcaatgtgctgaagtcattaatcttgcgtagacaaaaaggctgcggcaacacagacttctagaagatttatggatttctaattggaatgtctctatatctatatgattatgtgcaaaatacatagagcttggtttatataatgaagtgtccctcggtcacagtgatcataatttcctcctttcctccctccctccttgtactgacctcaacccctgagttcctggtccacttctaatagattctaatgctggactttaaaaagctctgtaatttttatgtcatccctggtaggtacacccagtcctaaaagctgcatacctgatggttagtcctatccaccgtattggctgtggaggggtggtctctggtgttctgacgaattcgagtggagttttgctgctcaatggtggaggaagttgggatacagaactctctgaagcatcgtttgaagttttcatccagaaatgcataaaggacggggttcag

SEQ ID NO: 62129 - DNA, 1100 bp, Bovine  19866881328398
  misc_feature (1)..(1): n is a, c, g, or t
ntcattctcccttactggtggtgtttcatttgaattattacttttacttgtggaagctctagtagtgtgtatatgtatataatgtacatccaacaaacggcatttattcaccactctaaacttttcaaggccccgattttagttattttgatctgaaaatctaaaaaataaaaaataatgcatatccatactgggacattatatttgagaaatggagattattggaggcaaacagaagacttcatagaaggaaacactaaaacactcatcttgcatcctttttttttttttttctcatccaacagtttcatgggcgatatccacatatggccatataactacagccaataggatctgagacagtaaattcatttagtccaatctgtgacagctgtctttctgaaacattgcccttaggtagctggtgcatatttgtgccttgttagattccagaatgaagacagattgtaagattgagactattgacagccatggactcaggaatattcttacaagggaagttggaaccctgttttctaccgtgtcttcacagaaaactatgatgtatttgattcgtttaatcagtgcagtcaatagttcaaagtggagagctttttggcatggaccatctaactcgattgtctgtatagattaaataaaatgtgtggactgccaaatctctaactgtatttcatgccaaagagaacctgtcaaaaagaagaattgtcttagagaagctacttagaagactgacattttacaaaggaaatcttgacatttagcaaagatcaaaaagaccaacatattggtgatgacattatagaaacataatcttcaggaaaatattctcgggtcattgttaatatatcatgtccaaggaactacacagaagtgaaaagtagatcacccatttttctccacggtcttttgagtctttcaagtttgagattaagcttactggctccatattttcttaaagagtttaaacttttgaaaatcaacaaaaaacagctgtcattttgttgtgttgattcaaaaggtgtaagtattatgagaaagagtttaaaaaaaaagagagaggaagtttgatgtaaagagca

SEQ ID NO: 62130 - DNA, 1650 bp, Bovine  19866881439220
  misc_feature (1)..(1): n is a, c, g, or t
nccacaatcagagacaaaatccttgacagactgagccagacaggcgactcgagaagcaaatttaatacttccctgggcactctacatgtgatgaaacaaatgttgaataattgtaacttttctaaagcctgaatacaggtgagatacttctttcaacattgccacatcaccagctactgtgccataaaaactcacatactgtttggaaaacacttgtttctggtctctcaccatactgaatgcccctccaacacacgtttcagtcaagaaccactgcccagcacagtacttggcaaaaataaaaaggtgttaaataaatgcatgtttgactcagtgttgacagagggttttatgatgaaagaagttaatttgaaaatataaatgtagctatgaaaattaaaaacatgctataatgcttgatattctagttcatacgtaaagtccaatataagtatttaagctagaagaaatgtgaaatatatgactttgatcatagagtgttaaacatgaaatgttatcaaagtttgtctctacctgttaaacttatggtgatttgtattttactttttatattcctcagattctaaaaaaaaaatgaatgtacaatggtataaggaaaaatacaaaaaacaaaaataaaagaggagaaattttcaaaagtaatagataatcctgaaaagtgataaaatactgcattaaagagctttttcaccaaaagataattcaagatcatgtttgcagtttccctatttaaaatgctgttacatacattaatctgtgactaaaaaggttgttagccccaagtgattttagtcccagttgaaagataattctatattgatttaatagctcttggtgcactacaagcctaaaatttcaaattttaaaaattaatgggacttatctgctttgccaaataactagtctattcatgatttatattttctcctaacaagtgctgttgaattctctacaggggaaggaaaaataccaaaaatctctctgcctgaaaatactttttaaaagatgtcaacacattgttttttgtttccaataaaaatcccaggtcaatatgatagttaaattataaaggattatatactttttgggtggaaaacagttattataaatacacagttttacataagccaagatctccaggcactaattgcattaccttcatatttccttcaattggtcctaaaagattttggacagctactgttgcagaaattaattgaatgccaaaatatttagatatcagcaggtgctatgacacattaaaggggataaacagggaatgctcatcaacagttctgacaaatggaattttaaattgagtcttcacagatcttaattaaatctctggtgcaaaactcaggagcaatgagaacgttcttatttcaacttcctacacagtatcctaatgtataattctctccaacatgttgtgctaatattaaacgcagtaaatggttctatctacaggacacatacacacactgccagtaaaaaaattcaaactatccaggcattatacttgcatagcaacaagcacccaaatatttcaagtatacaacattaagctttttttatccttgacaactgttctaaagctcaattccctttaaaataaggataagggcttcc

SEQ ID NO: 62131 - DNA, 1134 bp, Bovine  19866881560216
  misc_feature (1)..(1): n is a, c, g, or t
naccaagcttctagtataactgtatacttcacataccacagtcagggaaaattttattctatgataaactaaaaaagagggcataatcctgattgcttcttattcttataatacaatttcaatgttttccttcaactagatgtcctaaacaaagataatttcatcattaattcttgatatagccataatttttaaatatatgataatttaaaaaaattattttttgccaacataagcaaatgtaatgtacactgttaattttacatttttctttgttgtgttttatatttgacagatattttcttatgaaatctgactcactttttctaagtacacttgtttctgagtcttctttggcagtcattcttacaggttctattaagctatagtccacaattaaacacaataaaaatgtgtagtttggtggcataccttgtctggacctgaacaagctaagcccttggctcagttttgcttgtcccttcatgtatggtgactgaggtatttggctctaatcagtaattctgttttatgatcaagtctgtttctggtgacagtagtggtgaaatctgactttaaattatacagctgacatgtggtagatatcaaaaattaggtctctcaggaagaagctgacaagaagtccgaaatctatttccctattagtctttatttgtgtatttgtgtttatcttaaaattctaatatttttgacatatgacaaccaagaattaaaatgtttttgttatttttccaaccattggtagaatcttctctgattatgtgatttgtgtttctacctatctaaacttgtctatcaagaacagcttttgaacaaaaataaactaaatttctaacttttaatgatcaacttttgttgattgccatgtaaacactttcaataataagatgattccaaattagtgtctcttcaggaccctttaaatgaggctaaagaaagaatattgctacagattaaaaaaaaaaaaaactttaaaaatgtaagagctttttctgctaaattcaaaagaaaaccacaatattacttagaatttcaacaaatgaagcttctttaaaagatctaatgggctcaatttatgtctttgtgtctttaaatgtttatattcttaagagg

SEQ ID NO: 62132 - DNA, 1333 bp, Bovine  19866880526631
  misc_feature (1)..(1): n is a, c, g, or t
nagaaggcgatggcaccccactccagtactcttgcctggaaaatcccatggacagaggagcctggtgggctgcagtccatggggtcgcacagagtcagacacgactgagcgacttcactttcacttttcacttttatgcactggagaaggaaatggccacccactccagtgttcttgcctggagaatcccagggacgggggagcctggtgggctgccgtctatggggtcgcacagagtcggacatgactgaagcgacttaacagcagcagcagcagtgctcatataatacttatgtaatcaaaatatatattttttttttgaaaatatgtaccatgaggtactttagttattttcagtattcatccccaaaatatttttaaaatgtaagtaggacacacacatagaaggaaaaggttatatatcagcagaacaaaagaaaaagattagtatccataataaaaatcttagcttgtctactttaggtgcaaataatcacaagtgtgattggctctccaggtggtgctagtggtaaagaatctgcctaccaatgcaggttagaagaaagagacacgggttcgatccctgggtcgtgaagatctcccgggggagggcatggcaacccaccccagtaatcttgcctggagaatcccatggacagaggagcctggcgggctacagtccacaaggtcgcacagaatcagacacaactgaagtgacttagcatgcacacacgatctgtgctataacagatgaggttacatgaaagcacaacattataaaaattattttttgaaatggcagagatttctgtagctgtattgagcacgtagaggggaacaattgtcttcaggagaccagacacctgtaaacaataggaatctacagcagcttttgttatctttctgtcttttgttgctcagaagaaaatgactgagaggaacactgcctacatgaagtacttactatagggcaggaactatgcaaaaataagactatgcgtggagatctggaacagataatttgttcccaaatgaaaagcagacagaagacacagtggaagcagagagaaaccagtaaagctggaaaaagagaaaagtcacaaggggacccatttaaccctaatttctgtggttttcctgatgaagatgtggtgctaatggtttcagagttaatcagagaaccgtgtgtcttaaatctcggctctaagccagatgaaaaaagacatcccacttaagtggtgttttaggggcacaaaggctgaaagaaaaaaaaaaaagatttgcatagtaatgattctatcttcgctttaaagctccacggcatttttagagt

SEQ ID NO: 62133 - DNA, 1426 bp, Bovine  19866880619393
  misc_feature (1)..(1): n is a, c, g, or t
nggtccgaaaaaatctgtataataataagctggaaatgtttcccttatcttttgagaagattcacaattttttagactctcagtgtcttcatattgaccctaaatccacttggttttctctatggtgagtacctagcaattaaaaggagcccaagtatctactgtaaagatagtgagaaatttcttagttttgaggttgatgggttccaaaagtacatccccaagaatgtataggacttttcttttttctttttcttcttaatattaaacctcatgaagaaacgagacagtctcttgagaagatggagctttttgtttttataatcaagatttcagttgtagtgttggaggcacttttactaagattaattaagctatttgcagagttagctatcggagaggattgtattggttccttattcagcatccatgttcttccttcttttctatcaaagtgcaattttgtgaaagtattatccggataccatggagctacatgtttggggataactgatgcctccccagctccaacagtgagtctagtccactgaagggtaatcccattcctttggccagtggtgactcagaaatgagatatagaagctcccaggggagcctcttggacacattttcttactcctaggagagatccacaggacagaaaagtctgtcatctgtaatttgaggacgcaagctccgaaactgccaaaatcatcttgcaaccagcttgagaataaagccaacaacagtggagagatggagtgaactgataatatcattagccactgacttaaccaatctcacaaccctcctgacttctgggccttttaatatgtgaactaatttctattctgtagtattctgcctagtctggtttgagatctctgtcactaataattgaaaacatccttctttttttttttatcttcacaccaaataaagttgagaaggacaaggcctggggagcacacatctctacataacttgctctttgaatcctcaagaggatcacagtgcagctcgaatacataacgatcttattaaagctatagaaactcagtttggtgacactgaaataaccaagcacagtgattctcatctgcttgatgaatagatgaatttcttgaatgttaacaaagttttcccccaaaagatattatttaaaaaataaattttcacattacactgataaatctgagaaccaagcagctttttaaaacattgatttatttacttttattttccattttacgtactttgtgtggctcctgatgagtggccctagattattcatgactgcttctactgtgcggaggtatattttaagaaaaacaagtcaccagccactctttctgcactttgaacacacacatcgctagagtggatacgttcaaatggaaaaattagaactcacgtgcagttcagg

SEQ ID NO: 62134 - DNA, 1967 bp, Bovine  19866880368384
  misc_feature (1)..(1): n is a, c, g, or t
nttctagcagggaagagatgaatcatctctgtgatccggcctaattcacatgtgaggtctgtcattaaagaagtagaatagacattaatcatcaacactggcatgccagtgaagacttaaaatcagcatttcttcatgtgtcgattttactgtaagaaatatttgtccaggagctgtaattaatgaaactctctgcaggtttaaggtgctcataatatccttccaatttttgagaaattgcaggtttctttaacataggaatcaacagtcattcacacccagagccaatgctaatttcagaggcaaagatagcctaaggttaatgtctccaatctgttttgttcatctgcttcaacttaaatcttaactacaacctgagagtagaaaggagaaaaaagagaataaggaagagagataaggaaagagggagaaaggaaggtgaggaaggaggaggggatggagggagatggacacatccaagtacctcagtttgtttatccttgtgtttccctaagaaaaagtgatctaggaaccaaaccaaagtgaactctgagtctttggcttctgtaaggaaatcagaatgctcacatgttgtcgagttgaattgacatcttttctagagtcagattccaaattatggaaaagaaattttaaataaacttgagaaaaataaattagcatgttagtcagattagatatttttggtaagtggaaataacaaccatggatgcacttatttcagaacaatttttaggatgaaatgttgagcttccattataatctctatctgtttatatccccaccactttctaacattttccccactcccaatcaccatgcacccttctccttcctttttacaaacatccatagaaaaggttagctctcaaccaaagctgagaaaataaatatctactttgaccccttccatcttcctttctggtcacacctcttgggcctgtttggctgtccttggcagggcccagtcatgactgaggccatcagggcaaacttgaagtccaaaaaataaggctccttccctgattcatcagagctgtcctttcttttatagactgataccatttacagggaaaaaaaagtactgagaaattatttcctgctaaggtatacgtaactattgatacgtcatgtactaccttactccatctgctatttatcagaagaatgtatattttttaaaagctgtaaagaaaagtaaagcaatgaaagcaaatctcaaatatcaaatatggaataccagagactgtggaattgagtggaaaattacatatatatatatgtgtgtatatgcatgctaagtcgcttcagttctgtacagctctttgcaatcctatggattgtaacccaccaggttccactgtccatgggactctccaggcaagaatactggagtgggtagccacttcctcctccagaggatattcccgaccctgggatccaacccactggcaggtgggttctttaccactagtgccacctagtaagccccatatacatataatatataatacatagggagagtacagatgctgtcagctaatgtgatatagaaaatgctaattcattgagtgcccactgcttcaggaccaacctgggtcaacccccaaataaacggtagtgagtaaagcagaaatacttttcatcctaagcagcacagtttttcaagagcaaaacctatatcaatattattagataaatgtaattttctttctataaatgataagaacagtgttttgaagaatagttgctagagctgctgcaccagatccttgctcaaaattcccaaccctaacttttagcagaagtcaatataaatctttaagtctttaatggtccagagataagaaatgaagttatagggagagacaaacaaacaaaatacagatggaaccacctgggaccaagagggtgaggaatctgacctccaacagaccccaagtctcatt

SEQ ID NO: 62135 - DNA, 868 bp, Bovine  19866880381794
  misc_feature (1)..(1): n is a, c, g, or t
nttttgcacatagtataatccccagtgctttgtacacggcagatctcaataaattttggttgactgagtgggggcaaaggtaacagaagaagttaaggggatttatgttaacatggttcccatagattagtttatataataacatgagaggctgtttagcacaggaatttcctgtctttagcttttccatatgctgtagattgagcaagtcatttttactgacttcagtttgcatgtctattattagcctttcttaactggagctcctcatatgaactacagaacacagaaaataatttcagtgactattttcttgattcttcccgggatgatatataagtagtgtcattcttaatacatagggggaaaatattggttgaatgaatcatttcataggagtaaaagaagatgggaatgaagaaatatgaaagcaccttgaagttggaaatgggtgaggtcggtccagaccaagagaaaaagcattagcaaagatgggaaagtaaccgggggtaagtaggctggatgcatgcagaatgggcacaaagacttcaatgaagacatttggaggagagtgtgaaagccagtgtgaagagtctctatactaacgtgaaaaactgtactgagctgtatctgccatagcagaattagaccatgctgacaggctctgctgcagctcagtgcttggatgcaagtctcagatctcatttagcagtttgggtgaccttaggcaatttccctaacctccctgtacttcatcacctctttgtactttgtaacatgggggatagtatcaccacctgtctgtattatcattagattcaactgctagtagcaaagtagcaataacaaaataatactaaacaagata

SEQ ID NO: 62136 - DNA, 1142 bp, Bovine  19866880441406
  misc_feature (1)..(1): n is a, c, g, or t
ntctgaccagtgtcattttgattgctttaagtacggttagttttcagttccaaggtcactttgttcccgtttccttgaggccagttctcaggattgtgtgagacggaacagtttatatcatggctacagttttatcattatgtagtttacttcttccacctgctgggggtttcagtatctgtaagacagccacaggagatggctcagggctattgtctatatagcccttgagaaggaaccaaagggcctcgattttgcttgataactaaactgtcattatttcgtcctgtttgactcttttcttttgcttctacattttctcacttctcaggttaaacttattctttgactgaagtttttttacagacaaaaggcaggtggaggacatggggggaagggccatagagtcctgctccatttcacaggctataaaaatgttaaccagtaggggtcccctcaaatcacacccaaggaaatcactgcaagatagatctacactaaaggccttgcacaagggggaaaaaaaaaatgtttttccatatcttagaatgaggtcccaataacatccctgacttccaccttgagtcataatgcatcatttggtagaatagaaaggcagatcccagaagtggaggtgctttgctacaggaacattagctggtattgtcagaaataatggcccagtcacagggtgatgagttgagccagttatttctgacacattaagtgtttgatttccatgcctcctttattctaagatgcatgattcatgttaccaaacacagagctggactcctgactcctctccctttgaaggctatgctaatttgatactttcttaccagacgctccgcaccaacgtgggttactgagaatgctgatgatttatttctcaggaaagctctgaaaaggaggacagtcgcccatctgtctgagaatttttcagggcaaagtcctgtcggcagtctcaaggataaatggactgacctgtaaagggccccatcgtccacagccactgattgatgggaacaggctgaactgggagagaggaatttgaaaagtttcatttagactgtgactcgaaggcagggaaccgctgtatggaaggcttcagggtttgtttgtttgttttttttcccagt

SEQ ID NO: 62137 - DNA, 1096 bp, Bovine  19866880746624
  misc_feature (1)..(1): n is a, c, g, or t
nttctttccagccagttccctaccctttctgtgtctcatttcctcatggaaaaagaaacactagtctttccatcatactgatgttgtgggaattaagtgagataatataggtaagacacttggaggttctgaacctcgaggtggttgattgcaaaaacccctgtcagacacatactaaattctcagtcgatatcgcctattattgtaggtgagaagagggtttccttcatgtgtttggcgaaaatttttcactctgatgtcaggaaaatatcttctgtggacacaatagatgagattttgtactttccttcaaatcattttaaagagctgtgtccttgagaggctcatcagtctgagaagatgaagagatgttttagtaccaattctcaatgttcatagatatattttggctataaatggttgaaatatatcataatgaacaaaagtatcggtatttgtcctcaaggtttttatgttcagtgtattcaaagcttcaaaaatatgtttttatttgctgaacatagctacaaaatataactccaagtagttagagcaaatgattacatttacctgaaatagttcagttcctattgaccactaattgtcatataacagaggaactttggaattagttttcaaatttgcacagaggagggcaaacatttttatctttatttgttttcagtgtcactgaatgacagctgtcacagcaaggctgaaggcctcttgtcaattagcaggcagagttttggttggcaccatggggtacagaataatggggggacttttaaaaattaaagtacacctgtaaccacacattcagagaaggcaatggcaccccactccagtacccttgcctggaaaatcccatggatggaggagcctggtgggctgcagtccatggggtcactaagagtcggatatgactgagagacttcactttcacttttcacttgcatgcattggagaaggcaatggcaacccactccagtgttcttgccttgagaatcccatggatggaggagcctggtgggcctgcagtccatggggtcgctaagagtcggacacgactgagagacttcactttcacttttca

SEQ ID NO: 62138 - DNA, 1407 bp, Bovine  19866880761602
  misc_feature (1)..(1): n is a, c, g, or t
ntgtgtttagtgcctataaaaacaaaaactgaaggataagaccccctccagacagcgtaaccttgaagatgcgtatctaggttattcgtagcctaagagaaaacatacactaatcaccccttcctccagacaggccataaatttttccatatcaatctgagtgtaacctcaggtttactgattattggctaattgtttgactgtttgagcacatgagcacatagcacgtgaaatgatggggttattgggattgtattttccttggtttatgtaagtctcaaggaatttggagtggtgggttcagatacgtacacatggagtataaaagctgttcacaaatgctggtcggggtccttggctaagaggagactctgccttgggcccgccagtgtaataaactgcactccactatctgcattgtccttctgagtgagtttgtttcccggaatgcgtggctacaagagtttctcttaaaggaaactggatctaaaggatgtattataaactgagaaaacagttaactttaatattgagattgggtttctctttaataaagatgttgattccacagaaatgaagacccaggtaagtaaataataatggaatgaagttaagaactacaaggatgctatcctggaaggtgtggggaccagtggagtagacatttggctccatgtgctctgtgtgttgtgtgactctgaggtcccctatgttggtttcatctgtgttgaatgactctgcagtcacgtgtgctggtttcatctgcttgggatgatggatgatttccctttcaacttcagcattctcaaatcctaagttttacacattatcggtttctgagtttgtattcaaaatttgtgcgtaggaaatatgttttatagtagatgggtgatagataatgcttgcaatcaatcacaattttgtgaatgatatttacccatttttgtattatggtcaggcactacatatatacatgccactgattaaataaagaggattctagtcctaggtgagttcttgcgagcttgaattttcaatgatctgtaaaagtatgcaaattggtcctcatttttccctgaacaaggattaaattagtatgtattgtaaataacacctcacagagcaaaaccaggctgaacaaatagcaacatttggaaatagaagcaagagatgatgaaatgaaatgcagcatgaaaaaatgctcagaaactctaccaaaaagaacataaaacagcaaatcagcaatttttataatgcattaaggaaatgaaaggaaatcgtgagaccatttgtgcattttggcccaaagaatagaaattgttgagttcctctaagcctggtcttatagtatttagtataaatacttacagtataaagtgtgtgggaccagattaaagagacataggt

SEQ ID NO: 62139 - DNA, 1763 bp, Bovine  19866880903431
  misc_feature (1)..(1): n is a, c, g, or t
nactatatggagtggggatttgaacccagataaagtagtgcttctttttgctcactatagtatattaaaatgtgctggtaatattcactcctcctttctccaaaatgtggctaggcctttgtttgtgtggataattaattacattcatttgtcttgtctcaaagcagaagtgcccaaacttctgataatcctctctgggcttttttttcaaaacctcgaaagctatatatatatatctggtcccctagacttgaggatacaagagtgcatgtgctgtactaggacataccaaactccccaggcaaaagtggggacaccaactttcccctgtagggcgcccagaaccttgcttatgtgtgaagaacatagatagacataaatagatagatagatagtagatagataggcatacagctagtttgtagataggtagataggaagaaaatatattgtagattgataaggaggaaggaatgaagaaaaaagaaagatgtacataggtaatatactatagttagatacatacatatacacatacatagattgcagacagaagatagctatctagatagatggatggattatagagagataagcggtaggtagatagatatagataggtaggtagatagactgtagataggctgtatatacttagtaaatagactatatatagataaatacgtagtagataggttgtagatagatagtagattgtaggtgggtaggtagatagataatagttggacgttttttaaacttctgcactagctcagaaggcagtgcggaaatggggggaaatcctttaggtgaaagggtcaattactctgcctataattcagcaccttgaaaagatggtagaacttctgagaacaagatttcatggcagaaggactgggcatgaggagaaaaagctcctagcctcatgaagagtcttcttgtgcaagtttgtacactagcaaaagtgtgcaatgttgtcaacttcaaggaatcacctaggtccggatataatacattcctgctgaccattatggatagaccagaaaatctgaaccaaatattgtgaaacatggcaggacctaagttttctgaaataattcccaagaagataggagctcttcaaaacaaaaagacattacattttttttaaactattttgacaaataagaaattggagtgagatttaatttgatttggaagaaataaagtaaatgaaagactcttggatataagtaaattaaaaccttttcagtgagaacatataatcttgaaaatctgcaatttaaacacttggtacaatattatcttgagtatctggaaaatgtttaatttctcttttctcttaattcacacatacacgataaaggggaaaaaaagagaggaggaaaaatagcaaacttaaaagattttttgtggcagatgtaaaaataaataccagctagttttccaagtaatggaatcagatgtttagtttagcaggaatttgttgtgtatctaatttttccattaagattttcataaacagagacctgataatcactttttcagagaatactgacaaagtatacttgcttggctgaaggggaggaaaatgaatatgtgcatttaaaatttttatgattacatttttactgaagggaggaggatgacctgtagtttcataacgactttaatgcaatcggttccacttagaggagatgacatgttgaaatgtgatgtgtaaaagatgtgcagaatgcttccccagtaattggattcaagca

SEQ ID NO: 62140 - DNA, 1970 bp, Bovine  19866881069080
  misc_feature (1)..(1): n is a, c, g, or t
ngggattgattccctacaagaagggacaccagaaaagcttgcttctcttggtctccctactcgtaggcaaggagtaaaggccacgccagacacggtgagaagacacctgtctgaagcccaaggagagagaattcgggagaccagggttcgatccctgagaggggaagatctcctggagaaggcaatggcaacccactccagtattcctgcctggaaaatcccatggacagaggagcctggtaggttacagtccatagggccgcaaagagttggacacgactgagtgacttcactcactcacttcactccaaggccacgccagacacggtgagaagacacctgtctgaagcccaaggagaggtctcagagatgctgacttgtgctggcaacttgatcttggacttttagtctgcagaaccatgagaaaacaaaagcctactgttgaagccccccactctgtggctttttgtcatgacagcccaagttaacacactcttctggataaatggcagccatttctaacacaccagactaaagacaacttcttcccaggaatctggactggacccaaagagagtcagcacctctccaggcagcttgagccttaagaatagactcagaggctgcagatagctatgtgagtgggcaacaggaaagacaaactgctgagaaagtgagagaaacaggtgtatgagataaatggagctgaaggacaggcagctgatacttcctgggatccagaaagaagttttgttactggtactttccttcctgtgacccatttcctttcttgctcttgggtttcacagattaaatcttaagcttttttttatttattgcaacattcctttttttccctaacaaagctgtcttgaattcatttctgttactctcaaacaagcaaaaactctccagtgagccttttgctctggtccctcaccatacacgagtgtttacattttggtgttgcatcatttttcggaaggtgccttagcattcctttgtgaatttgagattgtgaataactgaaaagaattcagatattctcttctgaagctggtcatgtagtcttctggatgtcactgacaacaagacagggtctggggggaagtccagagcacacagaggtggggttgttgacctggggtgtcttcagttataggattaactcttctgccacgaagaaaaattattttggcctggcctgacttgttttgaaagcatgttaactttttcctggtttgctcttgctttgtcatgagttgcagatcagtaaattatttgtccttatttctgggaacttactctgaatagtcccaagttatgactccaaactagggtgattgctattattgaagatttacagaggtgcttatgtttctaaatatcctttgatgagtctccatttctgtggtaacctagataggctactcagtacacacaggcacttctttgggaaaacctgatagaagaaaacctgaatttacagaagagataaagaagaggttggctattcacccgggtttatacaggatgcacagagagcagctcccctgaagcgtccggtgccttctctgctctccacacagatcatgaacaatgtcttatacagaataggctctgaatgagaattttgttgactgattgatgagccacttgggaagaagagaaatgtgaagccagggtgatggtttgctgctgccagttggagataaatcggaaaggaacagaaagcatcctgagcagacagccagagtcagtggggaaatggaaccccattttaaaaaatgtgatctgcatacagtttgtaggaacttcttgctgtataaaccaaggtatacaggaattttcacatcgatttgcttgaggcctgaaggatggcccctcgccctgggtgccagtattaatcaaaggatgagtgaggcccccaccacacggtagtgccaggacctggtgtttttgcagagaag

SEQ ID NO: 62141 - DNA, 1089 bp, Bovine  19866881159990
  misc_feature (1)..(1): n is a, c, g, or t
nctagtagtcttttaaacatgtttaaattaatccgtgagcctaccaagttgattttaataaaatcttttgtgaacatttctatgtctaaataacacatttcaaatacatgtgcatatcaggttatgtgcagttgtgtacaacatacacgtgtgcacacagtcataaacaaatgtgcacatcccttgtccctgccccatctactagtcctgccatcttatcacagagcaattagatttgtttggcatcagttgaccaacacaatccactatttttgttttcctttgtactgttcaagtggaaaaaaaaattgtcattttcttgcacttttcccctcaacaagcacatatagactttttgcatgttaattgctatatttgatttgccagtgttgatttataaggtgatgagcttttaaagacatttcccaaaggacatttgttttctctgacattgttttgctgctagactctgagtgtttttgttacccaaggccatgatcattgctgattttattaattggttgatgcataagagtattttgaataaatactgccaagcttatagcatgtgtctttcttttaggtcgtttttagattatcatcttatctggtttctcctaagcaattaagataagaaagtctattaaaattaaactttcaacaaagatttcagagtcatgaatatataataggatatgctttccaaaactgtcaatggattggtttcagatctttctgcacaagcatgtttgttatgactttggaattatccttaaaaacactcttatttgccatccttatacagttctacttccctggtggctcagacagtaaaacgtctgtctacaatgcaggaaagccgggttccatccctgggtcgggaagatcccctggagaaggaaatggcaacccactccagtattctcgcctggaaaatcccatggatggaggagcctggtaggctacagtccacggggtcgcaaagagtcggacacgactgagtgactttacttcacgtcatacatttctaagtactttggtagaagacaggtagcattatatttttataaaaaggtttaagtcaacata

SEQ ID NO: 62142 - DNA, 1595 bp, Bovine  19866881177895
  misc_feature (1)..(1): n is a, c, g, or t
nctaaaggaaatcgtcctgaatattcattggaaggactgatgctgaagctgaagctccaatactttggccacctcatgcaaggaactgactaattggaaaagaccctgatgctgggaagcattgaaggtgggaggagatggggacgatggaggatgaaatggttggatggcatcaccaacttagtgggcatgaatttgagtaaactccagaagctggtatggacaggggaagcctggcgtgctgcatgccatggggtcgctaagtgtcagacacgactgagcgactgaactgaactgatgccatgctccaggcttccctgtggctcaactagtaaagaattcacccgcaatgtaggagacccagattctgtccctgggttgggaagatccccttgaagaagggaatgactacccactccagtgttcttgcctggagaattccatggacagaggagcctgacaggctactgtccatggggtcgcagagtcagacacaactgagttactagcatacactaatgcacacacacatgccatattctaaggccctgggtttaattccctggacatactgaatggacatcactaacagtgtcagtcccaatatttataccagcaacagcacttataccaatataaagaaaagtgaagaagtgtgagcctgatttccaagtacaagccatctgagggtatgaagggttttgtttttgttgcttccttgttgcttttgtgattatgttcctctaggaagaacatagatgtgccatggagtggggactctgcagtcaggcaagccttcaccagaccttggctcatgcctgtggccagaatagccttgagccagtgacctaacctccccaaatttcacttttgtcatttgccaactgatgataataactctggctatgcctagtgtttggggcttctcagtggcactagtggtaaagaacccacttgccaaggcaggagacataagagacaagggttcgatctttgggttgggaagaacccctggaggatggtaaggcaaccctttccagtattcttgcctggagaatcctatggacagagaagcctggtgggctacagtcctaggggtgcaaagaattggacacgagtgaagcaactgagcatgcacacacacacgcatagtgtttgcaggagttaactgaaataatgccccaagtgttctttgaatactgattgccaagagtttaggaggtgctcttgaatgtcacctcaattttgcatgttgaactatgttccttctacctatataataggttaagactgaaagcttagacagactcttagagtccagaaaccccaaagaatcagttactatggctgacaaagtcttcttaagaagccccagcaaacccacttaattctcaatagaggatctcatattaactctgtgtctcctttatcctttcaggaattagtaggagctgaaaatcataaatgcaaaattaagacaaactaatgcactgtgactcaagtttatgtagaatgtcaaagagggagccagagtgggaggagacatccttctgctttgcaagacagctgtggctcaccttttcctctattaaaag

SEQ ID NO: 62143 - DNA, 783 bp, Bovine  19866881292930
  misc_feature (1)..(1): n is a, c, g, or t
nctgagttggttgtgactgaaaatttgcccatgtccgcttcttttaatttctctcaactccacagattcttaaaaaggaaataatgagaagattgaaatttcaatttcataagcaccaagtgttctggtaatcagtacagggacatttgtatgggctatctcatttaatctttgcaatatccacatatgcaaaagttttaaaaccagaggttaaataaagtatctaaggtcacagaggaatttagataaggaaccaaaatctcaacagattttggactgcctgtacaatacaagatgtcttcaactcctactcctcagataagagtaatgccaaaaacttaggcaaaagtctcagcattgtgcttttcagcacttcctcaccatttgtttcctgctttcttttttaacttgaaaacatcttgcacaaatgcatcctctgatttttttctgaggtgctgaataaacagttttggtgatgtgtggccgtgattgcaaacttgtcagaatccaattattaaactgatacttaggtatttattgctgtcataagaactctgaacaatggttttgaaaaattgccctgactcatggttcatatctgaggctttatcaaatgcacattttttaatataatgtgggtgccaagaggttacaggcacattgtgttcatatgcaataacactctgtagtcctggaaataaaacactggattacttttagggagaatttcttcctgcttatatttctcattctaaaactataagtcatctaagagaggacatg

SEQ ID NO: 62144 - DNA, 1531 bp, Bovine  19866881343516
  misc_feature (1)..(1): n is a, c, g, or t
naccatccctcacccacacatggaaatgaaaactctctgctctttgctcagaaactatgacttctggaatgctcctaaattttgttgcatttgtttgtttgtagatgaatttactctacttccagcccccgctaccagcccccagagcaaacacagtatctcattcaattcccagtcaccagcatttacttagaacgtggtgtatttaagatgtcctgttaaatacgctgggcttccctggtggctcaagaatctacctgccaattcaggagacttgggtttgatccctggattgggaagatcccctggaaaaggaaatggccacctacaccagcattcttgcctgggaaatcccatggacagaggaccctggcagtccatggggttgcaaagggtcagacatgacttagcaactgagcatacatgcacacacattaaacagattaaatagtacgctccatactactctttgcctgtaagaaactctatcaagaaactaagcattcagagtgatataaaagtgatttgtaatctaaaactccaagttagaagatgagtcccttgatgttatcagtttaaaaccagacatcttctaaaatgtgtgtcactgtaaggtggctgaacgctttctcatgtgagtttactggctgtgtggtttgtctggattttcttattcacctgcatttccctcattctccaggcttaagtccaacccctgcaggactgcctcccgctcctcctgtatgaatcaaactgggggcgctcatcttgttgtcagattcgcctgacagatagatttgctacaacaaatgaaaacactaaataagcagctcccatctattttttatggctgatattcatccccagcaaacagcaaatgttatcccaggatgaaagcaactataattcctgaagttttcattttgtggtaaatcatagtgaatatttccattgtgagactttttttaatgtaaagcaatagttaaaatacatgtacctgtattttaaaaattccttaggaaagtatcacaaccaagttttggatccagaaacaattgcatcatataaggtttaaaaataccaccagaaacatttaacttaatcttattttctaaataaatatataagcatagatacatatacagacagatgcaatcaagagttcaaaatgcttaattacagatgcttcagctcctatccataccaaactttcattttttacccatctccgaggtcatcactacaactggcagcattcctgaacctaagatgttatagcagcagctactagaggctcacaaacccaccagccatctaaagtctccatacctccctggggaaacttgaccggaggggccagggtgaacggaaaatagcttctgggagacgaataatgacagtaaaagctaacaattattaagtaatttatatgcattatctcttttaatcttcatgactgcatttgaaacaagtactctgattagtaccactttaaaacaaaggttcgtctagtcaaggctaggtttttcca

SEQ ID NO: 62145 - DNA, 1194 bp, Bovine  19866880383000
  misc_feature (1)..(1): n is a, c, g, or t
naaccgatccagctccattatctccaaacgaatttgatagttcagattactaattagcctgtcagagggcccagaaactatagcaaaagaggtgtaatttactcaaagaaaaaatgctaaaaagcaaatgcacattttgtatcatatccacaactaccttctattttaatcagccatttgaccacaacgattgcactacattttgtgttttctatggatgaaagctatttgttctaggatgtaatcatttcatatagtaagaatttataggaaataaaattcataagatataaaggcaatgaaacagagtaagaaattcataagaaaaaccaagattaaatacttcttgtcagttggtttgccagtttctcctaagctcacaataattcagtggagccaaaaataactgacttgacatcactctgattcattttggcccatcttttatttctttttccaccttttctgctctcttaagttagaatatgaattagaataatcagctagaatgacttattaataacaattagaatataaattcttccataagaaacatatttctatgatgataaacaagggaaagatcactaagatggagcatattcatatttttgtatgactgatcctctttacaatttttatttaaaccctcggcaatagaatgagttgcaatttcataaataagatatataataataaatgtttaaaaaaagtgctagtagattcttttgaacgaaggtacagaggagctacaggactatctattttgtaggggttttttttttttttttcagttgagtttgtcaaactgttatttttcttcctgttttgagtagtggcagcttgaatagatctaggctggcatagcttctgctcacgtcacatcatttgagcctaacatgcatttgacagcatgaactctcgggccagactccttgtgtttgaattctgggtttaccattaccttagaagaggcttattattttaatttgtgaggaggtcaaaggaagcatgaatctgttctgcaatcaaaaaatggtagcagtctggtgtctgtagtctgtttttatcttttttcaggcatgagactggaatagttatggagcatcctggcttgatgctgatactgtacgaaagtgatcatgttagttggtagcaactgggtcagccaatagctgaaagctcttagggctg

SEQ ID NO: 62146 - DNA, 1061 bp, Bovine  19866880818237
  misc_feature (1)..(1): n is a, c, g, or t
naggatctttcccaacccagggatcgaacctgggtctcccaacatgcaggcagattcttaactgtctgagccaccaggcaagagtacttcttactggccttaaatgaagaaacatcgagggagattattttaatttttattttcttatttaaaattttatgattcttaaccatctgagccaccaggcaagagtatttcttactggccttaaatgaagaaacatcgaggtagatattttaatttttattttctcaaattcttaaccatctgagccaccaggcaagagtacctcttacaggccttaaatgaagaaacatcgaaggtagattgttttaatttttattttctcagattcttaactatctgagccaccaggcaagagtacttcttaccggccttaaatgaagaaacatcgaggtagattattttaatttttattttcttatttaaaattttatgattcatgcttgctttttagttgaatacttttgtttccattttgtttattttgacagtttgtatataagagaattttacccttgcttctattttttgttttagtgttagaaaaatttccttttattaaataaaagcatgatttaatttattgaccttttaaagaattgtggcaaagaatacaagcatacagtaaaatggagaagtcaggacgtggaaaactaaaatttcagaaatattggtttcaaggacaagagtggtctatatgcaatgtaataagttttataatattcccccatagatttgaactagtagagtcaaaaacaggtccatgatagctgaaagtatgatcactgacgttcttctctgaaagcactgtttactaatgggcacataaatgacagacaaggcaccaattttgaagaccttgcatttatatcctcagctgtctctgttatcagattctgcgttttgtcctgccttttgctttgaaaacgctttaaaattgatgaacattcttgggaaagatccactgtcagcttgtggcagatgtttcagcagctgctcccacattgtaaaggccttcaacaggacacagcccaaca

SEQ ID NO: 62147 - DNA, 2591 bp, Bovine  19866880356684
  misc_feature (1)..(1): n is a, c, g, or t
ngtcatctactttttgtttgcataatcttagaaaaccaggatgatactgggagaaataaatatatagaaaaaataaagcaaacaaaaatccttcagctttgattaccaaaggcttatcaactattccactactgaatacttcctttatagctgtatagttctatagtgtaaagctaatcaatagtttcttacttggggatttaaacagaattaaaggagtgatatatttgtcaatttgttattatattgtgatcttcagaattcctactaaattccaatggcaacagttcttagttttagtaaaaggtatgtccatatatttttgacaatttttgatatagtttttaaagattaaaaagttgataatagctcagtagtaaagagctttcctggtggctcagtggtaaagaatctgtctgccaagcaggagacacgggttaggtcaggaagatcccctggagaaggaaatagcaactccagtattcttgcctcagatatcccaaggacagagaagcctggcaggctagagtccaggagactgcaaagagtcagacatgatttagcaactaaacaacagtaggaaagccttatatatgaggaatggcatgcttttattagtgttagttgtaagagtaaaaatataatcatgtcttatcatcttatagatatgtatttctctacctctcaacatccatccaaaagttattattttaaaacattttgccctaccacctaagatacatatgtgtgaattgtggtggtttttccccagtaatcgaaattggggaagtcctttattcataggggaaactaggtgtgtttttttccctatagtttcatgcattggttttgatgaacatttcatgctaaaggagtttccaaagtagaacaattcagaatccatgaatagtaattgagccttttagttctgctctaaacttaaaaccattattctccatttaaagcagacaaatcatgttgctctacagaatgctgctctgtcattttggttttcttgtggtggttgtttccagtgagctaggctggaatattaagcgctctttgcttcccatgctctctcttgctgtgctgggtacatttagggttctgtctgaaatgggcaaaaagcaattctgttgctcataaagaataacttgtaagctggtgtggatgactacacgtcttttattttgtaaagagaatgtgctgtttgccaggctttgaatctctggcaactggcttactgaaacccaacttaaatgtactcttgtgcataaacaatcagatgtaaaacataataaaaagtctcctcttatgactgtgcctctctctccaaacacatcggcttgataccctgctccgcatatgtggaactgtatctgtcagaaactaatttaagtgtcatgtaaaaacaaaaagttaacataagtgtaacatgataaatattgcttttaatattaaaaatagacgtctagcatttttagaaattggtcgcggttatggtccttgcagaaggatgtagccagatgctcctgcgctgagcactcattgcagagctggggtaatcattttctaacatgagctgtcatgttacaaaagtaaatacatgtttggattctcatggtctgttctgtttgcctgatggagaaaatgcgtaaatagttgcactatagaaatctttttcctcatccaaattttgttcactacggttttgtcctcttgcttttatgataccatatgttaatattcattaagtagatattatctatttttgtgattgaatgattcttgttttaagatgtttctacatgaattaacattttatattatcagaattatttctacatgaattaacattttatgttatcagatactatctgaaaaagaatgatagccctgagccttagagtctgaaagttctctctttcctttcttctctcccttcctttcttcttccttttcttacttcctataatgtcttttcatagaaataggaagcaaaataaaatatttctggcaacaggttaagtttattctgaaaattacattacgattttttgatgactatcacaagctaaagattaatgacatttcttaaacaataagcctccaacatcaagcctcctactgaatttgatgctcagcagcaacaaaagacacaagaacaataacaacaatcctgtaatagcaatgtctcccaatactggaagaaaaacagaccataactgatttgctgagagaatgtataagaaccaccaatgtgacatactaataaatctttaagcataattttgactattaaggaattctgtcttagttggtgaatatagagcctaacacctctagtaacatgtgactccacagtagacataaaagcatgacagatttatctggtgatttacattgatggcataatttggaagtataaaaaggaagcatatactactctggggacttctgccattctgcatgactgaagaggataatgggcaaaaggttaaaagcaattattttcttcatgcaagagattctttgaatggatttgggttactctagagggttgctagataaaatataggacacccagttaa

SEQ ID NO: 62148 - DNA, 1476 bp, Bovine  19866880450119
  misc_feature (1)..(1): n is a, c, g, or t
natggctggatggcatcactgactcgatggacgtgagtctgggtgaactctgggagttggtgatggacagggaggcctggcgtgctgcgattcatggggtcgcaaagagtcggacacgactgagcgactgatctgatctgatctgatctgatattgatatccatatttttgactacaaggtatctgaaggtagagatcaaatattcttcatccttgtatgccaataaccagtgtagtactcctaaataagtactcagctagtttttcctggaagaataaatttttaagcttttatgccaaatcaagatcacaagattaactggcaactggaacttagcaaagaacaaaattagccaaagaagattttatttttacttttccaaaggaacataaatagtattctttagtaagacttcattatacactaagatgataaagaattatctctacatttagcaaataatgtaaataattaaaaagcacaaaaaactaggtaattccattttattattctttccaattaatatgggtcactaactaaatagctataaagaaaaattatagtaattaaaagaaattaatgtattaccttctcttttaagatagattttgatttttttctttatgtactaaactccaaaagtattatatagtttatataatatttagatatgtttcaagaggtcactttttaagtggtgatatttaattatgttagattaattaacccactccagtgtttttgcctggaaaatcccagggacaggggagcctcatgggctgacgtctgtggggtcacacagagtcagacacgactgaagtgacttagcagcagattaattatatattacatataaagtgaaaagtttacaaaattatagtgttaaaaagtgttgaagttccctggtgtccagtgactaggacttggagttttcactgccagggaccaggttcaatcactggttggggttcaatcacacatatatgtatgtgtgtgtgtgtgtgtgtgttataataatatataaattatatgtaattaatctcagttcagttcagttcagtcactcagtcgtgtctgactctttgcaaccccatagactgcagtacatcaggcttccctgtccatcaccaactgccgaagtttactcaaactcatgtccattgagtcggtgataccatccaaccatctcatcctctgtcatccccttctcccgccttcaatcattcccagaatcagggtcttctctaatgtatatagttaaatatcaccaataaaaaagtgatcttctaaaatgttcaatagactattaatctaaagattcacaaaatgaataatcatccatatataaacaaaaatatcatctaaaatagacctctatatgttatttctacatttataacacatagaagtcataattcattagactatgctccttcttttcgaaatccaaaatccaagaaaattgaatcactttt

SEQ ID NO: 62149 - DNA, 2626 bp, Bovine  19866880465612
  misc_feature (1)..(1): n is a, c, g, or t
naaaagtttacttcttaattttccagccattatgaacctatgtttacatttgattttataaaaatatggtcacctatgttttccttttctcactagcatcctctaaataagcttttagattaccaacatcatccacttttcttttttgctctggttgccaaaacagaaactgactaaatattcagaatactttgaggaatcagaataatatgtgacatttacttctaactgaatactcattctgttcaagtattttaagccctagactgctccactggggaaagtttcatatccttgtgattttctaaatctttgtagaggacaaaatagtcacacaacttatagatctagcattctaatatcttccttttatactgaatgctttatcataatgaaatgtctctctttgaacctagttatgagttagggtggggatctatcttggtaagtgtcatccagtaagatcatgttctgacattgctttctttctgggcttttaattaagagcttataagtctttgccatctatcaatgcaagacttcagaatattgtgttttcctcttcattttaattttttagctcagctccataacatttcaccccacacaactttaaaatttagttatctactcagtattattattaattttgaccaggacttttcttaggtttttctggctctacatagccccaagggcatctcaggtggcaccagtggtaaggaacccacctgccaatgcaggagatatgagatgtgggtttgatccctgggttaggaagatcatctggaagtggtgatggcaatccaatccagtattcttgcctggagaattccatggagacagtagactggtgggctacaatccacagggtcaatccaaagagtcagacatgacttaagcaacttagcacacacgcttgcaaatatagccccaaagaaatgtggacaagtgaaaaggagctcaaaatccccaatgtcaatctgtcactttccttaaggctgtcttatccagcctctctggttttcacatttcttttcccagatgagtgcttgacctttggctcctatgcatgccagacaatggaccagtttacctgcctttttggattcagaaaatgtctagtacggaaaactaaccatacatccacgacctccaggactccaattttgtaattctagccattcatgacaccactgaaacttttggttgctttgtttgtatctcagcaggaacccttggcctggcccatgctcgaatctgccacctgtgctcagcaccagcaaatgattacagagaaaaataatggctgccaactgtcagctcatgtgtgaacaattctcccttctttggcgttttccttcattttagtcctcattgcttccatagctcttcagtactttaaaaatacagtgtttggaacttattcagatttctctagttgttgtcagaaggagcagtgtgctgccaagaccaactacacctaactcaaaagcaagagttttattttgttttaatgttcaatttgtccctcttggcctctagttttctgctctataaattgacatttctatctgatcctacttaataccatctccaatacctcttaaaaaaagtattttctttctcagaaggattaccttaagttttcctgtttcaaatatagaatcggtcactcttgattcctaaaaatcctggttcttttagtaacaaatagcatcagcgcattggtggtcaaaaacttgggtctgaggttatatttcagattgtttcatgtgcgagctgagaaaatgctcctggaaacccagtagttactttaaaaaagtccctttaaaaaagtgaacaaattaatgtatgttccagcttgattacaaatattgctatagtaactttactgatctatgttctccctcctaatacaacttgatataatatcattatgatatgataatatattatgtaatatatattataaatctccatttttcttccttttagctcttgagttaagtttccagaggttgggcatagaatataaggaagatagtataaaaccattgtcagaattactttaatgaaaaaaaatactttcagcctttctctaaaaacaaataatacagaccaataaattcatgagccttggaggcatgtattttgtcacaaataattaaggacaaggaaaagtataatatggattaaaataacattttggttttgctttttattttcctaaagttcaccttctctctgagacattaacatcattaatcataagtttttaataattgttcttatctgaaagggtaataggcattcctattgtctcaagtgaatcagatagttatagcctagactaggtgcctagattaagcttcccaaatgtcaagtagaagaactatcaacagccatcttcctaggtttttacatttcaagagaatgaagtgcagacctgaaagacagctctaggtcataaaagccagagacagcaggcatttatctggtccttgggaaaatgtatttatattcaagaaagtcagtgtgtgagaatacaggatcctttccataaaaagagcaaagtgttttccttcttttaggaaatatatgcatgcatatgtatatgctgctg

SEQ ID NO: 62150 - DNA, 958 bp, Bovine  19866880497720
  misc_feature (1)..(1): n is a, c, g, or t
ngttgagctgggtttgcatggccattcctgggtttgcaacattgcatccctgatgaagggaaacaattttatgactctttcaacattctgattggaagggaaatgagtaagcatcagtttgcatcatccattctagttttctaaggcaaaaaatgttttaattgaggtcacaaagagagaaagaggttttccaggactcctatggagcaggaagagttgaggacattccttttgttctcttcctctcctacttaaaattggaaaaattatatttgccttttgtttattgcatggcttagtagatttgaacaatgcatatcaaatacctaatgtattttcataacatcaattttatcccaataatctccaactggcgaggtgaaaaagtcattcaatgttgatattgttgaaatggattcattaatttgtttattgaatattaattaagccatggtgatatgttagatattatattcagaattagagatgaaagggaattataaatacaactacccctaataaatatccaggcccataggagagacagaattgtaaacaaatacattagaagaatgtaaaaaatatgtaaagattgtatacaaggaacagaggcagtacagatgagagaatgactcactgtctctctctattctccctgtcatcttcagacttctgtaattcattaaaagaaaaacaaaacccataaaaataaagttaggttactagtactttcaaaagcttgtacaaaataaatagtaatactcaaatttgaatatttgaaaatctttggtcatttgttcattctttcaaccactatgtcaaggatcaatttttaaacttttagttgtacagtagatacagtttaacatacatatcatcatatagtaatttttggaagtacacttttttgtgggcttccctcatggctcagtggtagagaatccacctacaaactcag

SEQ ID NO: 62151 - DNA, 1667 bp, Bovine  19866880560924
  misc_feature (1)..(1): n is a, c, g, or t
ntcttaagagtggtattagggtcccgttgtctttctactatctttccatgctgccattatggttcacattaatgtcctggacgatgatctcaagaataccaacaatgccaaaaatataggcaaatgccaggtgcttattaggccatgctccaaagtcatcatccactttctgtgatgatgaagcatggttacattgaaaagtgaaaatgaaaggcattcagtcatgtccgactctttgccatcctggaattctggccgggaattctccaggccagaatactggagtgggtagccattctcttttccaggggatcttcccaacccaggtcttccgcattgcaggcagattctttactagctgagccacagttggtcaatttgaaatcatcagtgatcacggggctgggaaaattgttgttaacctcacagacaggctgaataagtgtggagggatcagcctcagatttgctgtgcacctcagagatgtagaaaaatggcagagtagcctgctcctggcagtttggtttcatggttctgacaacctcggccagcatcagggaccatgaggaagcaagagaacacacaggagggaaaatatttagattctttttctaggaatgtacttttgttgttgttgttcagttgcccagtcatgcccaactctttgtgaccccatggactgcagcacgccaggcctccctgtccctcactatctcccagaatttaccctagttcgtgttcattacatcggtgatgccgaccagccatctcatcctctaacggcctcttctccttctgccctcatctaagggatataatacatacatgcaaataaaatgcctcagaaagggaaaaaaaaaaaagaatagtgtgaggaggtggcatgcatcaggaaattccacgtatgtggcatgaattctattgcatcccagcatccatacgtttagttaggaaccacaacccaagcttcccttctctgacacaatgattactgttctctcattgtgacttcacatgcatgaaattactgattactaactctggataacaacaaaaactggttatgtgtgaccactgataggagcaaatccccacctcccattacaaattcaccacaaggcatactcatacaggcatgcgtctatatacgtacttcccgcagacttgttcacacaatgggcttgaggtcgatcccaaagatgatcataaacagagagtatacatcataattaaaaagtttcaagcactggaaagcattggaaatggcatgtccattttgttgatgatttcctctctaacttctgctctgggactctccatttctctgttaatagaaagggaaagcagtccgctgtcctgtttgcaacaagatattgcaatcctatttcaatttataagtactaccaaggttataaactcataaattgaatatccatttattgtaacaatattgctaaactggggagacaacactgtgagtccaaaaacctcactgcaatcaccaataagcagcaaggaaaccaacagtcctgagtccatcagcaatctataaatacacatgattctatgcatgctgtttagataggtcaaaaccttttgtgtattttttattccaccccagttggcattaccatgcctcttcagaggaatctaaaggcactttccca

SEQ ID NO: 62152 - DNA, 2067 bp, Bovine  19866880811173
  misc_feature (1)..(1): n is a, c, g, or t
ntccttttactgttttgttttgttttttcccgttggtgtttgaatcttaaaaggaagagaaaaattgctgcaacactggtgatatgaacagcactgaacaatgttgttttgtatgcaatgatgatgcacaacagaagaagccaaaatgagtcagacaagagtgtattaagtccattttcctcgttttgattcagaggttttttgctaaaaatcacaagccagtcttagtggcaagctttagaaaacttgcacagcactgataagaaaggacatcgctcataaatattcattaaaaattaccttttctggatcatgaatttttcaagcagacactgatttgacctctacaaggaacaaaatccagcctatagtggagtgtatcctatttctgacaaaaaaaaaaaaagatgaaaaattggttttcccagctaagcagctactttgtacactgtgtgaggtccgaggtcagttacctctgcgtttcacacacttgagcattaatattcattcaaattacaatctttaaattctaaagtcctgttcatacttctctgaaaaactgattgtaaggcaggccagggtttgcattttaactaatttttaaagtaacttcatctaacttctctgttgctcaaaaatgtatgaattcagtaatttcctttagaaaaaagtcacatctgcctgttttgaatttatatgccctccactaaggataaaagccacatttttcctggtaattatctgcagagtgggtgaatggatagaaccatctacatttatgtctatcagagagctattgttggtgtttcatcttcatatagctcctcacagttcatacatacaaaaggagctttgcattatttgggggtatgttttttgctttcattgttatgcctacaatatctcagtggggtagtcagcattaccacttgcattgtttaaatagagtaactgataagcagaatatgaattatgatagcttatactgtgcaaacttagcatctgaatcagaatgttttcctagaaccttgcccttggtgcttgttttagtttaaattctaggacctgtatttgggttacttgaaaaagtgacaaaatagtgaccaaaataatccttcaaacactctacagttcaagctatatatttttcttattgagctacacagcattaaaattttcttattacagctggatttcaatcccagctcattcgttttctggagttgtgaccttggatatatcttgacctttctattctttgccttcccctttgaaaattgagatggggagtattggtttgaaggatttacaaggcaccttaatttatacctggcagtcaaaatagttactatttagtataaaattaacttgacttgagcataatgtgacttagcacaaagaaggtaatagaatttgtattaggatatagtctctaggagaaatgaaaacatgttaaattggacatttccaccccatcccaccccacaagtcccagaacagcatagaaaatattatcaaaaaggtgattgggttagagtctccactaattttgttttctttattttttatttataattcaacccatattacctcctagttagctgctcatctgacttgcacagagctcttattttgagggtgaaacctatgtattatttcaatggtcttggtgatttaatatcaggtgttgatgctgcatcttgttgacccttatctcccaaagttttttatatggttgttcttagacacaagggtgctcagcctatcttccctagttttgatggttcactgtcccaactccactcctctcatgtcagagtgtagaacaagaaacagaatttatgcaagggaagctgaggaccagtcggatctcatccatttctccacctactatttgaagatgttcatgcactagggctgccaggtttaataaaagaaaatacacagtacccaattatttttgaatttagataaacaatgaattttttttgcataagtatgccccatgcaatacttgtgacatacttagaataaaagttacttattttagctgaaattcaaatttaa

SEQ ID NO: 62153 - DNA, 1188 bp, Bovine  19866880825702
  misc_feature (1)..(1): n is a, c, g, or t
ntgcagctgtgcccctttgctcacaaataaaggatctgccgcaatgctttgttatggtgcttccacaaaagacttcctgttacacgtgttcgtatatgccatttgagttcatgtttacagcttttacagtgtggtaaaaggcagctcgacattctgctcttgtgtgatcttgtgtatttcatgtgtctaagtgagacctttgtgaccactcaggattcaggaacagactgtcccctaatgaataggctggaactagaacacatctcttcacattcactgacagattaatttgacaaatacccattagaccagccaacagccttgctcagttactcctatttactttaatttatttagcaaaagaccctgatctatcaagttaaatgccttgatcattcatcagttcacagatagtgaagtgtcccagactacaaccagattatcaatctgtgacaggtgaacatttgggtaactcatttaactgagcaaggtctaaaggctctaatattttaagttattggaggccatggctgagctataatcttctccttgtcaaatattgcaaacttataagcagacatttatttccatgcactaactgagctctaaacaaatgtattttcccctgcggttcattcctgactagatatttttcaggagatcttcactctgttattacattgaatatactttggtttgtacaaggaaattatattgttttgacagctctattattttactggttagctcccagcaatttatcttacagtacatgaggaatttattttttaattggctctgctttcctttatgaaggcatttatgaggtactattgcagctcaacattttaatgtttcctaccaatttggtaatcttgcaaacaataatgtttctgaagggcctctaaacagttttgaaacaagattaaaaagaaaaagctaacaaatgtagttttatctttaatacttaccttcctatcagccttaaatatacataaaggatacagtgatgtttgggctcaaagtttgtaaaacaaaacacaaaaattctgaccagaaataagacattttagatcccttttaattttattagaaactgacaaaagaggtgttattaaagaagcagaatgttagttttctgttgcaagatcctgtacaactggtagtttgcttatcacataaagacca

SEQ ID NO: 62154 - DNA, 2786 bp, Bovine  19866880830667
  misc_feature (1)..(1): n is a, c, g, or t
ntttgtttttttttttctaaatactgaaataatcagcacagcagggaaataagccaatcattgggaagcaaaaaaggagagaaaaccaaagctctgcccccagcagacacagacccagatcttccccagcctcagaactttaatccctcttgtattgaaaaaaaaaaaaaaaaatgagtggagaaaagagaagggaaggggagggggaaaagaaagattgcaaacaaacaaacaaacaaatgtttctctgctgcctcaatgagaaacattcttaggtcttcaccatctgtattcacagatgactatctaacttagacaacagagtatttggttctgagtgaggttcttaacttttatattgcctgtgtgttaatattttatacctggtatgcctgtggcaagtggagtctatataataagacttttaaaaaaaacatagagataactttctcttagctctttgcagaaagtgattagcaagaattaaaaaaaaaaattaaatccatgactttttaaatttttggctatcctcttttaaatataacagagtgcaaactgccaaatgtacagctgagacctatgagagagacagacagataaagagacggatggaaagagagaggacaaagaaaagaagtcagagaagaataaaggcagccagtcaaatctttgatacgctgatgatggaagaatgatactaacgttttgtttaagtcagtgtgaatcctgaaggaggttgtattattgcttactgtttgagaaaataatggttaaaaaaaagtttcatttctctaaaatatacactatataaatgtactattaatatatgttgatgggggtttgagaatgataagagataaaaatgaaatatttaaataaacaattaaaatgataacacgccctactcgacaaagagaaacccacagcttggaaggagtcatgatgctgctgccaagtctcttgtcgtgtccgactctgtgcgaccccagagacggcagcccaccaggctcccccgtccctgggattctccaggcaagaacactggagtgggttgccacttccttctccaatgcatgaaagtgaaaagtgaaagtggagtcgctcagtcatgtctgactgttcgcgaccccatggactgcagcccaccaggctcctccgtccatgggattttccaggcaagagtggggtgccattgccttctctgaaggagtcatgccttggatgccaaagaaaaagctatcctagttccatcccctaactaccacgagttgctgtcactatcctttatctcctttatccctcaagactagaaagtgtttgacatacttagacacaaatttgttgaatggataagcaaatgaattaatacatttatgtttttctaagggtctcagagtataatttgagcataaagggtcttaaattctaagggattagtgaatatttttattttctattaagaacacaaactgcaaataggattcattacaaaaatgtaaaaccatcattaacaatgattataatatagaatttgcaaaggcacactcaacaaaatatctcctaaagatgaaatcaaaggaaaaataggtaagtcatcactgttttaaaatataaaatgcacatttatgtgcaaatctacctacagattatgataaataagtgaagaatgaagagaggaagccttgagcaaggggacactcaagagaactgattttagactgctgcagttaagaaggggcttttacactgtgaactgaaaaataaataggagctggccaaacaaagtgaatactccagatggagggaaaagtgtacacagaggccccaaagtgagaaaagcaccagagtggcgagagattaatgaacgagaggaagagtaagtgaggatgagactagagccaggtccttcaaaaatctcgtaaggcatgctacggttttgggtttgtttttcttttaagtctcttgtaagtgcactgaagtgcttcaaggtcaaagaaatttgagaaatgaagtactattgtgtagcacttacttgaaggttcaaaatgcacattagctaattaaagattccaagcatttcaactaaaaagaaatgtgttgagcttgatttatttcggggttttccaaatttactggagcaccacacattcttcatgtgatacacattgttatcctcctgaaccttcctccctggtggatcatttcctgaagtagtcacctggaacaatctgttgtgacaaacctgaacgccaatgttacttcatgaacaaagtgaaataacatttcctgtatctgggaataaaaggacataaaatattcaaaaagtattacttcgtagagataattggtttcatttttactcagttgaacaattatttgatagtctattttctggcaggctctgcactactgtgctaagcaatgaggttacaaggtgcacaagacctataccctaatttgaaacccttagaaaaacataaacgtattaattcacttccttattcattcaataaatttggtgtctaagtaagtcaagcactcttctagtcttgagggataaaggagaaccaagacaagggtatctttgctttgctgcaactcatattcttgcttggtgtgaaagtgaaaagagaaagtgaaagttgctcattcatgtccaactctttgtgaccccatggactatacagtccatggaattttcaggctagaacactgggagtgggtagccattcccttcttcagggggatcttcccaacccagggatcgaacgcaggtctcccacatt

SEQ ID NO: 62155 - DNA, 1094 bp, Bovine  19866880869253
  misc_feature (1)..(1): n is a, c, g, or t
ncaattgagcgactgaacaacaatatgtttttagttccagtgctccaaacactgctgggtacttcacaggctttcagtaaataatgactgaccaaatgaacgagtgcacagtccaggatctgagagcacaatggtgaccaaaccttggtcctgacctttgcagaataatcctttagtatagaaggtgagtgatgttacaagacaatcataacataataataccaaacaaatgcaatgtaattggagcaagtacagagagttccaaagatctagtgttgcaaaataagactctctgaatggagcagcatctaatctaagacagagaagttgagtaggagttagagaggctatgtatagggtacaactgtgttgtggtaagacaggagagaccattcagacaaagcattacagctgatgcaaagacctggagtttggagagggatgggcatatggcatttggttcagtcttattccctagatgtatttatattttctatacttcataggctttaacttccaatgctttagaatgctaaaaacaagaccctcaaaataatgcaaatgatgtatgtttgacactaggtattcgtaacagacactttcatcttcacaaaacctaaagaaataatcctcatgtacaaagttatgattctataaggtactatattacattttatcatgccttccactaatgtttataatgataaataggttgtcatactaattcatcaaagcaacatttcatgaaaccatatgaaaactaatactatgataaatgtgtgtctattacatactaccttgaggggaaaatccataagtagtaattttatgctatgaagacatttcctattataaaatggcagaggctgaaagttaaaatctttacaagtttacaggcaggatgaattgttttcctgaggcagtagtatgtctccaatctattagattaagaataacttggagaattcattgtggatacacttatttaccactctttgagcacatgaaaatatgttatttcatacttataaattaatacctaacattttttcttggataaatacatattttcatatatgattaatacatattat

SEQ ID NO: 62156 - DNA, 1533 bp, Bovine  19866880923162
  misc_feature (1)..(1): n is a, c, g, or t
ntcctccctcctgggattctccggcagagtactggagtggttggtatttccttctccggggatcttcccgatccagggatcgaacccgggtctcctgcattccaggcagacgctttaacctctgagccaccagggaagccaccaggaaggctctagattagtttgtaccaaattgagatcacctgagtttgccagaaatatgagaagtgctgattgaggcctcagccctggacttcagtaataatattttattcttgcctttaaaaatgaaaccatttccaattcatgtgatttttattcataaataaaaaggaggggtagggaaggtggaggaaggaatctttgttcaagattccaaatgcagcttgacctctgtttttaaaaattcagatggcaaccatattgggcctcttgggaacatagatgatcaggtgagaacttaatttcttagagaaacttaaccagctccccagaatgtcatactggattattaggaggtaaggagaaacaggtgggtcttaccaaatgtgaagcccaagtaaaatacatgatggcagttaccaaaatcataatgcatctcactgttactgcccacaaatccttgtacatatgcaaacacccattgctaactctttagaagagcaaatatttgcaaagcaaggcttatgcaaaccagaaactaattaccaatgtttgtttccagccaatttttgcaaattaaaattctagcccagccaagaaagtgtcttttaaaataagctggattatcaatatttataagtgattaatcattagaaatgatattacatacttaaactgtggcccatctaacttttttcccattgtatgaaatgtatattctttatgagatagtctagcaaaatagccacaaatttctttaactctataagcatccctaactctcataaatcaacatatatttaaatatttaacatatgccaaaaatataaaatatgggtttttttatttaagtctatatcaccagggcaattttcatcaattgaagccacagtaattaccatttattaccactagaataatgtataatccctcactttctgttttcaaagcatgtggttggttaaagatacggttgaaataaaattcatggcagtatacttggagataattctatgctctcttatgaaatggattttaccgaagtaagtaaaggtaaaggaaaggaaaatgtaggagatgctaagcaaataattgcccatttagtttattaagtgtcctagtttgcatttaatgaaggaaagtagaatttattgattgccatcaaatgcctaatattatcaaactagttcacattttctaatttagtttttaaaacaatacatgtatagaacagtcttttggactctgtgggaaagggagacggtgggatgatttgggagaatggtattgaaatatgtataatatcatatatgaaacgagtcgccagtccaggttcgatgcacgatactggatgcttggggctggtgcactgggatgacccagagggatggt

SEQ ID NO: 62157 - DNA, 773 bp, Bovine  19866880929607
  misc_feature (1)..(1): n is a, c, g, or t
ncgtggttttgaattcttatttattagcaaacttaaatttgtctatatccctcttagatttggaattctaaatttaatataccagatgagttctgactatatcatattaaattttagtcataaatttcctactcattgcctggtataggcctgcaatgtatccatgctattttctattcattttatacctgaaaagtgcaattgttgtaaaataccttgagcatattaagatttggttctgttctatctctcaccgtgtaaataatgtgtgtaccaggtaatggggggaaaaaaaatcactctttcagtgatacttctttttcatttttttggtttgttttacctcgtttcttctccctggagtatattgggaagattagtattttttcaaacctcaatacatgtctagttgaaaaatcttaaaatctatcatttaaatttaaattggattctgaaaggtcactagattacatctcctgctatacttagtgaaggaaaatgtatgttaagggagggaaagcagaccattctttaaatttctaacaggctaaattgggaacttgttagtgctcacaatccagttcttcagaagtataaaactgaactggaagcaccctggtcagctgacctgctgtggaacatctcggtctccactgaagaggaaagtggtgctttgcttttcatgaagagccacctgccatcacaggtgttaccaacaaacactggagcttcgaagagctgttgtattttccttcagccagccattgtgatga

SEQ ID NO: 62158 - DNA, 1143 bp, Bovine  19866880942270
  misc_feature (1)..(1): n is a, c, g, or t
natgcacatgtgccctaagagaaggacattgtttgctcttagaaacatttacaagaaggaacaaatctatcaccaatattgtaggcaagattcctgagttttatgcagaaggttagacatagggtcctctgagattctatgatcctaaaccaattcacggtaacctatcacaagatgtgggaaaaactttcaggaaaagaagtcttaattcttagtatactttccattagatatttggtaattaatttattggattattatgttaaggcagttgctatggacttaggagtactatagacttggttctgaatgccagctttgacctttattagtcaatttacttaatctcttggaaacacttttttttaataggtaaaatgagattaataatacctactacatagggtttttataaggactgagtaaaataatcttttaatgctaacacaattctcagcaaagaatgagggcacaatacacagaggctattataacacatataagtctgaagaaataaaaattttaaatagccatgtcactgaggatgtttttaaaagttatagaatgcaattgtgccaaagttgtgcataaaagtgattcatttatgagaagatcaaaccattttttatgagatcaatatattcacccctgtgtttcaattatgacttcttgatctgttaatatttctttgtttgtttatgtcatccaactcatttatcttgacatcctctgaaagcacttcaaaatgaatcactaagtgtgtttttcttgtttggcagttacctttttcagtagctataaatttagagaccattaccttcactggaggatctaaaggaagtttgggggcagtggaaggggagtagaagtgttcactggaaggaattgtttggtcttaagtatagaaataaatgttgcctatacaaaatgaaggttctaaagaaatgcaaggagaaagtcagcactgaggtcctaaactctaaatggaaaattaagaaaccaggaaacccaacagaactaacaaaacaagacttaatgaataattggtttgaactggggtttgtttccttttaaaatcctaattttaaattcatcaggaactatttgtgaagaaattagacttacttataaatgccatcagac

SEQ ID NO: 62159 - DNA, 1112 bp, Bovine  19866881031380
  misc_feature (1)..(1): n is a, c, g, or t
ntgggcagttgggttttcagtttgaactagttagagctagaaagagtgctactgaggatgaagtacatttaaaagctgcctgtaagtaaagtagaatgaatttaatgagctacagagaaggacagtttccagggttgtgtatattgtgtgttttttacttggtatatgtgtataaaccttactaattgccctcttttagtgttgaaaaatgttttaagtcatttatgcctttggttatattctgaatttttcaaaataagcgtatttaaatttcatagtcagaaacatgtacaatagatgttactgaaaatatagccttcagaatatgatatagtatgaaattggagtttacaatcatattaacttattgatttatttaatgtattaagcagaactacacagttcagctaaaaatgaaaagataatccactagccatttgtaaggttactatatgtgtatgataattattttagtcaacttagattaaattgtctttgtaaaatactctgctaagaatcttcaaaataatactactgaataacttataattacttgatctgtactgattaataatgaaatatgcagaaaagcaaatagtagatggattgcttagttctccacactgtcatcttagatagtaaagctcagtgtttggagtgatttgtgtgtaaatgatctttaggttctaactaaccacagttcaatattacctcaagagtctttaaaataccgcataggcttagattatattaagaactatgttgtattctagtcatgattagtaatgttttccttatatactaagctagccagaaaagcattttgcaaattgatttcaattcaagggaatatattttaaggggaaatgacatagtcaaaaagaaaacatctatgaaaaggaaggaaaatattatataatctgaattttatttaataggaataattgagtgaatgagataagattaactcagaaataagagaacttgagaaaagtaaatatatgtattcaaatgtgtgctgcaaagtcacttcagtcatgtccgactctgtgcgaccccatagatggcagcccaccaggctctgccatccctggggattctccaggcaagaa

SEQ ID NO: 62160 - DNA, 1377 bp, Bovine  19866881091565
  misc_feature (1)..(1): n is a, c, g, or t
naaattatttttcttccaaagaaaaatttggtaaaattttccaaatatgatttgactgtcttctgcagtgtacatgtacatagaaaatattcctattctgttctcaaaatctaattcattttagtataatttcttgtgcacatattttagtacataattaacgctggaacaagtataaattcacattcagaagtagggattcataagtttaaaggacaacataaactccatgattcagaatctgttgaaatgttattacctttggctttgctgttaaaaaagaaacaaattaactctctcagtttaaatatgtgtgtaaactattgctcaataatatgtcaagtataatacttaataacaaaatatagagtgtgttttttatttctccattatgtaataagtattaatcttatgagcaaatatcaacttgtatattttattattcattttatgtcattaaccattcctaaacttatttaacaaactccaggagatggtgaaggacagggaagtctggcatgctgtagtccatagggtcacaaagagttggacatgacttagtgactgaacaacaacaaaattatttatggcgagagtcctggactatgaaatttaagcacaaagaaaaagaaaatgtctgttctgctgaaagttctgtaagatataggtcataaacaatttattacagtatgagatgagagaacatctcaaatataacaaccttaatataatatctattaaatataattcacattaacttctccatacatttaattaattatgctttctggaacctgacctcaccatctcaggtaatcaaaatgcctatataaatgaaaccttcatcatgagagactttcctctagccaaaatgtggactgtctattagaaacagactaattaaatgtagtttatctttctgcctagctactggagcaggtgctaacatgctgtgaaatgatgagaaaaaaacctataaaaagaagataacagagcattcccaatcaataatctgacactatactattcactctcttgtttgttcccatgagacagggtctgtcattagactacaatatacaaacatctagaacaatgtgtctcacacagaaagatgcgccataaatatctggcagataagtcatactacagaagccatatctacagtgactctgaaacaaaatgagttccagttacttaccaatgtaagatcttttccctaacagactaatccgaacaggctataatcaatgaccacttaaattgataaaaaattctcttctgcagaaaagtaattatgcttatggatttatctacaattttggaagccatcaattcacattacttaaaattgaaattggaataatatcttgaatt

SEQ ID NO: 62161 - DNA, 1484 bp, Bovine  19866881105192
  misc_feature (1)..(1): n is a, c, g, or t
nttggtgatggacagggaggcctggcgtgctgtggttcatggggtcacaaagagtcgaacacaactgagtgaactgaactgaaagattccttaagtataagaaggaaagagagaattccaagagaaagttctctgattctataacagaaatcatagagggcgcagtacaagaatgtagaaagaaaagaagggaagttaggacaggtcagggctatggggtgagtccagctgtcagtgaagggccaatgaagagccagcaggctggccttggacttcccatagcaaacatggcaaacaggaatggggctgctcctggagttttcctggttggtactgagaagcttttgcaaacagatttttatcaacagataaaatttaaatgagaaggcttttctacttttcttatattattttctctatttataagccaactaaagtcatgaccatggaggtaacgattttttattaatagtgtggtcatctgataacatgtacatatgtttttattactttcttgtttaggaatctcattaccatgttgttattctagtttctgtaatgagtggtacctgcagagaatgaggcataattacaaactggcaattttctctctcagaagtattataaattttccattactaaatttgaaggattttctcaatatgattatattgtattttgacatttgaaattctgtgggacattctttaatgaatatgttacattctccctaaagccatagggaaagttggatggattttgtgtcagtctgcatttagtgatagctacattatacttcagtgtaaaatgtgtgatcctacttcagatcttccatctgtgattgtttagtgtcaaacttataaattcttctttctttctgatagataggaatacaataaaaatttaaatgtcttcctgctaagtgctgaaattgaagcagttataagaggacaaaatacactctactgaacagtaggagtgctaatttttggcattttctcttagcttgttgaaacaagtttgctgaatgtaacatcgctagaagaagtctataaactgagctgtgaaaaactgcaaaattctcaatatgagcagttgtaaatggcttgcacccctgttaaaatgctcaaagacacaaatataatctatttttaaatggcatagacttaaaagtaatgggcctgacttgattcacagcacactgataaccaattttggctggcatttaatgacaactttctatgaggatgacatggggctatgagttaaggaagtgctgcttacagttacctggggagcttgaaaatactcaagcctgagcttcatcaaactttcacactagaatcagtgattgtgaggctgtggcattagtggtttttaaaaaatctcactaagtgattttattttgtggagttgtaacataatgatctactgattggaggaacatataaaaagaaagttgggtcagagacagatccagactg

SEQ ID NO: 62162 - DNA, 987 bp, Bovine  19866881175628
  misc_feature (1)..(1): n is a, c, g, or t
nataagaattgtccattcctcttctatccccaaactctacatattactcaagtcttaccataagcttcacaaaatctccctgacaattctttagttagcatgaaagacaccaggggataaaccagttcatgtaaccagtcttcccaacacaaccataatgttatcacgtaagacattatcacataaatgtctatgtgatagaaatcatgtactataccttttttaaaaaattaattttaaataaattgacctgaactgaattaataatgtgtatagaaagctaagaaactcatataaaattcaacatcaactctgaaacagtaaaaaaaaaaaaaaaaaagaaaccaatatacatcacttaagaaattgttttcagagtaattgaaacaggaaatggaaattaagaaaaaaaactcttaactacattggaataaatgcaacttaaagtttatagtatcaatactttagatacctacaagtgtggctatataattagtatggtgtaggcttctagaaagatattttcataaagaaaactaaacaagaaattatttgaaatgctcaaataagattatcctcttcttttttcccctacagtttacaatccctgtttaggggccttttacaacatgtttaccactatgaaaagtcaaatcattaaactcttcactaatcatatttccttattaatgcataaatttgtgtaagttttaacacacatggtcattcatccgaacatataccccaattaaaaaaataataatatattcagcctctagtgagaacaaattcagattggtctgcatgtatagcctacattgaaataagaatgcttatgattaaatattgaaaatttccccaaacgttatataaatctctggtgacgacagcaaaagaaagaaagcacaaaaacatcagtatccttaaggaaccatcagcttctttttgtttgctccagttataaattttgcatctgtgcattgctgc

SEQ ID NO: 62163 - DNA, 3443 bp, Bovine  19866881299739
  misc_feature (1)..(1): n is a, c, g, or t
ngttctatccctgggtcgagaaaattcccctggagtaggaaatggcaaactactccagtattgtagcctggataatcccacggacagaggagctacagttcctggggtcacagagttggacatgactgagcacaaatgcactttacatacatttgatcctaggaaatagcaaaggttaaagaaatccccctactcttgtgttccagcaaacagcatactgcagaagccaccctaccccatatgatttagatacaactcacagatgtgtccttatatacctatgacaagtcagacatagactctccaaatgtccattctttgcctcataagtgatttgctgaactgcctattcctgctaatcaatcagaacactcaaacttaattttctctcctttccccaggtccctgaattttgacctccttcatcctaagccagaatcctaactctcctaaagagcccctgtcaagagtagggggcttcacagtaaaccactctttgatctgttgtctcatcaggtcatccttcatcctactttcccatacctggttctctctagccttgttgacttctccctagaaaagaaaagccttttcctgcttaactgttgagacactagcagatctcttgtccagagcattctctgtgttgcaataatagttcacctctccaactgcaatagtcactccctccaatctgttcttaggccaaattcaatgctttgatatttcttctcactactaatctctttgggtctgtctctctctcttacatacacacatacacagattccaatatggctatttatgtttctttaattaacaagtgtgatgattgggcaagttataggtaggttaaccatagaaaagctaatttttctttatctctgaatttctgcctacctttgatgttctctcaaattgcttggcaatctcaaactccttattgaaatctcttgttttatatagatgtcttttaaaaccgattggtaaagccaatcaatttaactcagaagaaaaacaagcttagaaaacatgagcagcccttgatttaattgtttcttttccttctcagtaaacagaacatgatttgccataaaaacctcaaactgtcatagttgactgaataaattctgaggattttagatagaataaataatgcttattctaacttggtattgttttggtattttttttttctcatgggagaggatttgttatgtgttttaaaagttaaaaataatatttgtttttcatagcattcattacttaccaggcctatgtagactttcatggtttaagccttttcaaattaaatttgaaggactgctattctttcctatcagagtaaaacacattctaaatcctaataaatctatttctttaatatgccccttgatgtataatagtgcaaacaaaaacacataatgggttcctcttgagaaaggaaaatgtattcactcctgatgaaagatcttttgataattcactcttggcttcaccacttgatttatatcatcttcccacattaatttgtttttaattttttcctgccttctaaggtttttctcatttcagtgacatgtacgtgacagatgaggttgatgaactacagaagtaaagatccttaactcagatgaaaactttaaattattctgtagtcccatagaatccatgaaagaaatcgaggagcctagatttccaagagcttgatcatagtgttttagaaacaagtgacgaaattgacaacaacaaacattaaacagagtatgtttcttttaccaatactgagtggctccctggagtgtattttttccaagtcttcagccaattcagttttgtaatctaaaatgatggcaaatatatggaagctctataaaatttcttctttatcgtagattttaatttcaaaaatgtattccttctatgaacttcatttcaatttaggggaaattaaataatttaactatcttcatttaagtgaggaagcagcaaagatgacaatgtctcaaggtaaaatttgtatatgaatataataataacccctttacacattcagcctatgtatgtaccttcatagagaacttcaactacttcatttctattttgttttccactagcagatttagaagctactttattagattatttttctgtattctgtcttagtaatggactaatgtttgggtaatcttttcttctctgtgattagattttgtgattagattattttatgtatctcatcagttgtcctttgatttccacctaagattgaatcgaaaatatagctctactagaacgctggcctcctggcactgcttcctggggtaattaagagtcattgtgtatcagtttcttcatctgcaaaatagaattcaaggggagatgagaaaggatcatacatttaaagcatcagttgctggggattgattgatacttttaaacttggtgcagtcatccctcagtattcacagggtattggttccaggaccccatacttgataccaaaatccacagctgctcaagtcccttatgtaaaatgacatagtgcaaatcattccttggtatctgcaggtcccacatcctgttgatgcagaaggttgacttagttgaggatgatgtgtcccatttatttaaattattagttttatttaaattattagttttccccagagcacctatatatactgaacttttaatattagactgaattgtattgaacttctgactgtatacccattggatgctagaaatatcctggttcaagagtaagtttgacttacaaaaacagctgaccagggcaatttattaaaaaaaaaatacatttgcctttatgcttgtccatgctgaagctgaagctgcaatactttggctacctgatgcgaagagccaactcatcagaaaggaccctcatgctgggaaagattgagggcaggatgagaaggggatgacagaggatgagatggttggatggcatcactgactcaatgtacatgagcgtgagcaaactcagggagatagtgaaggacaggcaagtctggtgtgctgctgtttgtggggtcgcaaagagctggacacaacttaatgactgaacaacaacagtccttttgggaagtaaattcttcaagaagaaataggaatgggaatacttttagatagtaaattccttcagaataagtcagctcagtgcatttcttacttaacactcctggagcaatactgtattcagaatgctggactggaagtgtttggtttgtgtgttaaatttcaggatcttcaagctgcaactacaggaaggtatggggaagactattcctgtccctgtggtgaacatcttctcacctctatcatgggcatctctccagccagaagtcccctggggatcacagtttacaaatagaagatcttgtacaatgtacaggtacacaatatctttgaaacatggg

SEQ ID NO: 62164 - DNA, 1105 bp, Bovine  19866881359875
  misc_feature (1)..(1): n is a, c, g, or t
ncttttatacattgaaataatagttgttttcatttattttaagaaaggaacaagacactcttcttgctaacttttttttttttccttccaagctaaatggtagcaagtatatctgtaccttgtggaagttattgaaagatctactgcacaacactttactgtagtcattaatcaagaagtagcagctgttacagaaaaagaaaaaagttgccaaaatcgtacagtgcagtgatcaaatcatctgcacaaaagtgagcacatgcacacccacacacaacaccactgtcatttggatagtctgtacaaaagctgtgatttcagtaaaagttcaacaaagctatttttgttctgtaggtgtgcttgtatctgtgtcataatttggattgatatgatatataccctaagtttgggttataaagtaagaatagtaatggtgtattgaaattatttcctgtcttgcatttagttactgaaagaatataaagatgaagattggaacatggggaatatagtgtatacactcacaaaccgacgctaccttgaaaagtgcattgcctacgcagagagccatgatcaggtaaataagtatgtgtgtaaaccgttctctctctgtgcctgtatgtgttaacatatctaaaataagcatatttcaatacaaatttctatagttcaatacaattaatgcaatgtgttatatgtctgttttatgtgatagctactcttacttgaaaaatgtttcagggacttccatggtggtcccgtagttaagagtttgccttccagtgcagaaggtccaggttcgatcccttgtcagggagctaagatcccatgcatctcacagtcaaaaagccccaaacataaaacagaaagcagtattgtaacaaattcagtagacattttacatcaaaaaacctttaaaaaagaaaaacattaaaaaaattactttgtagatccataaatttcagcttcaaaatgcagtactacttttaccctgccaaactgtaattaaacgactgtgaatgacagttgcaagtgctatcttacaagttttccttttgttgtcacaagaagaatgttggtgctaatccaggttaattttaatttc

SEQ ID NO: 62165 - DNA, 1951 bp, Bovine  19866881373346
  misc_feature (1)..(1): n is a, c, g, or t
nccaggagatgaagaaatctgtttaatttttaattctttggggaagttgtgggtatctaatacatatttattggctgacaggcaggacaggcttcataataagaaactcagttgagttaaatatccagaagtttttagtttttgctggtgttttcttcctgtgttcacaactaaatcctattcaaatactgccttctatggtgagttgagatggaaatcaccccactcttttagtcagtgtgtgaatgacctctgccgggtaatttaccagtgataaatgtaaccatttgttgttgctgttttttcttttgcctggaagcaaaattgtgattgccatggaaggccttgattgaaagttgatagtgtatggaatgatagaccatttaaattggtctctcaaatgggttaggaaatcctgaaaacaaacaaacaaaaaccccaccatgacaaaacatatgcactaatgagaaacagaatagaataaaatagactttatgattgtcgatcctaaatagctactcataaatttaacaactggtctgtggggtcacctgtacaattgattctataactctaatataaaaatgtaatacatgagaaaaatcaaatcaatactcagatctggggaagtgccacaaaatgaagttatctgcaggtgtggtcttcacttcatggtaaatttgtattgtagtatggatggttaaactattagtaaatccctttaaagtttacagtactttatttaaaattgtaatgtgcatattcagttatttttttcacaatactcattagataatattgtcataataaatgtactggccttccagctctaaaagttgaagaatatcttagaaatagataacaaagcctgccagatttgcaaatgaatcctttcttgaaaatagcattgtttgggacatcttggaaacaataatgtgagaaatatatgtgttgctattggctacaaacataggctcccccccccccccattttggtatggaaataaatatataaatattgaaattacactgctgtaggagttcattttagttataatgcacactacacctcaggccattgtccttttagaaacagactaacacacaattctcttgagtttgaggttgctgagttgcttgggccttatgagattaccaaactgctcataattcttaaaagatatgcagtctctgacttttagaacagcaatctgacacctaaagggctatttaagcaacaaaaagggatatactttaggaaaaattggtacaattatgactagaaaacctgagctgctcctaatgtgaatatagactgaagcttttttaaagcttatgtgttatggttatatttaaattattgtctgcagaattctaaagagcattaaatatatttttgttgttttctagacgattacacagaaataggatccttaataggcgcttttgttattgatgctatcatagaactaacctaatgtggttatgccttagcaaggtcaggaagttaatacccacacaaggtattccaaagggaaggaaagggcaaataaagaagcaaaagtgctttctcattgtaaggacctcattaacattgagtagtgattctacaaactggggaaataacaaggaacagatttggaagacaaacaagaggaagcacctaaaatatgaaactctagccatgacagtcagtggttcacagctacttcaggaagaatacttccaggaagactagcaatcccaactcctatcctatcaaactctaacttaattggtctaggtccagtctagatttagtcatttacaatgactccaggtgatgctaataagccaagaggtttgaggaacattcatggtaaatgtctttgattaaaatgctatcttaacaaaaaaatagagacttttaaattatttttaatgtcatatatatgggggggggggggtatta

SEQ ID NO: 62166 - DNA, 1341 bp, Bovine  19866881397214
  misc_feature (1)..(1): n is a, c, g, or t
nattgtaatgtctagtataggaaaagaaagataaagaaaatcatagatattttaacctttttttgaaaatgctgctgctgctgctaagttgcttcagtcatgtccgactctgtgcgaccccagagacagcagcccaccaggctcccccgtccctgggattctccaggcaagaacactggagtgggttgccatttccttctccaatgcatgaaagtgaaaagtgaaagtgaagtcgctcagtcgtgtcccactcctagtgaccccgtggactgcagcctaccaggctcctccttccatgggatttgccaggcaagagtactggagtggggtgccattgccttctcctttatgaaaataaggtcatcatttaaaaatgtgactcctgattatgctactcttaagagatattcattctgttatgataagtaatggtaacaaagatgatgaataattatcaaatggttacatacgttatgatgaaccatagcatgattgtagtttaaaaatgtatattacatctaactataaaattatgagtaattctggtaactgtttgtttaatgcacactattgattttgtgctgtgtgtttgatccagtactaaagctggaggtatatcttaccttattactttttggtttctatttctgtgttagcttttattgtcgtatttgattgatagtgcttcatctgagatctagttcatgcgtttctctgggaaccttaataagaggaatttagagagaaagtatgcactgaagggatgtcgctgtgaccttgattggtgtctagtggctgcctgttatcaaagagcttgactctgcatagtcttaagtagcgcagcagtccctatgatagttaagatctcctcccagcacttagtggacactggggcagccacagaaaaagtagatggttcttgtcttcaaagtatagatttaaagggtttgggtagtgggcagatggtcagttgtcaagaggcaatggaaggcgctttgtgtgttcaaaaagtatatggcctagtcccccagtgatgggggagagtatttagaatgagagggctccttgcaaggctctgttagaggtggttaaaagggacagaaacattttaataagcttgttttaaattttagagtttttgaatctgatcagtgcaatagttaagaaaagcatgattattcctttgtttgaatttagataaatagctattatgtcagaagctagaaaacctgacaatagtaaatgacttaaatgttctttattttattgtggaattgccttaatggcagtcagatttattcttgaacatgttaaaccttcatataacttgtcagtattttc

SEQ ID NO: 62167 - DNA, 1024 bp, Bovine  19866881400949
  misc_feature (1)..(1): n is a, c, g, or t
ntcacacacacacacacacatgcacaattacaagctagcatcagtgcatttaaaaaaaagccccctggagtctggaaaagtcattacagtcaattcacttttttggttgttgttgctacagaggcatgaattttttctacctcactctaaatgcttctaagaaacagcagctctgcccttccttagtgcctgtggtagcagaataattctccagaagtactttgaagccttagggtcattttaatcacgtggctcttgctgttcttgatatttccaataaaagaaaaatcctagcaagaatatttatgtgctgattcccaagtaactgtgcttcatctataggtcaaattctgttatgaaagaaactacttaaataaaattttccatgtaacaaaaataccctgctgattaccctttatttcagaaaatatttcatcaaaattattgtataagaccgcagccagacttatgtagaattcactgtaatgggctctgatttattgtgagtctgtaaatactctcattcgcataagctattcataggcaatcctctgtttttttgtattgattgtttctctattagggatagatgacatcaaaattattattctccttgtgcagttccgaagcacataaaattcattgtttttaatcaagtcatttcactttccaattcacagactcttatttgctgtgagtcctgttagtcattagtataaattaggatgggtctacaattgtaatgatgcatgccttattaacctcctccctttatcaagcactgtgatttaagagatatcagttcagcctacacagtctgcaaaattaacattagtcactctggaaataatcaagaaagaaagcgctttaacaacatagaaattctgagccatagtaggaccatcagtcatttgtaaactcaaaacttatggaaagattaaagagtagagacccatacgcaaatatgtgtgcatctaaccaggaatatacgacttcacttatattggattagttaccccatata

SEQ ID NO: 62168 - DNA, 703 bp, Bovine  19866881492738
  misc_feature (1)..(1): n is a, c, g, or t
nttttctgaggagagaaggttttcttcatctcctccaggcatctgagtcttaaaaagagtaagaactactcactgtattagaatgttaggaactagaataatggaacacaagtaaggatttctaagaaaagaaagtgcagtctctcaatcgtgtctgactctttgtctccccatggactgtagccccccaggctcctttccgtccatgagattttccaggcaagaatactggagtgggttgccatttccttctcccagaggatcttcctgacccagggatagaacccgggtctccctcactgcaggcagactctttactgttgagccaccagggaagccctggtggaaggatttctaagctacataaaaaaggggaaaaaaaaaaaaagtagaaacctaaattgaggaaggcattttaaaaatctttggctgggttattcaacagataagaggcttagaaaagtcacattgaaatgaactctagttcagagaggcaatgagtgtgacttcagagaacaaaatttccaagtccaaaaatacgcgttacaagtaaccaggcactaaccatcaaagcatgctctttctgctcattaaattacgattatgatcactaatgtaatacatcggatggcacttgtttcaaaatgcatggaggatggtaattttttgagctgtcacttgagacatttgtaagaaaagttac

SEQ ID NO: 62169 - DNA, 673 bp, Bovine  19866881976549
  misc_feature (1)..(1): n is a, c, g, or t
ncaaatgtgataatttcttcttccccagcctcacacaaagagataatttgttccatgcccccagcaacaggtgaatggcacaaagcatgagcaatgcctgcatgcaaagaaaggcacgttttgcagataaaatgggtgacagagaaatgatccatacgcacaattactaaatttgcattaatcattttgggatggatgctctcattgtatgggtcttgagaaatttggcagaggaaagctgttgcctaagggataaaaatagctttattcttgccatcataagcctcagctctggggcattcaattcccttgccaactttttgaaactccagcccaaggcactagagtcacttaaagccttccacttctcaatcaaattccaagtttttctttttccgatacttaggttttatttgttctcaaacaacagtatcaactcagcttgcattctcatggcaattatgtgctgttcccatactagtatgagaagaaaatgttaaaaagtatcccacaggtaaatctatagaaggtgaaacacagctattagtataaaaagaaaaattttaggcttcttacaaaccattcatcctgctttataaattgtcaggaagaaatggtcactcattttgagtgccactgaaacccatgcttaagcccacaagtgaaaatgaaa

SEQ ID NO: 62170 - DNA, 1125 bp, Bovine  19866882118968
  misc_feature (1)..(1): n is a, c, g, or t
ntgaagtgggtgttttcgaaacgagaaggctgaaagcgttggctgaacactttaaaacaaacatggggaagccagtgactaacactgctatagttaattaatgattctagaaaattccactaagttctttctctccctttccatttcctctgtaaacagcaccattcatgtctggttaatttgaaaaacctctaagcacaaagttcctattgggatttcttttcctgtaattaattttttgctgtttgatgtaaaggtccaaactataaattgacaagaagccagctggtacagtgatgaaattcaagacaatgcaactaatgaaaaaagcccctgctctgttagctgaacgttttgattagccactttgtgtgttttgtttctctaaactgtaatgcatactaattttacctaggaattaattaaagtctatcacagcctccatgctatggatgttatataactctttgttgatacaaagtttatgtatatatgagaataaggtgcagttttaatgagaattaaaaaaaaacaaacacttttgctcctactcctcttgatggtaccaaaaactaactctttaaaggaagtatctattttaaaatcaaatgctttgacctttctcaaggccatcaagtcaccaggaggttgttgttcagatgctaagtcgtgtccaactctttgtgacccatgaactgcagtgtgacaggtttccctgtccttcaccatctcccttaggttggtcaaactcatgtccattgaatcagtgatgccatccaaccatctcatcctctgctgcccccttctcctcttgccctcaatctttcccagaatcagggcctttgccaatgagtcggctcttcacatcaggtggccaaagtactggagcctcagtttcagcatcagtctttccagtgaatatttcctttaggactgactggtttgatctccttgttgtccgagggactcttaagagtctcctgtggcatcacaattcaaaagtaccagaaggtggggcacagtatgtaattctttttctatattagggagtgtgagctcccttttcagaaaaataaaactgctatccagtcttcctcccacctttgacactgatcaccaaggctc

SEQ ID NO: 62171 - DNA, 715 bp, Bovine  19866882254286
  misc_feature (1)..(1): n is a, c, g, or t
natttttgttattttaatataggtctgactttagagttttaaatctaggacagttgaatagaaagtagtataatatcatctgctacttttaaagaataataatgcaaatggaattcttggtaaacttcaaattatcatgttaaaatccaacttcagtcttatcttttattacaaaggaaatgtagatttatatttcaagatgcactaaagccaacaggctatttttagactttctaatcaaaactgatacactgataaaacacgtcccctcacaaaatgagttaatgctacaacttctccaatttcagatatttgatttcatgactgtgtatgattcatcaaaacttcaaaatgtacatttcaaagcatttacctgaacctctacaggaattgataataaaaggatatacaataatactgatctttcttgagcaatatttttgttaccttataatatttaattgtagccaatgttattgacctaaaaagtcttaagtaatatttatgccacacaaatgtcttcacctggggctttccctctaaaatatatagtatatttgatgtacctaccacatatctccacttagatgcttgctgaatttcagaagtcaacgtaaatgaaaccatgtcccatatagccccattctgttctttattcagtgttattcatcaatatttatggatcacatactatttaccggtattattctaggaa

SEQ ID NO: 62172 - DNA, 2478 bp, Bovine  19866880619342
  misc_feature (1)..(1): n is a, c, g, or t
ncatcaggatcttttctaatgagtagctctttgcatgaggtagtattgtattggagctacagcttcagcatcaatcctttcaatgaatattcagggttgatttcctttatgattgactggtttgatctccttgttgtccaagggactctcaagagtcttctccaacccagagttcaaaagcatcgattcttcagcactcagccttctttatgatccagttctcatatccatacatggctactggatacatctgcaaagatcttacttccaaataagctcattgaggttccggctgatgtgaaatgcggcggggcaggggcggggtggacactcttcagttcactccagggaagatcaggacagaagttgctggatatccagggctgtcctcaggtccagactccctagagctgaaggtgacattcacggagagctgccagctggctcggtaccctggtggggaccaccccccgctcttgcccctcctcaatgctgagctccctcccagtagggtctgtgtagccctgccttttgggaaggacctgcattgccttctttctttagggggtggatagaggtcaggtcaccttggattccattgccatcatcaccatcgactgcactggttttctggagtgtgtgtatgtgtttaacttgttctgctttttaaaaggcacaccagagcagcaaaagagtctggaggtccttctaacatcaccacaggctgacagagggcccattgtccccagggccagggtccctctggggagatataggtctctcttctcctgggcccagagcaggtatgagctgtccctgaatcctgcttttgcaggagagcgggcggcagaatggaccccaggagagtcataaaccccaggcaggaatgaagcatggctgaaaatgctgggctttgaatggaataatatatggcccaggagataagcctcctcttattccagggcttgcgttgctgtagcaaagccccagatggattcctgggaagagctgaactaggaaagagacgtaaggactggcctgcctgccctcctgccgtccagtgctcagaggcagtcaagccagagaatctgtcctcagggagccccttattcatgggaaagatgagcacgcaggcaggggcttgcggggaggagtgtggaagaaggcagggaacccagctgtgggagggtccagaaggtgggctttggaacacacccgcttctctccatctggtccccttgcagcttctctggtccctgacaccataacagccccccctcactgggctcccaagtttcccccagcaatcccaaacactctccacacaggaaccagatggactttagaaatcagatgaggggctggcgtaggtagagctctttgggatgatccagtgataaccgttttattgagaatgacaaagatgtagtttcttatcctcacacactttttcaccctgtactgagaccaggaaggactgttgccaggacacaggacatggatgaatatctccagccacagtgagcactgacctctctgagcccccaagaccagcaatgccccatatggagcacttcctccttccagctgcttcctgactttcctggggaagaaataggtgaggaattttgcctataaaccctctattctttgaaaaatcaaacacagctcttagagaccaaacaactgacttcgcccagacttgaagggtccttgacatggagcgagggccttggaggaaagacaagttctcacccaggagataaaggcatcctctcagtaagaaagagcacctagagtttccatttggattcctgaaggccttggggaaatccagggggaccgtttccaggtggtttcagaagtacctgacatatggtaggtgctggataaatatctgagtaaaccaaagagcaatggtattaataattgtgttaaaaactagaggctctttatcgggcacttacgaggaaccagtctgtgcagagtgcttgactcttaacgggagacacagcctgtcccctgatagtgtcaaaactgggcacattctggctgcatgcaagggtggatgcctgcctggctctctggaagcccacgtctggttagaaagacaagataccgaaaacttcaccactgataagggttaaacggccgttcaatacaacaatagaagagatgttcaaggcactacatgattaattgccccgggagtcatagggatgataaatgttttagggactcaggggagggagccatttgtccaaggctggcagaagagacagacatgggtagggggaagtcagtgtccttttgaagagggaccatggagctgtcgtgggatctacaatggtgtgatttgaggggcctgtcttttttttttttttttttttttttaaggagtaaatctgatgcttagttacccacttgctctagtctccccatgctggggtccttagaaaaccatctagttcaagaaaa

SEQ ID NO: 62173 - DNA, 915 bp, Bovine  19866880695371
  misc_feature (1)..(1): n is a, c, g, or t
ncaaaggaaagttgctgctttgcagcgaggcagcaggaggcctgcttccccggtggtgagtgtgagctgtttgcccagggagaatgctgccacagggactagcactccaggtgagctcgggacatgatctgcctccccccacccccagcttgaaacaggaatattacactgagccctctgccatcagcgccaccagctgccccgccccaagctaataagaaaacgggtcttcggatctgaggagttcgagttatctttttgtctgatgcatctgaagagtttacaatcagaatggtgctcagaggtgaaattctgaactctgactgaagtcccagaaaggatccctccctgtttgcaaagtgaaaacacatctgacaggccctggctccctggaaatccatggattacttacttaaacagtattttcttcctttcagttttgagacttttttttttcctccagaaaacgagttcctccaagggcctgtagctaaagacaaaagtcgtttcattttttactggtcatgaaataaataagatatccttcaaaaagttgttctttttcaattggactggatttgctcttcctttcagctgaacaagttggagggaacagtgtcatcatctggctaccaacctctgagaggactgggtttatatggcaattcatacacaggatgtcatctatgggttaaccttcctaattgggggacacactgtctgaattagtgacaagactgaattacggtgcgtttaagaaagattccattttagtgctttcgagttcctgaaaccgttagaactggtctcttcaaggacctcccagcacagacctccctgggaatctccttgaagcagaggagagaagaggttgtcagcttacatgctaggcagtctgaaaacacgttttatctc

SEQ ID NO: 62174 - DNA, 935 bp, Bovine  19866880786760
  misc_feature (1)..(1): n is a, c, g, or t
ntcctgtatcaaaactgaagacggcttgaaacagctccacaaggtaatggcatatctttcagtagctgagaatttgaagaattgttttcccgtatcaagaattcatacgaggcttgtcttctgtcttaactgtccctagcactttcgtctgtcatcagctcgagatggggctgtgaaaatgcagcctgtcgtattcttcagagcccaccgtgtgggctgtggccgtttccctgcaattagtgaatcccagtgcaccccacatgcagagttgaagttgctgagaacccctttctgtgacagcaaactctgaaagagtcggggttttcttccttttagaaaatactttattccttggctaggccctcttgttttagggaatcgattgagtgggtgtttgttaaaacccgtgttgcgcgttctgtctgctggtagctgctgactcaggcctcccttgttgtggtacttttctgatgaattgctgctggggattcattctggagaagataaaaatctaattttctcttttaattaccacagtatatctgtgtaccaccttgaggagagagtagtctgttgaagtgagagtattagctttctcattctttgctaatactctgatggctgtctccagaatgtttttcatgatatttgttaaaaataaatggaaaacatccttaaaaatcttgtaatcaaccatgagaagcacatatgtacactgctgagtgactctcatatataattggctgcatgttttcttcagaaggaatgaaatacttcacagatgaaataaattctgtccatctcctcatggacagcggtactcctagccatgtgtgatggtcattttctctattcactaatgtacttctctgtcatctctctgagaccagtcgcttcctgtgggagaggtgaccatacctggccgtggtgccagg

SEQ ID NO: 62175 - DNA, 913 bp, Bovine  19866881198822
  misc_feature (1)..(1): n is a, c, g, or t
nggtctaattgaatctctggattttaaatcatctattgaaaagtccttccccaccctcagccccatcagaacaatgcttatgaattaaaattctctccaatgcaagcattttttaattagattgagaccttggaacctggtaactatatttcttctctgagtactgtctgggtgattacacgaagatgaaatggagaaatattggaaggaaggttgtcccaggttctccagcacctgcccaagtgtacaggtactcagaccacctcagtactcacggaataacagattggcatctggcttcttggcataatcggggagatagaaccacctaatgagatctgaatgtatttctgtacttgtggttctccacgggtaatctgtaaaggcaggaggaactgtcttttcatctttgttatttttctaaagatcatcaagtctgtgttctaggaatgcttctttcaaattatatggaatgactaaggtgccggatatgattttgggtcaagagaaggactttaagttcagaggatgctagaaactgcttcaacctctgacccacactggctgacttgcttggggaccccaaagcggtctacctcgtggtgctgggggtcctacctgtagacagctgcccactcaggctccatctgcagggggcagacccgggtggactaccaagtcctgctgaggattgagaggcaagggctgagcaaggctatggggtgaggggaaggtgtgattaggctaaaatcttcagccttgatctaggacaaaaggggggcaaaggcaggagggagggtgctgagactgtgcaaagatgggaaggtaaggaacagggagcgtagtggggaaccagacagagaaaaagagggggagggaggagagtgagggcaagaggaagagacaggagaag

SEQ ID NO: 62176 - DNA, 2246 bp, Bovine  19866881232883
  misc_feature (1)..(1): n is a, c, g, or t
nttctgccaggactgagtggtctaggatggcctaactcatgtgtctgggatgactggcattgctgtcatcccccacacacatgagcctctcatcctctgggaatctagcccagacttattcatgatggcaaaagggtccccaacagcaggagagggcatactgcatgctaagtcactttattcatgtccaactctttgcactgctagggaccgtagcccacgaggcttctctgtccatgggattctccaggcaagaatactggagtgggttgctatgccctcctccaggggatcttcccaatccagggattgaacctgtgtctccttatgtctcctgcgttggcaggcatgttctttaccacaagggccacctgggaagccaggtggtttttaattttcagcttatgtcacattttctcaagtccagctgcttaagaaagtgccatgaccaaagtcatattcaaaggatagacaaatagactccacctcctgatgggagggggagaaaatcactccgagaaggggcctgaaaactgggaggaatgatggcaactgcaaccatttttgcatacaacctactatgtgtgcgtgttcagctgctcagtcctgtctgactctttgtgatcctttggactgcaacctgccaggctcctctgtccgtgagattctccaagctagaatactggagtgggttgccatttcctcctccaggggatcttcccaacccagagactgaacctgtgtctcatgtgtcctgctttggcatgtgggatttttttgtttgtttggttttttttaccactgagccacctgggaagacctgcttggcacataacagatgcttaataaagatttgtcaaattagtaactgcctaaaattggcatatccatgcggaattggagagtggtattttgagatggtgttacccatcaccactcaaaaatctacctgcttacctggcactacctccaccttgaaggtcactcatggggccgaaggaagctgttgggatgataacccatctttcctctttccttccttctggccaaacgtcgagtgatggacctgaatatttatttcagaaagaatttcactttcatcctgaaaaaggaaattgttctttgtcgagagccaagatgagaagttggagcagagtacccagcaccagggctccctctgccatgcctcacaccatcacacagattttcactgtgattaatcccagaaagagaaagtgcatgcaagccatggcctttgggtctgtggatgctggtatttcagtcctggcagtttagatgctgggtttagaagccactccacgcacgccatccaacccgctgcgcaatgagtaaccgcacccttgcagaatgctgctctgtaattagatccctccagcaggacctggctggagccatttcagaattctctcttgctacttcaaagccttggggttccccccaccccttccttaattagataatgatagagggaagcagctacgtaatctcaccagcagagtccttttctgcttgtggttttgctcttactccttggagaatccatttttagcttccacaaagggttgagggcactaagcacagaaatcttcaaagccattcccagctccctggccctaatgaaatcccacccactagaaaaaagctccctgcacccaccctagcaaggcagggctgatgaacagctaggcacaatcatgctccttcctattctctctcttctgcttccacaagccccacatcctacccaccagctagtctgcaagtcctaatattccctggatatgccatcatcaatctcagctttgatcctttgcatatagagcttctgtccttgaaatgagcttcccctttactgaactcaaggactcctgggcacccatcgaaaccccaagctcaacaccccttcttccaaagatccattgctgacctccccagtgggtttcagtaaccttccctgtgcttccccagcccagcaaccatgtctcaattatcctccagcccagcagtgaggcaagattgtcttggtacaatccagcaccagactgcaccccagggtttccgggggaaccaggaacatgtaggcagcactagttgctctctgctcccggctgtgcactgcacctggagtttctaatccttggtttaagtcctggatttggcactggttacccacacgacttcaggcaagttacctgacttcttgggcccccaaatttcctgtcttg

SEQ ID NO: 62177 - DNA, 715 bp, Bovine  19866881703482
  misc_feature (1)..(1): n is a, c, g, or t
nctgcttttagctattgtccaattccgcctcagcaatcctgtttctctcgttttgtagatgttgtaatggaggtggaggcagaaggcctctggatagcatcatttcatctctttttctcagaggaagtgctgagggaatcaaatgtatttgtgtgtgtgtgttttttaacttggtgctctgactcagggcaccatcatagacctccattttcatcagcgatcagggagatagagcaactccctttctcccccagaaacttcccctttttccagatggggaaactgagagcccacagagggctcgccaaggtcacatgaccagcgaaccccacggctggaactcacatcttcaacgttgtcatttccagaccagcacgtttttgcttatgcccttttaattgttcatttctttccataaaattaaatgaccttcttccagaaagacttaatggtcaagatgtgatttggtaaaagcttcaaggatttttttttttttcttgttacagagattagagcagactaaggctaagagatttgcaaacagtggtatgtcattaccccgagttcagttttttgtgtaactgatgtgaagagattgctgccaatgactcaggttgccactgagcagacagcaacgctgctttggtgacctgcctcagtgtgcatgtatgtccgtctgtgctgtttatataaaaggtgtgcgtctacacaaaag

SEQ ID NO: 62178 - DNA, 1604 bp, Bovine  19866880395422
  misc_feature (1)..(1): n is a, c, g, or t
nttacagtgccattattctgtcacttgtccagtttaaccagtcctgctactgtagtatggactatcttgtacatacgttatgatttccccagatctaaatgttgtctttttggcagcactgtttttaaggagtgaatgactgtttctttggtggcaccatgaccctgaaagcaaatacaggtggaaaatctaaattctgaaaatgaattgaccttcattttctgatctgtttatctccaacagtgttagcatcgcccatgtaacaagtggtccaggcatttgagaacccctgttatttacttactcagccttgggtcatcattccttcaggggagactccctggctccccagacctcgtgtagcccctctggtcacacatttcagtggatccctctactcttccatggccatgcttctcacctttgcaatgaaatatttgctgcatgtaatgatttgtttaatgtctgccccctttactaggctctagacttcatgaaggacagaactaatgtctagcttcttgtgaagaagaaataccttgaaatatttttttcaacatagggtacctgacacgtgctcggtgtttgatgaatattggaaggaaggaatgcatcaatggaaggagtttgtgtaaaactgtgtttgtaaagttgtgcagtgtctggcacacagctgacacacgtaacagaagcagtaactattgttgataccttgatcagaatcatgcagtggccattgataaactagcttatgtgatttcacggtacttaaatctatttgcttttcattttaaggtgaaaattgacttgcaagtaaccatgcctcacagctacccctatgtagcactacagatgtttgcacggtctccagaacttgacagacagcagcagctgcttctcaacaaaggcctcacttcctacatcgggacttttgatccaggggagctctgtgtgtgcgcggccatccagtggttacaggacaacagtgcctcctacttcctgaacagaaagctcgtggacgaaccatcgacacaagcaaagccagtcaagaacaccttcctccggatgtggatctacagtcaccatatatatcagcaggacctccggaaaaagatcctggaggtcgggaaaaggttggacgtgacaggattttgcatgacaggaaagccagggataatctgtgtggagggcttcaaagagcactgtgaggaattctggcacacaatcaggtaccccaactggaagcacatttcctgcaagcatgcggagagtatggaaacagaaggagatgggcaagacctgcgccttttccattcttttgaagaattactccttgaggcccacggtgactacggcttgaggaatgactatcacatgaatctgggccagttcttggaatttctcaaaaaacacaaaagtgagcatgttttccagatattatttggtattgaaagcaaaagttctgactcctaggaagctatgaagaggcctctatgaagaggcctacattagctataacttaagctcactaagttatatttctattaataagagcaaaataaaaggactagtagcggttagcatcatcggggggaaaccagctc

SEQ ID NO: 62179 - DNA, 1538 bp, Bovine  19866880417894
  misc_feature (1)..(1): n is a, c, g, or t
nccctgagtggactgacttattcccaggctggcagcagttctgggcctttcatcagacagaacagtctttgaggaatgtccagaatgtcttctagaagattgagcagagctttagcagaagccccaggaagcctgtccatggtctcaatgggtcaaaggacaattttccaacctctggaaaggaggattggattgcttttagacagctaagactcaccctaggacctggggatggggtcagccttctccaaggctgtgtaggggaagaaaaaatccagagaaagaaactgaggtttggttaggaggcatgaaggaaggaatggatacagggcagccatccaataatccagtctaccagggcctgatgtactgctctttcccagtgcttatgcttcctgaacaagcaagctcccttctctatttggttccaggttaaaactgtctggcaactgggccccagaggtctcatttatgtcctccagtagcattttcctgaagttgactttctgggcacactgtctatgctaaaatcttagatactccatttgttactcaatcttttttttctttttttccctactgtttattcactcatttatttatttatttggctgtaccggtctttgttgtggcatgcagagtcttgttgtggcatgtgggatctagttccctgaccagggatcacacctgggccccttgtcttggagcctgcagtcccagccactgaacaccagggaagtccctgtctctcagtttttcttggttcttggtgctttcttgtggcctggcttttctgagcaggatttgtcttcttcttcttttttttttttaataattcatgaatcctctccctggcactctaaccatccaaggcttctcggctcccattcaagagtcacctttcctaggaactcatcctctggtcttgttattgactttggcatcaacttttgaaaagtctaaaacccaaccatgtttggtgatgccccatcaaattattttccagtcccattttagtttcatcgtcatcgcccaggagcttgaactgagtaggggagatggtgtgagtgcagaagcagattgctgctggaaggagccacaggtagggtttttttaatgtgaccggaatggctccactggagggacgccgtcccagctagagcctggaagctgcggctccacagctccatgtacaacatgaaaaaaaaaaaaaagaccaggcctgctcattctgtctgaggaagttgctgccactgaggaaagggaaagcgttgggtccctggaatcacatcctcaccagcaaataattgcagaaaattttaaagcattttcccaattttgcagaaatacaaattaaaaactgatttactgcaaggttgttctgcattcctgctaacaactgtgcatcagtccagttcagttcagttcagttgctcagtcgtgtccgactctttgccaccccatgaattgtagcacgccaggcctccctgtccatcaccaactcctggagttcactcaaactcgcgtccatcgagttg

SEQ ID NO: 62180 - DNA, 3201 bp, Bovine  19866880476000
  misc_feature (1)..(1): n is a, c, g, or t
nagattgcacccaagtactgcatttcagactcttttgttgattatgagtgctattccatttcttctaaggggttcttgcccacagtggtagatgcagtggtcatctgaattaaatccacccattccagtccattttagttcactgattcctaagatgtctgtgttcacttttgccatctcctgcctgacctcgtccagtttaccttgattcttgaaccttacattccaggttcctatgcaccatttttctttacagtgtcggactttactttcactaccagacacatccacaactgagcatcatttctgctttggcccagtcgctatcttctttctggagctatcggttattaccttccactcttccccagtagcgtgttggacagtttccagcctggaggggctcatcttccggtgtcgtatgtttttgcctttttatatgattcatggggttctcgtgacaagaatactggaatgggttgccattccctcccccagtggaccacatttcgtcaaaactcttcattatgacccatctgtctctgggggccctgtacggcatggctcatagcttctttgagttgcacaagcatcttcaccatgacaagactatgatccgtgaatgggtttgagtcaatacctttcatcaattctgaagtctttttaaattgcctttactccatatattctctcttcctttttttggagctatgatttaaaacatgttagaacttttcattctggcttccccgtatcttatcctctctttccttttagtttgatgcagtcccacttgtttattcttgattttgctgcctttgctctaggttacctgtcccagaatatcactgccgagaccaatgtcaaggaacttttatgtatatattctcctctgttttataatttcaggccttatatttaagtgtttaatccattttgagttaacttttgtgagtggcatgagatagggatcttatttcattcttttacatgtgcatatttagttttcctgtctcattcttgacaccggcgatacagatagccttttgtacattttggtcagcgttgtcatgagtttatcatatttttagtctttttaaaaacaaacttttgatttcattgatctattttactgtgtatgtttcttctctttaaattccttgtggattttttgaaagtcagtaataggtattttttaatactgataatactactatgttgaagagcactttaaaaaaaactgagaattgctcagtgttacatgtaataactgacagattccttccttaaggcaaaacttttcaatataactcatgtctgctcctttttaaacagaaagtttatcttaagaaacaactatttcacaaagttgcagtgtatctaattttattagcagtatgttatataagaagaataaattaattctagaatactatgtctaaatatggcagacagtcttacatacacataccttatgagtaaaattgttattctgtattttttagagtatagctaatttaaaaactagaatttgtattacgttggatttttaaatttttagtttaatctaaaggtttattctttagcataattaaataccaatacttttaaaattctgtaacctattacatgataaaacatattgtgtcttcaagtttctttctttaatgtgatacagtacactaagctgtcactaagaacactagatgtgcaatttgagccccatcaaatattaagtgggtgtgtaaagtaaacttttgctaatacaaatcctagagagggattttagagctgacagcattcaagtgtccgagaatgactgaaatcagccagtatcttgtgaataataagtagggaaaaggaacaggaccattctgtgaatatttgctgtgtcctgtccaactctttgttacccatggactgtagcctgccaggcttctctctgtccatgggattctccaggcaagaatactggaatgggttgccattgacttctctaggggatcttcccaacccaggatcaaatcttcatctgctgtatctcctgcatcagcaggcaatactttaccactgaaccacttggaaatattcatgggaagtctcgtgaatatttaggagttacattatttaaagggcaggtggacgaaagtagtcagtggaaaggaacaagagtcagagagagaaaatataccaggagacagagctcacctggaagccaaaactggaatgagtttcaagagaaagttgtggtgaatagtatcaaatactgcagacaaatgaaacagtcaggactgaaagtagaccaacaaatgtggcctttagtagagaatggtgatgatattgagaacagttttaatagagcgggtagacgtatcagaaggtgatagacagaagtggtttttttgtttgttttttcctccaaaagttgaagtaggaagacagcttcaagccaggaagtaattaagataaaggttttagaattttgttgtcatttgttctctttttagaatcattgggagaaatttaagcacagttgttagtgcaggaagaaagaaattatatgaaagaaaaagtatgttggataaaacagggccctgggaaaggtagacattggaccctgaggcaaggctactactgtagttttaagtcacactgtacctaaagttgaaggcagaaatgtgggaagttgagggagttcccactagatgacctctgttttcagtataaagtaggagcaagacagattcttaattcatttattaagcactttgtaaaggcaggacttggttttaaggtcttcagttcagttcagtcgctcagtcgtgtccgactctttgcgaccccatgaatcgcagcacgccaggcctccctgtccatcaccaactcttggggttcacccagactcacgtccattgagtcagtgatgccatccagccatctcatccactgtcgtccccttctcctcctgcccccaatgcttcccagcatcagagtcttttccagtgagtcaactcttcacgtgaggtggccaaagtactggagtttcagctttaacatcattccttccaaagaaatcccagggctgatctccttcagaatggactggttggatttccttgcagtccaagggactctcaggagtcttctccaacaccacaattcaaaagcatcaattcttcagcgctcagccttcttcacagt

SEQ ID NO: 62181 - DNA, 1169 bp, Bovine  19866880482218
  misc_feature (1)..(1): n is a, c, g, or t
ncttgggggtggaaataaaggatggtgtatgggtagggtggggagatgtaccagtgctgagagcacagaggcaggacacatcacccatgtgtaccaggtgtgggaggggcagggtcgttgtggctggtagctgtgggtggcaaaaggaggcaaagaagccctcctggggctggtatttgactcattgtgatgtattatggccgcaactgagtttgcagggaggggagaaggaggtccagagacaggtgtgcttgtttgctatataaaggaacccacattatatgaatctgaaagttctggggagcccatgaaggatattagagaagtaactttgtcagcattgtctactcagaaagatcactctggctgcactgtaaaggctaggttggaggagctacagattagagacagaaagtcgctttgtgttgtattgggtgagcctaaatttgtcaatggcagcaattagactggaacatataagaaatatattaaggaggagttgatggcaggatacatgcatatttttctgatttgcattttattattatgctgagccaatgtgtaaactaagcattttcgaggtacctggtattgtgatttgaagaaataaaatttaaatacaaaaataactatctgaagtttaaccatagtgaaaccacctcagctttatgtactccatcataacagtagattggattgctgcaggttctcttaacagggacataaagtcttatgtgctctctgatttgcagttaaattaaatctctcattatgtgtcagattttaagatacttgaaaaactattccaaaagcataacttcctgggtttcattgccttctcatccatatgcactcaatacctttttggtcttctgttacttctgctgattctgttttattggcctttacctgtctttagttgtttctgcttatatttttctggaactaccttttcccaggatttgggggttctttcatggctccttctccatcgccagtgactccagctcagaataacctgctacagcccaactttgaggcagcttttggaacaacgccttcaacttctagcagcagctcctttgatccttcaggtgaggcagtgatttttcaaatattctttttatttgttctgtttctaaaatacaccgcctcaggttcgtgtgata

SEQ ID NO: 62182 - DNA, 1546 bp, Bovine  19866880535221
  misc_feature (1)..(1): n is a, c, g, or t
ntgttcttgctgtgacctacttctgcaggtaagaaaaatgattttgccagcctttctgtgacacggcgatggttgaactgttcccaagtgccttggtgtaggtggccttgtgaggataagcattaattattttcagactgctgatgcatcacctctggtgtctatatttgtcttctaagaatgcatcatcactctctaattataggtgatcttgtgggattagatcttttgagttagactaggtgacacaaaatgtgcatggaaagcaaagcctggaaaacttgctgagctgtggtcactgtgttttgtgtgtgtgtgtgtttattggagtatagttgatttacaatattatgttagtttctgctgtaagcaaagtgaatcagttatacatatatctgttcttcagattcttttcccatgtaggttataatggagtattgagaagagttctctgtgctcatggtcattgttaagaccccagacaatgccttggtgttcagaataacatttggatcatcttcacattgtcattgtcaccacccgcctaaatttctgcatgttagatcacttgatgattgtgcatgtctttaaagtgtgcatttttgtcatgaaaatggttatcacccaattcttattcttggactcttatattacaccaactagtaacttttttaaaaaatcaaaataaccatggaatccccaggaccccactctgtcatagttacctcctcacagggctgtgaagggcagtgagggtctctgcccctcagtctcaactttgaggcctgtgaagcagtgctgggcaaagctgtaagcagtatagtctaaaccaagttccttttctgcctgggtgctttgcccagcaggagggaagtattaggagtactggagttgaaaatatcaaaattcccagtctgtttttacctccatcctattaaacattttctttttttgatacctgcatagaaaacaactaagcctgggttctagttttactcgttaatttaatcattttttcaatccagctaacaaatatttatggaaagcctcctgtgtgcaagaccccatgaagggatagacagaaatttagataagacattaccatcccacaagcaagtttgccttttgtgggggtggataagaatgatttttttttactgagaaaacaaaaatgccaagtgtcagcaggaagaggcatgttgcggcaagggctgttgaacattccatggggctgttgttgcatgcaaggtttgggaaataaaaatcaccagtgctttgtctttctacaaacccaccctacaaggtagctccctggaatcagcagttcaagtgttgaatggatgatgaacaatgttgaagatggtggccaaagtgtaacaatgcttttcttgcctaccacctaccacatctaaaactgtgccgtttaaacagtgaagttgggaagtgggggaaggactgcatccaatttcactcccctactgggccgcagatgtgcccacaggaaccagggtgcagtgtgaggctgtcagatttccaaaagaactta

SEQ ID NO: 62183 - DNA, 1001 bp, Bovine  19866880591358
  misc_feature (1)..(1): n is a, c, g, or t
ncatggaattcttcaggcaagaatactggagtggatagccattctcttctccaggggatcttcctgactgagggattgaacccaggtctcctgcattgcaggcagattctttaccatctgagcgatcagggaagcccataacctcacatattagcattctgtaacttacaaatgttatttcacacacattagtaaatgaatccaccagtttcataacggagaccactgaatacatctttaaacgacccaagaactcagaccagcaacaacttgaatcatcactccccactcctgattcacaaaataaacccagcatttgatttggattgcttgatttttcagattactgtcactttttataaagaactttcctctaagaagaatagaacacatttattttaaagacatgataatcattctgaatgaagttatcttattcagatactagatgccacaattttcctagggtttccttaatttgcctttcagtataacgggagcagggggtagggtgggcacaagaccagcagagaagaatttaccttatctttatgggttaactgctgacttatcacatcctcacagatgctggatgaaggaaccaagttatgtagttgataaaacagttccacactcttctggtggtgctgaggtgtcgcatctcccagctggttccacaatgttaaagctacatgctatttaaaaaaagatgtaaaagtcacagtgtcatacaattgtaaatgagaacttctaaacatttcctattaggtacaaacaagcctctgactgccggacctagaaggtcttaatactcattatgtcgctgaaatgagatttaaaagtgtagctttccatctgcttacttcttgtcatccaggttttttaggatctcttacaacagaccctcctttaactaaatttactttaagcaccaaatatgttagcactttttacagggcccagataagaccccatttcactattctaggacatttagtaaa

SEQ ID NO: 62184 - DNA, 1703 bp, Bovine  19866880626310
  misc_feature (1)..(1): n is a, c, g, or t
ntaggtttgagaaaatgggactaatctctgactcgagaaaacttctggcaagttactgaggttctgcctagccatgaccaaactattttgtgctttcttcttcatcccgaaatagtgtccttagtgacacatcttcgccatatgtttctattttacctttttaaccttatgtttttaccgttttgcccacaaatgtaatactttcctcactgtgggcatagaaattgcattctagtgccaatgaaaatagttatgtaactattacagccttaccatgtaaataaatgcttttaactatacccttggggggacttttttcttaacagatgtgttattgaaatgtattagctttttatgaaaagtatttgatttttaaaaaatacttaaattctagtatattaatgatctaagataatgttaaatgataaagattttggttcaactgttatttagaccttcatgcattagagttgtaaattattgccaactagaaaaaatgtgcaaattaaatctattaaggaatggatatttaataatacaatatggaaaccatcaaatttcagcaaattcagatcgaaagaagaagtttcatcctctggtcatttaaaatcatctacaaaaaagagatttttcttcccataataccctctctggaatgtctatgttctgacttgacatttctaagtattttgcatagtaatttttgccatgataaactagtgatgactagtgataaactagttaggataaactagttaggattttttttaaataaggtaatcttgtaccaaatactttgatcattgtaaagatcaaagatagacgtggtagaacattttgcaaaagaaggaataccattggcctgaaaacatgttttaaagtttaaccacactaggttttaaaaagcatattagacggcaaatgagatactcattttctctgtcaaggtgacaaagatttttcttgtaatcccaactgttaatgatgctttaaacaatgaacattcttttacatcgatagtgagaataaaaattggtacaactcttgaggagtcaatatatgtcaaaaccttagtcataggcagatctttgatccaagatttctatttttagaaatttatcctcagtaaatgaaggtgtatgaaacaaatgtataaagatttttagtttgctgctactgctgctaagtcacttcagccgtgtccgactctgtgcgaccccatagacggcagcccaccaggctcccccgtccctgggattctccaggcaagaacactggagtgggttgccatttccttctccagtgcatgaaagtgaaaagtgaaagtgaagtcgctcagtcatgtgcgactcttcgcgactccatggactgcagctccccaggctcctctgtccatgggattttccaggcaagagtactggagtggggtgccattgccttctccgattttttttttttagtttatatatttgtttattttaaaaattgagatatggttgacatataacattgtattagttttagatatacaatataatggggtgacgtgtgtatttattgctaaatgatcaccgcattaagttaacttaacatccatcaccacatataattacaaattctttcttgtgatcagaacttttaaaatctactcttgtgccaactttcaatgtacagtgttattaactggtcattatgaggtgtta

SEQ ID NO: 62185 - DNA, 4465 bp, Bovine  19866880822326
  misc_feature (1)..(1): n is a, c, g, or t
ncgtttgccttctgcccagactcttgtgcttggctttgaagaccattgacaagttttgtcacactgtatttattggatcctggtccacttttgctgtttctcttgcttcttactcgtagtccctttcttgtgtgtttagctatttttgactataagctgtttgttttctgggagaattatctgtgggacatttttgaggtttaccatgaaggtgtatcgccctggcagggtttagtgtttgcatctgctcggggtactacccggctggcgggtgataaggttctttgatgacagcattcttctggatccctgtggttatgtgcctctgagctgggggtccctggaggcctgtacttgtgatgacagctcttcaggaatagactttcccctctgccctgtttggtgccaagtcagctttctggggagtaggccctgggggcttactcacttctgactctgtcttgccctgaagaattgttgtttagttgccaagttgtgtccaactcttttgcaaccccatagactgtaggccgccaggctcctctgtcctttgggtcttccaagcaagaattctggagtgggctgccgtttcctcctccagggatcaaacctgcgtctcccgcattctaggcagacgctttaccgtctgagctaccatttgtatatagtagtgtgtatatgttaatcccaacctcttaatttatccctcccctccatgtttcccctttggtacaataagattgtttttgaagtcagagagtctatttctgttttgtaaataagttcatttgtttcattttttgaaaattagattccacatatgagtgacatcatatgatacttgtctttggcttactcctagtatgataatctctagggccatccatgttgctgtaaacagcatcattcagccttctttacggctgagtaataacccattgtaatatgtactgcatcttctttaggcattcctctgtcagtggacatctagtttgcttcgtgtcttggctgttgtaaatattgtaaatagtgctgcagtgaaccttggggtgtgtaatgtgaattctggtttgaagaacaggcctttggggcttcaggcacttgaaagcctgttctgctgggttgcacgtcttagatcagcatggaccttctacacagagaaccattgctcaactcctagtttagagaagtgccctcagagcaaaacgggcttctcttatcttgcatcctggaattctcacttaactctggcctaattggtactgcagttctttttgaaaagagataaaagtcttttatctttcattttcggttgtttttaaaaggaaggttcatctgaattacatagtttataatgttatgaaaatagaactaagttattacttttgtacattgccagcgatctgtaccaaatgactggttcagctgtcattagtagttcatatttcttttagaactgagtatgtgtccagcgtgtgcctcttccaccaccaaacagttcattctgactccatccacctggcagccacatcttacgcgtgcagggctcagtgcctcaaaccttgcccctccccgccttcagatgctgccacctgggctcctgacaaccctttccttgggccgattaatttgttcagataggcacatagaactcagggaagcattttacttccttagagtaccagtttattataaggagtgtaacccaggaatggccagatggtagagatttatgtggggaggggcgtggagcgtcagtgctccctgggcaccccagtctccactggctccccatcctggaaccccatccttcagggtttttatggaggcctccttacatgggcatggctgcttagatctttggtgtttgaactcaatctcttgtccctcctttcttccctccctggagcttgggaggaggttggaggagggcagggaggactataaatttcagttctttaatcctgtggttggttcccaggcaaccagctgccacccctaaagtttctaagggccttctgaaagttacctcattagcataacaaaagatgcctttctgtggatgctctgccggaaatggagacagatcaaatgaatgattcttagtatgaatcacagtatcacagcatgacctgtagttttaatgacttcagtggatgtttatgcatatttctgggtggtttaaaacttagcgtttcttgtattttctgagatgtctttttttaaagaggatttatgaccctgaaattgacacagtatgagtcttccaactttgttaagaactatgtgaaatggctttttgcgtttctgtgacagattatggcttgctgacgacgccccagctgcactacatggtcttctgtcgaaacagcaacggccagtatggaaaggcaaccgtcgagggttactatcagaaactgtcctcggcctttgtggaacttaccaaacaggtcagaatctctccagtgtggttagggtttgagcagttgcctaaaagaacatcagttgaacagtttatttaaacatttgtcacttttttccccccaaatttggcctgtctcctttttctttccaggactctgcaaggtctggcccttgtacccagctaactctgtgttggcatttatttggcaaggcacatagtatgttcttgttaccaaccagggttcttggcctccttaatcagtagaaattggtaagaggccagacaaattcaggcagggctttgttggggcctgtgctgcagcagaagggagcaaaacccatagattcacttgcttgctgaggggaggccaaggtggttccttacactggagggaagaggcatgtccagggttctggcgagaggagggcttaggtggtttgtccaccccttagctggtattgcctgcaggggcatgcacagtgcctgcttttgctcccagctcttcaaaagtagcagttgagtctttttggatggttttcgtatcttgttgtccataatttgccccaactgcatgcatgcagttattttcagtccctcttctctttgtattttgttgctggaggagactttgtccaggtgcaagcgctgcagcaaagggtctcaagtgccagcctgtctcattttgagctcactgggggagaagcgtgacgaacttgcagttttcataagtgttcatgcagatgaatttgctcttagagttactgtaggtgctgctggcgtcatactggaagcatctactgttaagaaaatctgtcttcaaggtgtattagcttcctaaacctgaacaaagatttgaggggtataattcacttgatcagccaatattgagcatatgttattgtcaggaattgttgaccaaaaccaagtccttgctctcatagaacttatattttgggctgagggtgggtaggagaggagattgccaggaaaaaacccacttgcccggtggtggcatacactatgaagagaatgacagatattattgctgctcattcatctgtatactcgtgcccacatttgagtgactgctatggaatacagactaataagggaccctgctaaattataataaagcttcatttctgtaatttatttggtctgtaaaacttttccaatttctgtgaccaaaaaatggtgttttaaaatcttacttgggtgttctacagttttcatatgaacatgtgtacccttctgtttcctggcttaaaatagacatattaactgaaataatggaagctgtttacatatgcatacctgtgctttatgcttcactttggtatcttgaaattgttcttccatttcttttccttttcaggccttctgccgtggagatgaccacagaacacttaaggttgactgtgcaaacggcataggggccctgaagctggcagaaatgaaacactacttctccccggggctgtcagttcagctgttcaacgatgggaccaaagggaaactcaatcatttatgtggggccgactttgtgaaaagtcatcagaaacctccacagggtatgcgaaaaatgtgtttttagagctctgtctgaaaccagtcactcaaacggaggtggcaaagagagagttgtgcagctgtcctggccccgctgctcttagacatctgggcctcgtccgcttgccgttgccatgcagtgacaggcagaacacggctgctctcggccctgagagtcttgtgactctccacagggggcgggaaatctggtggaaaaagcaaaatcaggacgtgggattttagagcagtgattcttaagctttagcagacataagagtcacctggaaggctggtgagcacgtagatttcctgggctctaccccagggggtcagattctgtaggtctcgggtggtttgtccatctgctgctgtccgtctgttgtggtaaaggaacagtcatgttatctaaaatctgatgtgaccgttgctcaggttcagtaaactatgcaagttacacaagacattaactca

SEQ ID NO: 62186 - DNA, 2516 bp, Bovine  19866880869545
  misc_feature (1)..(1): n is a, c, g, or t
ngaggtagtgtgttatgccctcattatgcctggaagtaggagaaagtaaagaggtcaggattttaaaggactgccaaagattaggaatagtctttgggtacagtggaagtggaagctgaccaaggacaaataaaaggaatcacacaaatagaatggcagtgagagtctagccgagattggagagtatgtatctctaaatcacctagcaaggaggttcctgcctacaaggctttccctggcagttctcagatacatacgatatcaatggtggtaatttcccttgccatagatggctaggctatggatgctcgttaaaaggttcaaacaggttaatttcagaaataaaaaccccagaaccttaggctagaatttttatggtttccaacataaaattctaactttgtctttcgctacacccttacatgtaccaaatatgacattttagccaaataaggcttcttgctgttttttttaaagattttttttttgtttcctaaatttcacttcaattactttgcttctgctatttactcagcttatgaaaccctacatctcttttgaaatcatgaggtgattaaaactcaatttgttacctggtttgtaagcccagtaagggatgttgcctgtcttctcagcatctgttataccacttctatattacttttcatgtacttccatatatttcagagtatcttagtttctactaacttttaaatttctgaactgcaggtaccatatttttgtcatctttgtagcttgtcacagtgccagtgaaatgctttttctgtagtaagcatgtagtaaatatttactgaacttacattgtatttcacgtttgtactaagtagcaagatgggacctttaaaagaagataatgttttgccttttctgtaggctagtgaactgaagtgaactgataggctagttttaaaggtttatttttaaatgttttttcattaacttcttctaatgtgaatgttttgtcccacaggtatggcatgaactgccttattcagtttgaagattttgccaatataaatgcatttcggctcctgagaaagtatcaaaaccagtattgcacattcaatgatgatatccaaggtaatcagatattcactgcatatggatcaaaaacaatgtgccttgatattagttcataattttataaggattcagatttaataagaaatgtgcactagacacctatgaaatgccaggaattgtgtttgatgatgtcacacattgtttctcattgaattctacatatttgagactctgactttagaaagtactgtattctgcatgagctggagaaagagcgccctagaatctgataaaacccccagggattatggctgaacaaagaatgaaatgtatgaaaatatattattcattgtgtaaaatgaagagtgtatacacttctctcttcaaccttcatctcaatcagccacagtttctaagcatcgccacaacagaagctgcctttgtatacagcgtgtgccagattctgctgtttgtctttgattgattatagattcttggctacctgcttttgtctgagttgttttatttttctctaagctttgttttgctcctttctctaggtccacctcccccaaagtacttccccaaatccaaaacctcccagtgagaatcttactcttcctgtttcatgaagggcaggtagaataaaagcacaggcagagagtcaaaggagaaacacctgatgagttctgacaacttaaaagatcacacatagacttccatttcactaatcacaatgaacatttttccgtattgaccttacttggattctcagcagcttttaacattgtggaccccactctcttccttgacatattctcttctgttaacttccgtgtcacagacccccgctgactttcttcctacctttctgaatttttgcttccccccgccccccaagtttcatcccttactgactagctattagatgacagaacacttcagcatgcagtgccaggcccttttctctttgttctgtgttatatgttgggtgtatactccagggtcacacactgcattagcatatttatatctctagcccagacttctttgagttctaggtccatatacccattgggttattttaaactttcgctaggagtcgggcacgactgagcgatttcattttcacttttcactttcatccattggagaaggaaagggcaacccattccagtactcttgcctggagaatcccagggacgggggagcctggtgggctgctgtctatggggtcgcacagagtcggacatgactgaagcgacttagcagcagcagcagcagcagcagcagggatatctcaaagttatctcctactgagcctccccaccatcaaactcttatttccccaccaaacttgaccttctctgtgtattctctgtctccatgaattcctgatgtctctctcttcttcacctctctctgccaaatatagcccattactcatcctcctgacttttagcactaagttg

SEQ ID NO: 62187 - DNA, 2689 bp, Bovine  19866880917794
  misc_feature (1)..(1): n is a, c, g, or t
nacataaccactggaaaaaccgtagccttgactagatggacctttgttggcaaagtaatgtctctgcttttgaatatgctatctaggttggtcataactgtcttccaaggagtaagcgtcttttaatttcatggctgcaatcaccatctgcagtgattttggagcccagaaaaataaagtctgacactgtttccactgtttccccatttatttcccatgaagtgatgggaccggatgccatgatcttcgttttctgaatagtaccttgaaaagtgcaatagtacatacaacagctggcacccaggggctgacatgcatgttcgcatctttgaaagttcacaacttgaaggctcataggcagaggacttactctacctttttacagtcctcagtgtaccacttattagtttctgtgtttacatgtctctcttccccttctggaaagtgagttccatgagggcaagggatctgtcttactgtttttggtcttcccagaacagtacaaaatttctggaaataaacatttgactaagaagtatttaatgaatctaaaaaataaattacttagtggacagttttgatatgaaatatttcttgtttccatatacattcatgctcacttccccaaattactgagtctttgactcagtattttcaaagcatctatgagattctagccctgattatagttgcaacatgtaccgattcctctttatgttccagaccagacacatcctaagtgtgtgtgtgtgtgtgtgtttatttatatattgttatattagcttcatgacagctcattagtcagataccattttatcagcaccgtacacaagaaaaaggcctataagtaatatgtctcatgtgaagacacagctgctgctgctaagtcgcttcagtcgtgtccgattctgtgcaaccccatagacggcagcccaccaggctaccccgtccctgagattctccaggcaagaacactggagtgggttgccattgccttctccaatgcatggaagtgaaaagtgaaagtcaagtcgctcagtcatgtccaactcttagggaccccatggactgcagcccaccaggctcctccgtccatgggattttccaggtaataaagggtaacacagtatattaaaccacactcttctattttagaacccatatttagctactgcattgttcagaagatggacttccctgaactgtaagagaaaaatagtaaagaaatgtattaatttcacaaagtggtagagacaggcaacatcttttagaaaggtgcggctataattaaaatgctagtctttgggtgtggcagaagtttattctatataaatattacatctatataatatatagatataatagatttatatccacataatgtaagttatatttatctatataaataaatagaatttattctattctacccaagtagaataagaagtaacatggaaaaagagacacagatgtatagaacaatcttttggactctgtgggagaagatgagggtgggatgatttgagagaatagcattgaaacatgtatattaccacatgtgaaatagatcgctagtccaggttcgatgtatgaggcatggtgctcagggctggtgcactgggatgaccctgtgggatgggatggggagggaggtggggaggggggttcagggatgagaacagatgtatgcccatggctgattcatgtcaatgtatggcaaaaccactacaatattgtaaagtaattagcctccaattaaaacaaataaaaatttttttaaaagaattaacatggaattcccttgcttcaataaggatactgaacttgaaaaattattccattatgtttctcaagcagcatttagtcacttatcacttatgtacatcgtgggaataattacaactcattttgtaacctgtacaaatatgcataattaactatttacaatatttagacccatgattataccatgtaattataacataattttttttacaagtgttgataaaattaatcttttgggtttgttttttttaaataatgccttttaaaaaaccccaacatttaattatcagtattttcctttctttctaatatttcttaatgaactccttccccttgcaatggaattgtttttaaagcttcagaaaggcctcattttacatcttgtttctgccactctacttgtgtgacaatggacatgttacaaagctttagctatctgcatgtaaagcaggaaaaaggagtccaaacttgcctggttctttgaaacgacaaagtatatgaaactcttcacatggggtctggaacctagaaacagttatgaagatgatgataataatgataccaacaacctctactgaatgattatctttgccaggcacttctctgagcacttcatatgaataaactaaattactccataaaaagtagtgggcagttgtccctgtaacagtagtattcagtttgaggactgtattccatgccaccatttccctatgggaaacacagtgatgggaggttttaaaaattgtttcagtgtcttccctcattgtccagtggctaagactcacagtgcaggggggccaggttgatccctggtcagggaattagatcccatatgccacaactaagattccgtgcctgcgaagttacttaagtcatgtctgactctctgcaactctatgga

SEQ ID NO: 62188 - DNA, 957 bp, Bovine  19866880949693
  misc_feature (1)..(1): n is a, c, g, or t
naatactggaatgggttgctattttctactccaggggatacagaaacgagacctatctaaatttcataggaaaggcggtgatagtagtttcaaatttaaaaaacagtgagaagacttcatagggttttaaaatgaaagttcaggtacacaatagaaaacagctcactctttctgccaagaataaaagtattcattatttatgaccatcaggaaatgtgggcaagagatgtggtaaaaacatagataaatatcaatggtattacatgtttcaaaatatcgaaatatcatttctataattgtagaaataaaaaactaatgtctgaagtagtataaatactattttgaaatacttaaaaagctaggtcataatctttagtaaatataaagtcaatgaaatgtgccttttggtaaatattgcatcttgctccatttcttcaacacggatcaagaagtacaacatcagtagcaaaattcagcaacatgctccctgctccatacacctggaaactggcacagtgcctgcaccactctggcctctgggagctacgtaccaagggtgcgctgggtggaacgcctgctgaccaggtggcaggggctactttcggctgccagttggcacccccagtcaacttcttctctccagcattccactgaagatctcccctaaaatcaaccatgcaaaacacacacacacaatcagaaaagaatagtatgtggctccttaaatgtttatttgtatttggggtcaagaagtaataaagagaatggatgaaacagacagaagagccttaccatatcgtatctaagagagcttaaggacatttgacaaaaacatcaagacagttttgaccctcagtgacaacaggaatttcctgtcactgctcatggaaaaatgtgccacaaaattcaactgaattcatcactggttacaaaaactttccaagtaagtcataaata

SEQ ID NO: 62189 - DNA, 1280 bp, Bovine  19866880989530
  misc_feature (1)..(1): n is a, c, g, or t
ntcttttccaatgagttagctctttgcatcaggtgaccaaatgatcattcagcatcagcccttccaatgaatattcagggttgatttccttcaggatggaccagtttgatctctttgctgttcaagggactctgaagagtcctccagcaccacagatagaaaacatcagttcttcagcactcagccttctttatggttcagctctcacatccgttcatgactactggaaaaaccatagctttgactagacagacgtttgtcagtaaagtgatgtctctgttttttaatatgctgtctaggttggtcatagcttttcttccaaggagcaagtgtcttttaatttcatggttgcagtcaccatctgcagtgaatttggagcccaaggaaatacactgtttccatttttcccccatacatttgccatgaagtgatgggaccagatgccaaagatctaggcttcacagtttggcagactcactgcagttagtgtcactagtcttgggcaaacttagcagcaaggagtatggtgtccctaaccttaattttggctaactctaggaacacgtagtaagacaatggattagagctactcattttttcctggaataaaggcctagatattttaaatacctggtagttctcaggaaacattccaaattaagggaaggaatggagggatcttaggacagttagttttttctatcattttcctttaaatgtcaccactgttcatctgtcttccttgttccctttacctcttcccaagtagcaaccatgaagatggcatcaggtaaaaacatttttaaattgttggtcacatgacagcttacacttataaattaacgtcattcttttgtggacatttaaaaactgacctgtgtgccaggtacagctgcaactccaaagggtggcctcatcatgggctgtgcaaacatgacaggctgctgcggcatcatgggcatgcctgtccccgccggaggctgaaaaaagcagaggggttcccagtgtgagtggagtccactctggcaatgccctgacgtttatgtctttaatatgttaaagaaaattgctgaggaatccaggtttgtgaaaaagtatcacttgtaattttttacaaagatgcttacttacatttatttttatttatgtttttggctgtgctgtgtggcatgtggggatcttagttccccgaccagggactgaacctgtgcacccttacaatgaaagcatggattcttaaccactggaccaccggggtgcacactcaactgtgtctgact

SEQ ID NO: 62190 - DNA, 1312 bp, Bovine  19866881017676
  misc_feature (1)..(1): n is a, c, g, or t
ntggaaaaaggagaatatatacaagaaaaatacttcatattcatatctctaggatcctgttactctatctgatgagttggtttaatgatgtctatgtttttaaatgtcgtgcttactgcctatattctgcttatgaagttgatttttttacttgaagttacaacctcctgtggctacaactgagtcacacggaggctgcaactggttttctgaaagttggatgcttaaatcataaacatatgtggagtagagaagcccttgctctttttgctcatatgagctggattagtcactttgctttcccataaactgataacaataacattttgtggattctgtggtatccggtgaaaagagtaaggtttgtatttttcaaatcccaaattaagaggaaagaaatttttcaagaaaagagaatacagattcagagtggtgctgtttgtaagcaaaaaaaattctataaaagcaaccaatagccccttgaaatagaggcaaaaggtacaaagccccaatatttgtttctaaaatgagtttcaaatgatctcgtttaagaagatataaaataagaaagttttaatgtttgtaatgagctaatcttttgaaaaaccacatttaaatataaacaatgactaaatatatacttttttgttttccctagctttcacgagaaccttggtttaaagattgctcttcaagttttccaccactatcaatttttaacaaactgctttagaagccaataaaaaaaaaaaaaaaagatcaaccatctgaagtcaaaactcatgttttcaacaaaaatccccaaagttgtgttattctacattcaaaatcctcattctatgattgcaaaacagttttccttctatgatgaggcattttttcctcaaaaaagatagaggttaaaacaaaaagagagcttgattttgccttctactcaattatcctaaaatactcagatgattgattttacagtgccaaatcaggtaaagtcactatgatttttggaagaagattttatgtctgctgacaagaatccatttcatgttctctgttatggaatgaaagtgatacgatcctgtctctgctgcttcagttacatcttcttctgccaaggctttctaactggactcccatgtgtgcccagtgaccttattcggttaagtgcctcttaaccccttcacatcaagtatcttattttacaatgagaaaaaggggacattttcaagagaaaaaagttaaccccccccttacttgattcacttgtgtttcgccctattaacccctctttgcgaaactttcatcccgagcctca

SEQ ID NO: 62191 - DNA, 1137 bp, Bovine  19866881018419
  misc_feature (1)..(1): n is a, c, g, or t
ntaccttgcagaactgttgggaagattaaacgttctaacagattagagccttttccactgggactggcatggagaaagcactcatttagccgcagtattaggtccctctaagttatggactaatactaccattttacataagaggaaattacggcataaagggaggatggaattgcccgaggccattcaattaataagaaacagaaccttaaacccaaggcactttttaccaacccaagatacgtatttcttagtaacacagataatgattccatgatatgggctttatttttctggatctggtagctaagaactgacatgattcccaccatcacatgctgcccaggaaactattgtctgatttgaacaattcatatttttatacaatacgtacatatgtaacatacacatatgtatgtatgtatattaaactataatctttttgtctaagaaaattgtaggtaggttagggataaaaaatctgcagtgacattcagggacattcaagaacaaagcacagactattcaataatggtagaggagagagaaaataaattcagcctccatgtgattccaactctgctgcaccattgctgagtcaggcttttcatttcttcaaagaaatgttttgcagtatctcttatatttcacaagccagcttgtgctcagtgtttcataaattcaaaataagaatacaaaataagaatactttttttaaaagatgcaagaacacacaataatactgaatagtgctgagaaagcaccatcatttggtacaatatatttgatgtataacttttctgaatacagtctggctagttattatcttagcacttgagaaaatacacacaaagacattatcaaatataatcatattgagaaatcagaaaacgttcaagaagctaaacaaaacactcataaataaaaattatcttttattacaacttgcttacaaactagatagacaactgctttcaggttaaaatcagcccttttaaaatgcattaacttatactagacccatttgaaaactcctaaaatgaagaagttgagggagaggagttacaagtagtttcttggatcccctagaatattcccttgaattctcaaacctgggtatccttatattttgacttc

SEQ ID NO: 62192 - DNA, 1426 bp, Bovine  19866881088999
  misc_feature (1)..(1): n is a, c, g, or t
nccaaacttcttaaaacataaaataggctgtgtgtatttcagcgctacatgtgttaacacagcacatggtgatctatgacagtcatcagggttcactaccaccacatgatagcccagctttaatctagccggacggactatctgagggatacaatgacttgaagattaaaattttttatatataaagaatctacctgcttaagcaaaatatacttgatgttctttctatgccaaggatatcatatgtgctgctgtgaaacaaatcaaaggatatgcatgtatcacagatgatcatcagacaatttagggttggaaaacttttttctggatattttggagacctaaagttgtactctatgaaaagcaaaagtgttacaaccatttcatctggaaatatattttttcagtataaatgaacttttctttttaccccaatactcctctcattcttttttcctcctcacaaaactgagaacaggattggccaagcagtactgatcaaatatggtacatggtatcttttccttacagtataatgttaagaaggtgttcaattaagcctgactatcatctttgaaatctctgctaagcaaatcaggttgagtgtcgtcttagtctgcttgtagttcttagaacttaccttgaaaaattcagtcttctcagctatgtatctcagattgcccggtgtgagaggaggtctaatcaccacagctactcgtccctggtttggacttaagggctgggcaggctccacactgttgatgttttccccagtgaccatggccacagactgagtcaatcccaccaggtccatcactagtgaaatggcaacactctgcacactgaaatcacttgcttggctgcaagcattcatcagcgtctggagccacagtggaggctgcacgtgctcccagtctgaaagagaagccggaagccaacacagtccatcacagtgaacctttcacgcatattctgtcttccaagttaatttctaaaaacaaagcacttatatctaagaactttaggccttgctctgtgaacaaaaccatggtttctcatatacactacagcttcaagaaaataaagcagcaacaggaatttcataaattttttaatatgtatttttcttatgccaagtcacacaatccattttctgtcctaaaaaagtttattaatcaacaaatattatgtagctcactgccctctgtgtgtgttatacataaatttaaaggaatgtaaatttatatgatgctagtcataataaaggaaatcagcagatctgaatgttacactaattttctccagagaaaggagttaatttcctccttagcatctgcttgctcgccaacaaactgtgagatatcatgatcacaaaattctccaacatatcaatctcctcaaaatgacagtattttgttttaaaaaa

SEQ ID NO: 62193 - DNA, 686 bp, Bovine  19866881112645
  misc_feature (1)..(1): n is a, c, g, or t
naaaggaacttgctgtgtttccattactagctatatgatacttaaaacttcattatttttctgggtggtaaactttgcctgtaaaatctaaatttggcacagctgagagattgtaataccttttcttttctcaagaataagacctaagaataacaatgaaaacataagaatgcttttaatgtttagtaattatattttgtgttcttattaacattgtagatatatataatactaaataataactctataggttaattctgaaacaaaatagctagattttatttaaatttctactcttatacatatgagaaaactgaggctcactcagaaaaagtaatgatttgcctttcgttgtttctatatttatggtaatttttttaaaaaataggagttacttaaagatccattgtacattggactacggcagagaagagtaagaggtcctgaatatgatgattttttggatgaattcatggaggcagtttctctcaagtatgtataatctttattttgtctatatttaagttggatttcaaaaacttaaagataatctaacataataaactataaaaatgttcaagtttggtataatatgtttaataattataagtgatttgagtgaaatatatatatgtatatcctcataaatattgctgaccaaatgataatgtcatgtgtctatcccc

SEQ ID NO: 62194 - DNA, 696 bp, Bovine  19866881134565
  misc_feature (1)..(1): n is a, c, g, or t
ncgaagatcagcctgctcagcagagccagagtgctttgctgaataatgacagttctcagtttctgtctgtgtctgcagagggaagctgtgagtgtatgccaaatggaatttccagaaacagctcctcaccctgtatttcaggaaccacacagacttcccatgactcttctgttgcttctacagaaaccagatgtcgacagagaagtcacagtagcattcagttcagctttaaagaaaaattatcagaaaaagtctccgagaaagaaacaattgttaaggagtcaggtaaacaaccaggagcaaaacctaaagtaaaacttgccagaaaaaaggatgatgacaagaagaaagcttcaaatgaaaaacccaagcagaccagtgttttcttcagcgacggtctggatttagagaactggtacagctgtggcgagggagaaatttctgaaattgagagtgacatgggttctccaggatcacgaaaatctcccaatttcaacatccatcctctctaccaacatgtgcttttgtatctccagttgtacgattcatccaggactctgtatgctttttctgccatcaaggccatcttgaaaactaaccctattgcttttgtaaatgccatttcaaccactagtgtaaataacgcatatacgcctcagttgtctctgcttcagaatctttggccagacaccggat

SEQ ID NO: 62195 - DNA, 1735 bp, Bovine  19866881141518
  misc_feature (1)..(1): n is a, c, g, or t
ntgttcttgcctggagaatcccagggacaggggagcctggtgggctgccgtctatggggtcgcacagagttggacacgactgaagtgacttagcagcagcaaactaatggccagcacccttgaccactgtactgggatggatgtagggaaagtgggagaagtggtggataaggtagcgagaagcgcccttagctctctgccttcctggttggatgagcagttgtgtcactcactgaggcaaagaactctgggtgaggcccagctttgtggcagcatttagagtgcgtatcttcagggattatccataagatcactttttagtcatcttattcaagttcaaattatgctctggtacagttgcccaaggatctcatgatgtatacagcttttgtttacttactaaaccagaaaatatgcttgatgattatacccatcctacctttatagacaaggaacagttaatctattctattctagctctattctacttcagtagttggttcgttttttgtttgtgttgtaattaattatctcttctagattataaataattccttttattgctagtacctaatgtggcaaatagtatgggttcaataactcttcgttgaaagagtgtaagattaatggcaaacattaaaatggaacttttacatatttcagacaagtttcatatggtcctgaatagaagacctagtagattttatttctagttcttaaaatgtaattttttaacgttgcatgtctcatttccatgcgttatttagacattaggaaagtgatttcacgaagtagattgaataaactgttagtagtttgaaacaaggatatagatcaggagagttttatgtatacatattttgtcctcaagaacctaagcttaagttatgcatatagcaaataataaatatttcttgaatgactttatattaatatattaattagaactgtgtcagtatttcctgttatcataggtacatgaatcagttatagaaactgttttaagagttaaccagatatatggattagactgtgaaatgtgagttaagttgtgaataagtctaatccatagctgacgtctttcaaaatgtgactattttaatttctagtatatacatgtagctactcagcctcctgcactttttactgactaccaggtctcatcagtttctcttgaaaatcctaccgaagtgttcgaagatggagaaaatccacccagtagtcgctcatcagagagtgggttcactgagttcatacagtatcaagcagaccgaactgatgacattgacagagaactgagtgaggggcagggggcagctgccatcccgattgggagcacatcctctgaaacagaaacggcctccactgtggggtctgaagaaacgatcatccagcccccttccataatcgctcaggggacggcaccccgaagtgggaagacagcccagaaaaccgcaatgcagtgctgcttggagtatgtccagcagtttctcaccagactcatcaacctctacattatccagagcaacgccttctctcaggctttggctccagagcatcaaggggatctcagtggagaacagggagaggttttgaactgggacagggattcccagggggacgtaaaagacagaaatataagtaaacagaaaacctcaaaagaatacctctctgccttcctcgctgcctgccagctcttcctggagtgctccagcttcccagtttacattgccga

SEQ ID NO: 62196 - DNA, 790 bp, Bovine  19866881176803
  misc_feature (1)..(1): n is a, c, g, or t
nttagagacaaatgtgacaaggccaaatagtttactgattatttatctactatgctatcttcttcaagtttcaactttatattcctgtagggtactacgtatcactataacctgacaaagagctaattcagtagtttctggacaagagcaaagcaaataagaatggctcatgtacaggaaagacacttaggttgtcatccatagtactcactcattaaatctctaaacgttgtcttatcatgtgtcatcagattgtccataattgctctccaactgaaagaaaccaggatcatgatatgtaattaacattttgttgttagtatttaaaaagtgttctactttgcagatagcagttgatttcaacagattctgtgagatgcattagcatgttgaatagaagcaggaggacttactggttaacacaagaggcatccatttgaaagaaactgggatccataaagaggtcaaaggcttcttttttccaagctctccgtgtgtactgatacccactaagactgctcagcagctggacacaggctcgataactgggtgcattatgtgcactgggaggaaggaaaaccacattaacctctatcttataactattcatcatattaagttactcataagtattcacatttacctaaagcaatgatgggaaatagcacttgtgtaagagaaacatttttatcactataatttaaggtaaaaataaagtctttttgtgataatttcatttttggaataaaggaacacaacttatttttaacagaatacgagttaactaaca

SEQ ID NO: 62197 - DNA, 1936 bp, Bovine  19866881194365
  misc_feature (1)..(1): n is a, c, g, or t
nagatgaaaattctatacttatctctcaacctgctactatgactttcttcacagcctcggtgtttcaaagatttaaagttaactcttctcttagagaacagatgcgagcaagtaaactcagaactgcaatgccctgttctctttctgtagccgagttttgtctctgtaactgctgcccactgggctgactgctggctgccagtgcacccgtgctgaggagaggaatgtgtcgactcccttggctacatcttcaaaaaggccacctggaaaaggaagaaaaacccacagtgctttccttatataatgtgatgaaatggctgagtacacatcaaacctggatcaggtaggtctggtcagtaaggatgctcactggtctacaaagaaaatgactcctggttgggccagacgctgctattttactgagggagccaattagtccttccataaataaaccatacagtaattaaaataattcacatgcactttaaagggaaaaaaaattaagtttaaattgacactaacattgtactgccatgaagtaatccagttctcgttcccaatggttcaaacagctgctttggatgttctgtgaacagagttccaaatcctgaagactcctgggcaattccaggttcttgtcatgattgttaattacactaatatctcttccggttatgccaatgcttttaaccacacttgactatatacgtgggcttgtcagcgcaagttaccttaaaatttagttgtttcaaaaaatttaattcatatagacacaaaatcatttcagagtatttaataaggcccagatcaaatgcatcaaatttctcaatagttttggataattatgaaacaaacataataaagtcaaccataaatgctctgaaagttctagttcaggggtgataataaactgcggagagtgccagcatctggaagagagcagcatgcagtcagagataaagagttggaagtttgtcctgggccattttttgggggaaagagtgagcaacagaagcgaaaatattccactcttggacagctggtacttaagtccccaaacgcagttgaaggaggcgtgtatttaatgagccctgtaaaggggaaaggaaaaggaaagagtcgtgcaagggcagaaggcatctgctttttgtcaagtgattcagaaggatgttactcttcatacgatgctggtgagaaaagcccctgctgcgtttctgtatcaacttccagctgagtttctctatcaagttctgcagtgagaacaaagttgaaggagcaggcaaagaagagaggttaagattcctaaacaaaatataaacatggggtggggaggagacagcagagtagaaggacatgagctcacctcttcttatggaacatgtaaacttggacaactggtgcaaacctcaagggcttagagtcaagagtctgtgataatagttatgaaaacacttgtgtttctctccctggcctctcagctggtaacagatattagaagtccatgaatattcagatgagaaggggctgctgaagagagaccagctgggccccttaggggatgatgacagaatcccaggaagaggtttcaggggttactgagtctgacttctggctcactgttgtcagtatctctgttgggagactgcttcttcaacagcagttcacagggaccttctcaagaaaccaatgccactgctgatactcagagacacaaagatgacagatgaaaaccagttatccctttttgaattctgaaagctgctatgtcatggagtattccaaccagaactacttagaataactgatggtgacaaatgttgtcataaaaatggttaagaacttttgccctagaaccacacagatcagtggtcctctacttgggacaattttgcccaccagggtacatgtggtagtgtctgaggatttcttttttttt

SEQ ID NO: 62198 - DNA, 954 bp, Bovine  19866881264602
  misc_feature (1)..(1): n is a, c, g, or t
ntcctcttaagaacatgctctgctctgcttattgccagcacttctttgcattaacactttgcctatagtacttcctgcctgtctgctgaattctcacctctctgagatcattctcagacctcatctgtggtgtcatgatgctttccctgaatttgaagcttctgattttgcacttcttgcatggaactaagccttcaccctctctgaagaaatgctcccctaaaggcacagaaatgggtatttgtgagatccccgactcgttttaaaacttctcagagtaaagagtgatgttttttcctcttctcacgctcttctcctcatttagggccttacttaaactagataatttataaatgcttgttgaagtttgttaaaatcaaggagattatgtatttatatattaactgtatactgaactattttaaaagaatgtcgtatttggggataagggcaacgttttatattttatctctgttaaatgtgctgttttgtttaattcagttgaataatagcccttctaatgttgagttgtctttattaaattctaattaatagtcatctacataattttctaccttaaaaggtctaacacattaataaacgttttaatagaaaaaatataagtaagtaatgaaagtaatgattaaaaaatcttgtttggtttacatttcaattattttaatgtattttgtattgtttttctttactctctttctttgccagtaagccaagtacaactcatggcatcaaaaggaaatggtgaaaagacacttaccatggacgaaatggagaacttcagccttactgttaatccattaagtgacagactgtccctcctaagtaccagcagtgagacaatccctatggttgtgtctgatttcgatctgccagaccaacagatagaaatacttcagaggtctgactcgggatgttctcagtcctctgctggggaca

SEQ ID NO: 62199 - DNA, 944 bp, Bovine  19866881280157
  misc_feature (1)..(1): n is a, c, g, or t
nttggtaaagaactggcctgcaatgcaggagaccctggttcgattcctgggttgggaagattcattggagaagggatagactacccataccccagtattcttgggctgcccttgtggctcagctggtaaagaacctgcctgcagtgagggaaacctgggttaggaagatcccctagagaagggaaaggttacccactccagtattctggcctggagaattccatggactgtatagtccatgggatcgcagagtgggacatgactgaatgactttcactttcacatggtacagtataatgtgggacagtgagaaaaaaacgatcccttgataacaaagttttttttgacagaactcatattcaagtaaggaaaacagggcacaataaagtaacatatgtaatactcacacagaataaaaccagtgtaaaaaatatgcatccatattaaaggaatgctagaattaatgcaatcagaattaatgtttagaataaaattagaaaagaaaagcatctgcaagaaaagagttgtaaactatattcagaaagagataataaatttgatttgttcctccaagtcaaactggctcctccaagactggactggaatatgggccaagatgcaaaactagcattaaaatactgaagtattggactggccaaaaagtttgttcgggtttttgtgcgatcttatggaaatatccaaacgaattctttggccaacccaatacacatccatcttaaatctttaagggaataaaactgtgtatatatatttacacatatgtatacataaagcacacctatagattgctaatacttacatgacctatctttttcatgtacttgaaaaaaaagtggagagaaagttataaatagaaatacctggcatttcaagaaaaatatggctatagtgaaagtgtgaatctgatttttctttggatggaa

SEQ ID NO: 62200 - DNA, 940 bp, Bovine  19866881456003
  misc_feature (1)..(1): n is a, c, g, or t
nttttgtattttaattccttagttaaactttttctttctggtttcttctttccctatgggttatttgttagtgttagtcacttagtcttgtccaactccttgtgaccccatgaagcatagtccaccagccttctctgtctataggattctccaggcaagaatattggagtgggttgccatttccttctccaggtatccctattttaaaatgaaagacaaatgaaaaataccactatagataaagtttaaacagtaacttaactaactaaatacaaagacttcatcatttaatttgcagtactgaagagccaagaaaaatgacaagcagaaaataactacggaatgttaacaatgaccctaaaaattactaaggtaagaaagtttaaggggcttttctaattatttagatcaagaggtctttttctttctagaggcatttctgaaccagaattatcttttaaaatatcaaccttatcatattacttgtaatcttcagtggtttatacagtaaaacttaaactgtttggtacaacttggaataatcttgcaaaactgtccttaatagtcctaccagcctttttggattgattctcattctctgaaatagttgaaaatgcatagaatttggagtcagagacacaaggattctaatccgtggcaaatagatgttatttcaactcccaacactaacaactgggaagaaaatgatgacttttaaaagatgatgctaacactgatctagccatgtggaaatcatcatcgctaagtcaacactttttaggacacttgacacaagtggttttccctacagctccatacactctctttacctgaattccaggtcaccagattctcttgattttcccttttcactgatcattcctttttttctttctttgctggtttctcctgggctctaaaggctttctaacacttatct

SEQ ID NO: 62201 - DNA, 783 bp, Bovine  19866881470343
  misc_feature (1)..(1): n is a, c, g, or t
nggctactctctggttgtcgtgcgcaggctcctcattcggtggcttctcttgctgcagagcacggtctctagggcatgcagatttcagtagctgcagtgcatgggctcagtagttgcagttcctgggctctagagcgcaggctcaatagtctgctccatgggcttagttactccacagcatgtgggatcttcccagaccagggagcgaacccatgtctcctgcattgacaggcagattctttaccccctgagccattagggaagcctgacactattttctgatgcattatcttgtttttttgttccgttggatggagaaagtatgagacatatggtctttttgcacgaatgcattacagaggtctgtaggtatggacttctaggtatatattttatccagggttttggaacaatatagaggttatttttcttgctatggagaaatacagagttttggaatgagacagaaaaacatatttcaaaaagttaatggagacttttacttttccaagcatctacttattccagaagtttacatttggccaaactcctagttttaaaaccaaagatagggattagaatctcattacaatcagtatttgactgggtcattcttaaagacttaatgttcctccaaattctcattcatctggtcaccaaggacaagaatgcaggaagaataccttagttattgcacttctttcctgatctttcttcatagataggtttcattctggcctttaattattggaatttcagacaagtatgagaaaaaagggggaa

SEQ ID NO: 62202 - DNA, 780 bp, Bovine  19866881556283
  misc_feature (1)..(1): n is a, c, g, or t
nattcctgttgtaggttttatgagcttacagaaaaaaaatttaattggtgatatatctttcttatcttaatgagctctcctagtattggaaagaaactgatttaggaaagataaattgtgcatttgagaacaaataaggagcataactaaggtatttatcagtatgaattcctccgaggacaggtaaatgcttttcacaacaagttctccagctaaaagttcccatcagcagctgttcggttgttaattgtctttcttcaaaaagtagtcccagaaaggtttcatggcgccggcgttctttctgtgtgtctcctccatccacattcaaaggcatccttagaacacctggaggacagtatgacagatagcacagtccttctggtacctgctcttccatgtgtctctctgtgtcttcttaattaggatgcaaagtaaaagtgacagagctgttgctagtgaacaggcagcagctggcacctccatgcgagggggcaggcttagcgatcacggatagagactcataattcatccaccctgacaaacaggaacaccttaaaaatggaatgttacaaggttctttgccagtcacacagaactcccttgctatattttgcagtttcgtgtgatgagaagaaacggggtgactcgggttccaccagatctctaacttctgaagcactcagggtggagttaaggggagcctagtttcctcaggagacagcggggcaaattgagacatttctttggagaagataacttgaatataatggaataaaatgt

SEQ ID NO: 62203 - DNA, 1802 bp, Bovine  19866881629010
  misc_feature (1)..(1): n is a, c, g, or t
naaactgcctgctgatgcaggagatgtaagagacgtgggttcaatccctgggtcgggaaggtcacctggaggagggcattgcaatgcactccagtattcttgactggagaatcccatagacagaggagcctggagagctacagtctgtaggatcacacaaagttgaacatgacccaagtgacttagcaaacatgcacaaatctgaattaaactttcatcactgcatgtaataggatgttgtgtttgtctaatgagcccttatattttcttattttcctatcatcttcagatataggagatctgaggcaggagaatgggtgagaacagaggtttcagagcctgagagatgagcgaatcatgactgagaacactgcctggcatcttcgcagctgccgcatgtgagaaaagggtggagggggaaccaagaggtgggtaacgaacgcggccacgggagcttcgctctttgctcctgcgtgtttccatattcgggtgaaaacgcacaatgacgtagcaggctgatctgttttagcaccagagataaaatgctcagaagaaaggttatcagcttgcctagttattaaaaatccagcaagccgtggttgaaaaggtttagctaaagctcggactcttcgggggaaacagcgatgaactatatttgcctcaggaccttgtatgggctccccttcattgtcagtgtgctcaccccaccagtgtgacacccccttggtcctctgccttttgcttcacgggcttgtggccagcctccattctcatgattaagctatggacaaagagtgttgtcagttggcacaaatgaacttatccaagaaacagaagcagactcatatgcaagagaatagaacttgtggttgccaagggggactgaggggctgggagagatgggctgggagtttgggatcagcaggtgcaaacggataaggaacaggtcctaccatatgcacagggagctatttggtgtcctgtaataaaccataatggaaaagcatatgacaaagggtatgtgtaggtatagctgagccattttgttgtataccagaaactaatgcaacctgtataccagaattccaattcaactctactccaagaaaaaagcaactaagaaaaaaagagtgttgtcagttggaagcctgggagtatattttctttctcagtctgaattctgaatcatgttcacaggcagtccaacccataaaaccagtgcaattctcatgctttcattctcttcaccttgtggagcctcagcttcctcatctgtaaaatggagaagcttgatttcaaaatttccttccagctctgatatcctatggcatttatgacctgtctctgtttaggagagaaatgtgtgtgtgtgctcagtcgtgtctgactctttgtgaccccatggactgtaactgccaggctcctctctccataaaatttccaggcaagaatattggagcaagttgccatttcatactccagaggatcttcccaactgagggatcgagctttgtacatcctgcattggcaggtgggttctttaccactgggccaccagggaagccctgagataactaaaggtgttcatcaatggggtacctgattttaaatagcaagtgagtgaatttctgacaaagcatgtgtgtgggaaattgtattttagccatgccaaaaatgatttttaaaggacatttttagtgacttgctttggaaagttcttttcttcagcttcacctaatttgatgtgtgctgacctaagaaaaagaaacccacttatactgttgttttctgtctataaagta

SEQ ID NO: 62204 - DNA, 926 bp, Bovine  19866882136899
  misc_feature (1)..(1): n is a, c, g, or t
ngaaggatgctttaaagcctgaagagtagcaaacctaatgcagtcacagataggctttgctttcaaaggccaacttgcaagatagaaaacaagtcaggagccatatgctgtgcgtttcctatgtcagtgggtgagagagtcagcagagggttccctttggggcttcctaagtgcctttcaccccaaattcaatttacacatagcgtatcctttgcacaaattgaagtgtacaggtcctggaaaaataacttaaaaaacaaagaggtttttctttttttttattgtgatgagaaacagaagttgtgagtaactgtaaaataatcaactgtgtaactttaccatcttcctttccctccactactgccaaacattttaagcagacattaattattctgtctcattcctgaaactaaacttgacgatagtgctatcatattttgaatagaaactggcacattgtcagtgaacttccttgccatttatttttagcatagaatcagtggcaagcttaccctttagaaatggcttatgaagtctttggtagacatgtgaaatatttggcaggctgaagatttttcatgctgcagtgaactgccgcacctttgggggattgtttagcggccctggagatcatactggaaatgtgctggcaccacagaggttctggaaaaccacctgccagaaggttgtctggctgtggacaacatcatcagcccacagctcgtcaggatgggctctgtggcctagaggtgggttttctaaatgtgatcaattccacatgtgacaacaatgtggaatattattattccacattgtatattattagtatattattaaccagttagacttctccccatcccatgaatcctacatgttttttttaaactaaatttgattttgtagcttaagaatgtaaaccttttaaa

SEQ ID NO: 62205 - DNA, 1741 bp, Bovine  19866880395428
  misc_feature (1)..(1): n is a, c, g, or t
ncttaaatggtgtgatttggattctctgactttaaagtcttgctgtaggttttatttgaaagttatatagtacctgaaaagagataatcatatttaaaagatagcccaggaacaaaaaattggaatgttttcatttagttgtttgcatcaatcatcttaaagtagtgttatatataaggccacactctttacagttaggagagagaaagtcttgccctgtaatggcgcataagtaaaactgaagtagcattttggatgacctgtgcatctgtgggaagtaatggccctaggcaccaatttgggtttcatagaacgtggttttttcctatgtcttgttaggagtatgtccaaggtgtgtgtaatagccagaaggagaggctgctttagttctcctgacaggaatcccagagccactggaaagaaagatgatgacaaagggtcctttgcctcttgttcgtaatttattgaagaagagaccatgaagtagcatatggaatttttacttggcttttagtagatgtctctgctgagaaaaagccagcattgtacccagcactgttgtaacccagtctgggcattggtacagagtctgccccccagtgtttttacacagagtaggaacctgcccccaggtctgggtgtgaaccccttggaggatggcctccactgctgctgatttttactccccttgggtgtgtgggggcatctgagcagcagggctacagacctggaatgagagaatggccacatggacatggacgccgaggtcaccgaaggcaggtgtgagtgaagctctagaattatttttcttttttatatttttaagaaagaactttattcaggcaatttaaaaataagattgcagagcaacacacattccaaacataggtaatgagcgcttgtcaatacttgactgtgttaatattttaatactactgatctttctcatttgctttgtaggttagtatttatttaccagtcctgaagactatgaagagcgttgtggagaagatgaaaaacatcagcaatcaccttgtaagttctgacttctttgaaaagagctcccaagtgtgcagttttggctgcatgtcctcggaggagccttgtctggtggggacttgatgccctccattcatcatgtagtgtctgcgtggggtgtccctcagctcccggctctgggggcttggcttgttgttgatagcctacggttttacaggtgaaacctgctctggatcttctcaactctcctctctgatatttggcgtagtctctcatatttatggtatttacagtatattaacaatacattcagtggttttaactttctttccatatgttttggacagcatattatgtattttatccgatagtgtacattttttttttatgatcacctgatggtggcagtgcgtggaatgtcgtatctacttgccaaatgtctcttgagtcccagacaaggatcccccaggacacattcctcttcccggaagcagctcttaggccaggtagaggggcgtgtttacttccctgtttacattgttgacgtttaccctcagtgtcagtgaaacactgaatgtgacagtgatgggaagttgtgaacaattgtccttcactcctgaggttctcctgaattcttcagtcacccccgaaactcatttgattatttccctgtgtgtttagacacgactgttcacctgatgaaacttttgctttttagcgtctgcagactggttacctgcca

SEQ ID NO: 62206 - DNA, 776 bp, Bovine  19866880429566
  misc_feature (1)..(1): n is a, c, g, or t
nttgcagccttgtgtgcattcttgcatagagattgggcaagatcctggccagtcatgttcttggaaggacttctaaggtcaaagaacataaactacttttgattgtgggaaaatgcatataacataaccattttcaagtgttcattagtggcattggtactttgatattgtgaaatcatcatatgctgaactgttctcattttgcaaaaccaactccatccccagtaagcactaactcctctttcctcctcgcacagcccatcacccaccattcagctttccatttctatgagttttactgccctaggtgccttatggaagtggaatcatacaatatttggtgttttgtgactggcttatttcactttacttaatgtcctcgggtttcatccatgttgtaggatgtaccaggatttccttctggaatatttcattgtacttaaagaccactttattcaggtttcttctggtagacacttgggttactttcaccttttggctatttcgagtaactcttctctgaacatgggtgtgtaggtatgtgtttgggtccctgctctcacttctctggggtgtatacctagaagtgaacacaagcttttggaagtcccttgagatataaggtcaaattgcagttgagaaacggcgtgctggctgaatcctcttcgtgctcacccgcgtgcctgaactcctggccgggttggcgcctgctgggaaaaaccaggcctgcaggaaaaggaagagaagactttttaccaagctattttgacagattg

SEQ ID NO: 62207 - DNA, 997 bp, Bovine  19866880721837
  misc_feature (1)..(1): n is a, c, g, or t
ngatgtactagaaataatctagaagctcacaagacacaaatgacttgcccctggacaggttggccttgtcttcacatgcgccacaaccccagctctgccttctgaccatgcaggcgtgggagagcttcccacccagcaaggctggctagcagggtctgtgactgtcagcttcctctgcatcctgctcactggtcagccagtgtcctgggccctcagggagacatggcggggagccaagtccaggggaaggcataaggccggatgtttcttttgccgctaagtgtcctgtgtacatagtcctctgtcaccattcagatgcccagagccgaggcgacaggtgacaaagctctctgtctccagcccagccaccctcccttgcacgagggagagtgtggctgccatagcttgggcagacgtgggactcagagctccttcccttggacctactcaatgttcacatctctgacaggagaagatgagacatgttaacatttttaagagtctaagcaaaaaccaatttgaattggaaagtggtgggggagccgaatggagagaaaggggaaacacagcaagaacctgactgatggctgcagcttgaagcccaggtggccgtgtgtggttctctgttgctaacattttgattcataactttgaggcatttacagtttagatttttgggttgctggcattgcatctcaggccaatgcctccttttttacttaatcaagcagcccattactaactgatctccgttaccgattagcacccattcataaagctgaattcctcacattgttaaggtcagttgtaaaactgcagaaacattaagaatagttcaagcatgtacttttgatattgaactgtggatggttatatttggatgtgagagttggactataaagaaagctgagcactgaagaattgatgcttttgaactgtggtgttggagaagactcttgagagtcccttggactgcaaggagatctaaccagtccat

SEQ ID NO: 62208 - DNA, 2051 bp, Bovine  19866881020463
  misc_feature (1)..(1): n is a, c, g, or t
naaactgtagtgacagaactgattggtggttcccgaaagttagtgggggcgtgactgtaaaggaggagtatgatggcatttgggggaatgatgaaatggttttatatcctgattgttgtggtgctctggtgtacaaatctatacatatataaaaattatagaactatacaccaaaaaagctgatattactgtaggttgatttaagatgtatcatttaagtttggggtttttttttttgtttttttttttaatatttttgattgtgccacatggcctgcagaacttccctgaccagggattgaacccatcccacctgcattggaagcatggagtcttaaccactgaacactcagggaagttctaagatgcatttgctgtatgaatgaatggatgaagtttctttgcaatcagactgacttccaggatttcctagttactttgcctaattctgaccaaaatgggtgaacctattgaactagaaaggataaatttccgaggcaacctatggcatcagtgtcttcctttgatgttaaaccacaagacacaagttgatgtgtgttgatgagtccacaattgaggggttttctcaggccctggatacagagttctctctcctgcaggaagacctgagtggctaggacataacagtaattggacatagcagagctggtcaggtcccctgtaggtgtgactctggttctgagatggtgggcaaagcactccagccctgacacccggcttccctgcccacagaatggatcgaagcattcttaacttacaaggtgattgtgtgtgaaagtgttttccaaagtgtgaattgtctgcagcaaagcagaggctgctgagcatcccatatccacacacctctcgtcacccttaccagctcctctggcaaaacgtggacaggcctcccctccacttggactgccttgttgggaggctgccctcttagtccctgtaacccgattccgtctgtcaggaaaggctgagtctgggagctggcacacttcatttgggtttgattaacgaggctgcggagggtctttggggcacagccgctcagatgcacacttctttccagcaccagatatgccatttatctgtgttttcctttggggaagaaggaggaaatgggctgttagtaaaaacacagactcacttattataataaattatagtgaaaagtaaaataaacatgaccccactcataaaggatgaatctaatccagacagagcctcaggaaagagaagataacaaagaaataagtaaaaaatactttctccttggttgttccctggtgcaggcagtggtattcaccgcacatttaggggcacacaggctattgtagagcaagagcgtccacatttaggccaccaaaatgctacagaagtttgatgtttttgttgcatgaagagttcatgcaaattgtggaaatcaactcccaatggacaagtgagagacagaaaattcactccagagaaaaagggattagggaacatattaatacatgtgggaaaatgtttaaccttactggtgattaaggaaatgaaaattaagataatgagatatctttcattgtctatcaagttaacaaaaacgtcaaaacaaaataaaatacgtaatgctggtaaggtcaaggaaactcatgtaatgctgatagatgtataaattgatacaactattttcagaagcaagaaactcatgtaatgctgatagatgtataaattgatacaactattttcagaagcaagaaactcatgtaatgctgatagatgtataaattgatacaactattttcagaagtggtaaaatgtattaagaactataaacaacatgcataccttttagcctgatgtttatatcatttaaccagtaatccatgtgagtaaatctgaccaaaagaaaaacatttaatgtataaaaaacatggccaaaagaaacaactctaaatacacctgaaaaaattctttgtacaaagttattcatcacagtaagtttggaagtaaactaaatatccctgaactattttgcaagcatctgaaaaaatggt

SEQ ID NO: 62209 - DNA, 2782 bp, Bovine  19866881227876
  misc_feature (1)..(1): n is a, c, g, or t
ngtttatgtctttaattctttaatagtcattataccctcccagaagatttttctagtgcatgggagtggatagaaacaaagattggctctgcactagacaatcagggcaacaccaggtggataagcacatagagtcaaagtagttgaagaataaggtctgagttagacccctggcacaagcaagctgcatcagaaatattggctgccacccacaaagccagtgccaccattctgggagatagtatgcaagtgagtgataatgccacactgctctcttgccaaaaataatctgccctttccttcagtcctctggttgatgcaagcttgtgattaggttttggaattccaataaagttgatcttgatagtctttgccagctgatgattgtttcaatggagaaacaattttttgagcaccttttgctgccattgaaaattattgtccctcaagatcctgacataggagttccctgatggtccagtgataaacaatctgcctgccaatgcaggggacaagggtttgatccctggtccgggaagatcccacatgccgaggagcagctaagcctgtgagcctcaactactgaagcgtgtgcaccgtacagcctgtgctctacaacaacaggaggcactgcggcgagaagcctgagcactgcaaatggacaggagcccccttggtctcaactagagaaaattccccacagcactgaagacccaacacaatgaaaaaagaaaaaaaaaaaagtaacttgctatagcttccctccttagagaaatttatattaatatatgttgtcaacaacaattcaactaacaatcaagttaagaaaaaagaggaattttatccaagctaaactgaggattgtatcccacgagacagactcttagaagctctgagacctgttccatgtgttagaagttgaaggcacagtcatacacatttttgagacaaaggctcatatgttaaaatgacacactgatatttatataaagttcatccccatttttgaggcactctgattaacgtgtaatgtgcatgcacaccatacatcaaggagggagggaggaggcctgaatggacacagagaaggaacttttatttttttcttgtgctgcctgaaaatataaattgtttcatcaatgtaaaatataagtatttcaagataaactctttaaccgaagttgatcttttctttaacaggatttataaatcacatgaagcttaaagagaaagcgtttcctcagaaatctagacaaatttatgctgtaattgcagaatatggttcacggctttacaattaccaggtgatgtttccttaaatcattttgtctgttactcatttaaaatctaatgtgctacaaaagagagtccaactagacatgtgttatattggttttgcatgtgactatctaatagaacatctaataggtgttcaagctggatttagaaaaggcacaggaaccagagatcaaattgtcagcgtccactggatcattgaaaaagcaagagagttccagaaaaacatctacttctgctttattgactataccaaagcctttgactctgtagatcacaacaaactggaaaattcttcaattgataggaataccagaccacctgacctgcttcctgagaaacctgtatgcgggtcaagaagcaacagttagaactggacttggaacaacaaactggttccaaatcaggaaacgagtacatcaaggctgtgtattgtcaccctgcttatttaacttatatgcagagtacatcatgagaaatgctgggatggaagaagcacgagctgaaatcaagattgcctggagaaatatcaataacctcagatatgcagatgacaccacccttatggcagaaagcaaagaagaactaaggagcctcttgatgaaagtgaaagaggagagtgaaaaagctgggttaaaactcaacattcagaaaactgagatcatgcatctggttccacctcttcatggcaagtagatggagaaacaatggaaacagtgagagacttaatttttctgggctccaaaatcactgcagatggtggttgcagccatgaaattaaaagacggttgctccttggaagaaagttatgaccaacctagacagcattttaaaaaacagagacattgctttgccaatgaagttccacctagtcaagcccatggtttttctagtagtcatgtatcgatgtgagagttgaactataaagaaagctgagcaccaaagaactgatgcttttgaaccatggtgttggagaagactcttgagagtcccttggactgcaaggagatccaaccagtccatcctaaaagaatcagtcctgaatattcattggaaggactgatgctgaagctaaaactccaatactttggccacctgatacgaagaactgactgatttaaagaccctgatgctgggaaagattgaagacaggaggagaaggggacgacaggatgagcttgttggatggtatcaccaacttgatggacatgagtttgaacaagctctgtgagttgctaatggacagtgaagcctggcgtgctgcagtccatggggttgcaaagagtcgtacacaactgagcgactgaactgactgagtcgtaaagaatccacctgccaatgcaggaggtgtaagagacgctggttcgatccctgggtcagaacaatccccttgaggaggacatggcaacccactccagtattcttgcctggagaatcccgtagacagaagaggctggcgggctacagtccatagggtctcaactaa

SEQ ID NO: 62210 - DNA, 1626 bp, Bovine  19866880424173
  misc_feature (1)..(1): n is a, c, g, or t
naactgagtcatctaagaaaaaagttggaaatacgttcatgataggcagagccctatgccctatagtttagacagtctcaagtgtctgagtgttgatcggtgattcagagaagcaaacataagctccagaagatggctctaaaaatgtgttatgaaaaattcatgaggcttgtatatatctttgcagtctatatgctcaaaagcattttctattttacacaaacttccaaaagtgccttttaaatgtgctcgtgtgtaattttgtctgtctatagtaatgctcattactgaagctatggaaaatacaagtttgcaaagaaaaatttcactataaacttaccaattttagatggaaactcttattatcttttcatgtaaatgaaatttcaactggaaaaatactgagatgaggaaagacttgtctttattactagtttgttttttactgggcttggtaacacctgcaagtacttctgaaaagttggataagcttctttcatatttctgagatgagaagaggtagactggaataaatttgagcacacaagcaatgccattggaaggcaggtgaaatttggaagaggggagatgtgcagatgagcctaggaaccagttattttattgcaagaaaaagtcttcaatgtgcacactactatctgtgatttggggttttaggaaagagagcaggagttggaaaaggaagaggcaagacagatcaagaactttgagatgtgccaggaatttgaacagaatgccagtgccttccttaattggatcttggagacaaggtttgctgtgatacccccaaactcacgatccttatgccgcacattccactctggggatggaatatatagctgagggaagaggataattcttacagtacttatgctgtcctaaaatcaccatatcctgcctgtgctttgtatctgaaattgactgtattctaaatcagtcactgcaaaattgagaaatgagaatttcatctcattgcccattctttattcactatttgaaagtctcactttttttcctcttgcctataattacagccccaaaataataacattcacttacgtttgccttcccctttgcactttacactgtaattttataatccattatatcacttaactttcagaataaccttgaagagtgtacagcactgatgttattgcttctgtttctaaatgtggaaagaagttcagtagataaattgacttgttaaaggtcacatatgtgtttattggtacaaacagagtatactgtgagtacttcataggaaactattatattgcttgactactaaaactgtcatgagaatcaagtgagataatatatgctaattgcttttattaaatgcaaaatgctctatacataaaaataacatttgttatatcttctggggcaaatgatctggaaaagaggagacttgaagtgtataataaatgaaaaagtggtcaaacttggtagactgtattcagcaggtgtatcagaattgtggagttttgacagtttaaagtgtcagtttagacaattcatgcttctgttcctatgagctcactgacaagggataaatcaaagaaggaacagaaagaaatcctgtatcatggcttaaaaaaaaaa

SEQ ID NO: 62211 - DNA, 1045 bp, Bovine  19866880507182
  misc_feature (1)..(1): n is a, c, g, or t
ntgcactgattttggagcccaagaaaataaaatctgttgctgttttcattgtttccccatctgtcccccaccaagtgacaggactagataccatgatcttcatttttttaatgttgagctttaagccaactttttcactctcctctttcactttcatcaagaggctctttagttcttcttcgctttctgctataagggtggtgtcatctgcgtatctgaggttcttgatctttctccaggcaatcttgacccagattgtgcttcctccagcccagcatttctcatgatatattctgcatataagttaaataagcagggtgacaatatacagccttgacgtactccttttcctatttggaaccagtctgttgtttcactgctactgcatacaagatgtcaagacctgatttcaccttattcactaaatctgcagtactagtgccacttccatatagggaatttgaccttgtgattgctgctgttacctaataccctcacatatttgacaccagctgtatccaccagaccaaagccccatgtatatcttggttcttctgctgatgacgtctaaatcaaacctcacttggaagcaggtgatagggcaaacctatgccacatgtatccagctggatttcaagagaacttgagagtttgacttctgagttagaaggtgtgaattgctacaagtggattgtttaaaagatgttgggtagccatgaatatgacaaaaatgggtttatactgtaaacccattcaaaagacataggagccacatcattcacagatttctagctcaagatcgtaggtgaataaatgatgggcccattacagagaacgggagcactggaggaggagtacatcagaataggtgaagagatgtagttttaatgcttgaagtgttgaacttgaggttcctgtgagatataaatggagatgcttaattgaatatatgaccctggagcttagatgaaaagtcagaactctagataataacgtgaacagagtcagaatacagatgacagttgatcctctagaacaggatgag

SEQ ID NO: 62212 - DNA, 848 bp, Bovine  19866880584131
  misc_feature (1)..(1): n is a, c, g, or t
ntgtacacctgttgtaatcaatgaaaactctgataacctaatcaacaattagaagcatctctcacagagccctacgatatatttaccttggtgtcctcatgggcaaaatgcccctcaggaaatcgagtttccctggttttttccagatcaggaaggacccttgattttgcttgcacctctgtttcaaagtgttcatgcttctgatatttcccctgaagattagaaatcagagtttatggcttaatggagcctggtctcctggatgataaaagagttcttttagtcctctgctttcttgcaggcagaactaccagtttctcagcatagatgaaacgataacctatgaccatagctgctgctgctgttaagtcgcttcagtcgtgtccgactctgtgcgaccccatagacggcagcccaccaggctcccctatccctgggattctccatgcaagaacactggagtgggttgccattgcctagaggagtcctattctaaaacaagttgttgtggcagaatcaacgcatacaggtttttaaagattcccagacccaatgtcctggaccacagaagaaggtcttttcagtccttattgccttggggaaatttccaataaatattatgttaaagtcttaattgccttctgtggaaatgaaataatgtaacagaatttttccttttaagaaaagaggaagcaaatcctactgaaagtagtgaacaatgaagaaaattatcttgacaacaatggctttttttattttaactggggaagtttttgcatgctaaattatgctcttgttgtcatatatagatcgatccatttagtaggtaacacttcgttcttgatcta

SEQ ID NO: 62213 - DNA, 635 bp, Bovine  19866880614670
  misc_feature (1)..(1): n is a, c, g, or t
ntacctcttcctttccttcttagctttctctgagacctgctatactttgggcatcatccctagaatgctttctggccttgtcagaggtgggcagggcatctcctttgtgggctgtgctgtccaaatgttcttctctgcttcatgggcctgtagcaactgcttccttctggctgccatgggctttgacagatatgtggccatctgtgccccactacactatgccagccgcatgaatcttactctctgtgcccagcttgttggcacctcatttctgagtgggtacctctttggtctgggaatgacactggtcattttccacctcccattctgcagctcccatgagatccagcactttttgtgtgacacaccgccagtgctgagcctggcctgtggagatacagccctgggtgagctgggaatcctgatcctcagcctgctggttctcctggtatccttctccctcatctctgtctcctacacctacatcctggcaacgatcctgaggatctcctccaccaaggggcagaagaaggccttctcgacctgtgcctcacacctcacagtggtcactattcactatggctgtgcctccttcatgtacttgagacccaaagccagttactctcttgagcggg

SEQ ID NO: 62214 - DNA, 1002 bp, Bovine  19866880645029
  misc_feature (1)..(1): n is a, c, g, or t
ncataattaggatatttattaaagtgacaaaattcctttaagaaagagaaaaatcttcagattacaatgatccttgttcttatttggtatttatttatttagtaaatatttattgaggatctttgtgttttaagaactattctggttatgtggatcagcagtctttcaaatagtttactgcaatagttttactcagcacttggcatttaatgatcttagaattattgtgatcattatatgaattaatatatgtaaggagtttcaaacagcacctgccatgtaataagtaacataaattcatgatcttgcttgggtatttgtatcattcttagcaaattgatagtattcaaaatgttaagtaatacaagttccaatatcctttgtaatatgccttcatgggaacataagaaatttgggtatttttggaatttcttaaatatttgaatgaaataatgaagctgtttataattaagtgactcatgaattaactggcttcttcaagggttgtctcatctttctaatcttcattttaagctagtggtagaattcactgtatattacttcttaaaaaaaaacttctattcatttaattgacaaaatttagtgaaaggtagactgagtttttaaaaaataaattaaaaatctattttaaaaatccctggattttaaagagttctcaaaggtagagacattgtccagttcctaatacatgtttgatgcttagtaagcacctaaaactctgttgagtttgggaagagtgatatgtccattttatttatatgccataataaatgtacaacatcaatacagaggaaaaagagaaaacagcaaaggacctggttgactatatactattatggcaagatttattgataaaagtacaattacattttttaattatctgagaatttaaaaaaacaaaaagaaaaaactttgtagctactattgtgaatttagaactgattaaaaaagaaaaatatgtattttttcattataattatt

SEQ ID NO: 62215 - DNA, 1360 bp, Bovine  19866880877861
  misc_feature (1)..(1): n is a, c, g, or t
ntctggaactgaaccctattatctctgaggtgtgcctgtactggaatgcaaacagatgagatacaaaggctgacatatccaagcactcagaaatgcacatcctttttagtcttgccagttcttaggctctcaatgagacatcccaatctttccttcacagcatggcaccaggaataccttttgcccattccttccacctttcctcccagtaagaactttcccttcaactcttggccttgagtataattccttcttcttttctcttgttctccaaaactcctgcctgtccacatgcacttatgctgggtatgagtgcctatctcatctgagggttccaacaaagaactaggggtggtggctcaaaagatgggaattcactaaataagctaggtgagagtcggagaagggcctcttaggtgggaagaggaaaagggatgtgacagtgtgaatgaagggagaaatgtataatcaggttcatctcattgtttatctttttcttcttcaaggtcaccaaggtcaagcaaagaacaaccacacaatcctgattcatatatggaaacctgctcagagctgttcttctaaaaacctggatgtcattaatatttgatgtttatggaactaagatacaattaaaggaaaaatgtatatatagacacacatatagtgtactttattagccattacttcttagaaatgaaaagcttttcatttttttttatacttttctgtaacatctcaatgtcccattttgcatctataacttttataacttggaaaaaataataaatattatatttttcttttctgaaggtgtgtatccctaggagttgatttgctgcttaaaaggaaatagtcatctgtggcctgaaaatcagatagagacagctaagcctcaagcaatatttgaatttatactttggggtgtgatctttacaggatataactctggtcaagaatgaacaggctgagcaagctgtgctcaaagaacccaggaggaaggcagacaaactgaaattccatctgtccttcaattgccaacccccatcccagggtggagttgctttagtctaaaacaatgttatcttttcagaattgatctcctggaggggccataattgggtaatttgtgtaccaaataaggcagcttttggctatttgcctgaagtcactagtacattttgaaagtaactgtagcccctctgatgtgaaataactggttccacttatttattcaggtaccaacagctcagtagttctccagttatacttcatggtcctcacatgtgtggattctatgaaaaagttgctccaggcaaagacctggattaggcaaacactgaagaataattaatttacagaa

SEQ ID NO: 62216 - DNA, 1354 bp, Bovine  19866880904068
  misc_feature (1)..(1): n is a, c, g, or t
naccaagtcacttaaccaccctgccctatagccttgtttatttgtttatgcaaaggtttatttttaaatgtatgatagattccaagacaatacttcattcttcctataggtggcaacagatggtatgtcagagaatacaaatgtttaaataggaatggaattaaggattactcacttgcctcaggcacaaggaacagattcctttttgtaagatttcttaattccacctgtggccaggggaccctttccctgcagcctttcctgttagctcctcgaattccttctgctcctcctgtttctgcttgaatgccttatcttcctctttaatcttcttgacttgctctttgggctgcttcaggggcttcttcttgccaccttcacagcccaacatgatacctgaggcctcttccctggaccttactaccagaagcagccttctaatcataaaaagaaggatggtcatgtcaagagtgattactttgggaattatcatatgcatcaaaagggtttccactatcatataaaaagtagcaagacctcattgatgtctatttgaggaaggagcaccctgaggcttgaaactcttttgctaggattcaggtgtgacaccaagctgactgtcagagctcttgactccctaggtggaggtattgagggacacagcagatcgactcagtgaatcccacccagatgccactgatgacctgcagagccagcagttgaagctgaaggaggcctgggatgacttgcaggggcttacaaaggatcgtaaggagaacctacaggaggccttaaaattctaccagttcctcagccaggccaggtaaggttccagaggcagacttccaccaggtggaattggcagagtccatgcctggcccataaatggagcttctaggagctgtttgggtacaggtgttcttcattacctggtttggagggtaccctcttggtccagattgtacctttggtaaggaacaaaattctcaggttcaatatttcaagccatgaaatattgaattttggaagaatatgaggttatctaggccaattaagtatgcttctatggagtctatactatatagagagtgctatatgaggaattataggatattgggagttcccagaggcactagtggtaaagaatgtgcctgccaatgcaggagacaaaggagatatggatttgatccctgggtcaggaagatcccctgaaggagaaaatggtaacccactccagtattcttgctgggaaaatcccatggacagaggagcctggagggctgcagtccatggggtcacacagagtcggacatgactgagtacacacatgcatagaatatggggagatagtcta

SEQ ID NO: 62217 - DNA, 1671 bp, Bovine  19866880130037
  misc_feature (1)..(1): n is a, c, g, or t
ngtctgtctagtcaggcttggtttttcctgtggtctgtatggatgtgagagttggactgaagaaagctgagtgccgaagaattgatgcttttaaactgtggtgttggagaagactgttgagagtcccttggactgcaaggagatccaaccagtccattctgaaggagatcagccctgggatttctttggaaggaatgatgctaaagctgaaactccagtactttggccacctcatgcgaagagttgactcattggaaaagactcatgctgggagggattgggggcaggaggagaataggacgacagaggatgagatggctggatggcatcactgactcgatggacgtgagtctgagtgaactcccggagttggtgatggacagggaggcctggtgtgctgcaattcatggggtcgcaaagagttggacagagcgactgaactgaactgtcacaagaataaatgaatgctggagcagataagagaaatgttattgccaggaagttccagggtagctagcgaagtagatagggtagctagtgaagaagatagggtagctagtgaaaaagatagagactgacccactgggagaagtcaacacagaacattggaagtcacgccctgctcctttttattttcttggctgcactgtgcagtttgtagaatcttaattccccaaccagggcttgaacccaggcttttggcagtgaaagcctggagacctaaccactgaactgacagggaattcctgggtcctgccccttctgaccactgtggcctcccatgacctctcctctcctcacacacccctgtcacattttaacaccaaatcagaacaccttgaaattgatcttattgctgtggccaatggaacatgcatatttttaggtcatagcatctccatcttttgtactcctgagtgctatctgctaagtaggtactaagcaaatacttcttttggcttagctcaactgggtatagttttatgaacaggaactgtagagctggacagttatccatctctagaatgcatttgataaagacagatgactaattcccaatttgtgtggctttctacctgcagaaatctctctggtcccagctggatagcatgagcctgtcccatcagatgttggtgagatgtgctgccatcattggcctaactttcactacagagctgttgtttgagattctcccttgttgggacatgaagatgatgatcaatgccctggcaacccttgtggaatccaacatctttgattgtttccaaaatggcaaggagctccgaatggccctagaaaagaacgcagcttcatttgaggtgaattatcgatccctttctctgaagccgctcattgaaggaatgggtgagtagagcctggaaatgaatcatagttccttcagtttaaggcacattttgataaaggaatggatctgtgttttgtagcagaggctgacttattttccatggtgtctctgtcttctctagaccatggtgaggaggaacagctccgtgagctggaaagtgaggtgattcagtgccacatcattcgattctgcagcccagtgatgcagaaaacagcctatgagctgtggttgaaggaccagaagaaagccatgcacttgaaatgcgcccgctttctggaagaaaacgcccacaggtgtgagccctg

SEQ ID NO: 62218 - DNA, 2448 bp, Bovine  19866880442544
  misc_feature (1)..(1): n is a, c, g, or t
ntaggtagtgggccttgacttttaaacctccttattgagctataacatgacatacagaaaagtacacaaatgataaatcctcagcttagtgaattttcacaaaatgaacatataatcgccatccaggccaagaaattaacaaagaaaaaaaaaaaaatagcagtactctggaagccctcaaatgctttattcctctccctttacccaaagatcaaaagtaattctaaattacttcagttcagttcagttcagtcgctcagttgtgtccgactccttacaaccccatgggctgcagcacgccaggcttccctgtccatgaccaactcaccaacaacatcacctaaattacttaggcctgttcttaaaatttatgtgaatgaaatcctacattgcatagttacataagccttcttttagtcgacattatgttgtgaaattcatccatattatttgctgtatctataattcattcattttcattgctatgtagtagagttggccctctgtatcagcagtgtcagcatccacagactcaaacaaccacaaagcaaaaataccttaagaaaattccaaaaagctaaacttgaatttgttgaacacaagcaactattcatgttgcatttacattgtatttgctattataattcatctagagatgatttaaaatatacagaagatatgtgtagattatatgcaaataccatgccattttatatacgggacttgagcatctgtggattttgtatccctgggggtcctggaaccaatttcctgtgggacacagagaggtgactatattccattttataaacatacaacaatgtattccttctgtatttgtacatttgagttgtttccagtctgggttcttatgaataatactgccataaaaagttttgtacaagtcttataatgaccatatgtttgcatttctgctgttgggtatatatatgtatatacaggtgatattgttgcaaaaggtacagttttggtagatgatgccaaataattttctaaaatggtcatatttgattatactctgactggagtgttacaaatgttccatttgcttttcattcttatcaacaacttagttttatcagtctgtacttttaataattcttttggtattatagtggtatatcattgtggtttccatctattccaaccctgatgtggttgagtgccttttccaaatatttattggccacgtggaaatcatcttttataaaagtgtctgtatagatcttttgtttatttttcaattgggttatatgtttttatagatgtgttggaattatatattctgaaaataagtccatttgtttttgctgtatgtgacttttcccattctgtgcttgcctttttattctgctagtgatgtaattaatgaacacagttttttttattttcatgaaatccaatttactagtcttttcctctgtagttagtacttttgtgaaagtactaacacactgtttgtgaaatctttcctcacccacaaatcatgaagatactttcctacattctcttctagaaattttgttttaccttttacttttagagctgtgacccaactggcagtgatgtttttgtaattcttggtaaaagggaccctatcataagaaagctaactcaagactagacaggaaagtagacataaaatgaagtagagaagagaccgaagtgaggattggcctgtggattctgaaagcagccgtttctaataatggcttgtagtttccttctgtcagaaggaataatggtttgtaatttccttctgttagacctgagcatacttaaaagtatcattataaattaaatcctggtcatacctgtgttagggcaattaagaggaggctctgccccacactggtgggggtggtattaggacagaatcttgatgtcagcatagtctaaaagaaggcaacagttccagaacagcaaagagcacccaaaccagcagtaatgcctcactttcagtgcattcaggtagttttcagagtatgcatgcattgcttccaagtccagatccacaaactcctgaaggctagaaaggaggagtgtctactctcacctttctccaaggccttactttccatcctaggatatgcttgtgatcatgattgatagcaaatggaaatcctaaccccctttctccaagatcgaggactcagtatgacggacatactagaacacattggtataatatgtatatattttgcagtctggtctagttgcctttttgccctgatttcaccagaataagataaaaatcaggcctatatatcattccttaaagctgtaagcaaaaacagactgtctgaggttagcagcatggaaagtactcttagaagagctcctgtacaagaacttctatatgcacactgacaacaaaactaacatgaacaaaaaatgttttttcaagggtcaaaaatgcatacaata

SEQ ID NO: 62219 - DNA, 1414 bp, Bovine  19866880731009
  misc_feature (1)..(1): n is a, c, g, or t
nagggtggattattattatagagaacacagattattattcgtggtccaacctcaaaacaagaccttcttttaagcaagaagcaaacaaaagacaccccgtgctattgtgggtaggcagaaaagcagccccagggcacttgagctcagaatgaaggacaaagcacaagacgacaatctgacttactccaggaagcagcactggtttgtgacccttatttactctgtgattgtgactagttttctccactgtgaggagcactgcaaggcaagtcacagtctgtaaaatcaataaattaagtttctcaacgattttctcaaacaagatccctgctacaaggtctagctgcaagaactgttaccctggagaagttatttaaagatggaactaggccaagggcccaagtttacagtcatgtaattttgaccaaaagaccaaccaaatccctaaatgagtttttagacaatctgttcaagacagacaattatgtcaaaactggttaaaaaacaaatggcttttaaaaacaacaacatatcatcactctggctaatttggacatgtagtttttagagtcaggaaaatcaattccaactccagccagtcagctagttgcagaaaaataaaataacttcatacatagctagttaacctcctcttatccctgactctctcttactccttttgtaattcttagagattctgttagtcataggaagaaactccccaaaccctggtctctttatcttcttttttccaataatcttgtcctcaggcttatcccagctactaattcccataagcatagcctagatggggcttctccgccatggcactactgacggtcaggccagattagtctttgttgtggaggctctcctgtgcatggatgtttagcagcatccctgacctccaccaggtgtctgaagtatcttctccccttccagttgtgacaaccaacaatgtcttcagacaaccacagatttcccctattcaggggtaagttgctcctggttgagaactgctgccccagatcctatcatcaatacctgtgccccctccacaatcttatttcaggctctctacctctgatctttccagaacatttcctccaaaaccctgattttattgaatccttcagccacattaaaacccagaatccatcagtcctgcaacccttttacagtctcatccattctgcatctctaccagggcagctgatcacagatggagaaaagcacacaatcccactgactgggcttccccttaaacccatgaccattaacgtcaaacaggactcttaatggtgccgagcaatcctcccacatcccctctccgtcaaggatccactttcctaaatgactactttatgccttctctttaacctcaaccggggaccgcccccgctgcttctgctca

SEQ ID NO: 62220 - DNA, 1116 bp, Bovine  19866880809115
  misc_feature (1)..(1): n is a, c, g, or t
ntgtgtacaatgtggagttttccggagagaatcggtgacattacaatgaagtgaagatagaagcagattgagattttagcctgtcctctgtgaaatcagacattaaggtatttgcaaaaatgtaatacatgccattctcactaaattttttgtttggggaaatagcatttttttccaatgaaaatgttcattatattcatgtgtcattggtttattttctttaatttttttttttttaagtaggattccggttccttgaccagggatggtacctgtgcctcctgcagtggaagcatggagttttaaccactggactgccagggaagtccccccaaaatatttttaaagtacctcagtttttgtttcacatatagcaatatcagtagatacaacctatataaatgtatgaacccatataaaagtacataaacccatagaaatatacaaacccacataaaaagctattgcatgcatgctcagtcacttccgactctttatgaccctgtggactgcagtccaccaggctcctctgtccatgggattctctaggcaagaatactggggtgagttaccatgcccttctccaggggatgtttccgacccagggataaacctatgtctcctgcatctcctgcattgcaggcgtattctttaaccactgagccacctgggaagcccataaaaagctattggaggtcctcaattattaaaagtataaggggattctgggatcaaaatgtttgacaactgtaggcctcggcagaacaattcagcctggaaggcttttattataccttcattattttgaattttgattggatttcatccggcttttctctccaagtgagattcagatatataaaaagcagctataaaaataccctacctggaaatcatcttgagtttccagtgcagtattcacttgcatcagagctgccaggtgacaataatacttgtagtggaaaaaaaaatttaagctatagatttgccacagcaaggagaaacaagtggtttgctggtaaagctgtgccagcctcttcttcctgttaaaggatacacacgggacaaaagaaaaaggtatcatcaccaacattcttgagggaagcacaggtgcag

SEQ ID NO: 62221 - DNA, 1977 bp, Bovine  19866880864862
  misc_feature (1)..(1): n is a, c, g, or t
ntacattagcaagctagaatctaggccttaaagggtcagataacagaattagggctgtaattggttcagtgagtctttattattcatctttgcattcccagggctcagcactgttcttggcatgtgtagatcatcagtaaaatgctgtttgaataaatgaatgaataataatttttgtgagcccttattaaatattagggacttcacctcaatatcaattatatgaggtagaaacaaactaatattaactccattttataaatttagaaatggagactcagagatttgttagacgacttgtccatactcataaatctagtaatttatggagccacattgctttcaggtgccatagtaatgttgcattatagttaacctggagaaggaaatggcaatccactccagtactcttgcctggaaaatcccatggacagaggagcctggtgggctacagttcatggggttgcaaagagtcagacatgactgagtgcctaagtgcatagtcaaccacaaaatctcagcggtatacaatagtacatttttatttatatcatgaatatgtggggttcaattgctcttggctggatttggctgatcttgcctaggcttgttcatatgcctggtgttgaacaggttgtcatccaggatggcttcagataggataactgggaattgtggctgacataactggggcagggattctgtgtatctcatattggtctggccttccctggtggctcagacagtaaagtgtctgtctacaatgtgggagacccgggttcaatccctgggttgggaagatcccctagagaaggaaatggcaatccactccagtactcttgcctggaaagtcccatggacagaggagcctggtaggctacagttcatggggtcgcaaagagttggacacaactgagcgacttcactttcactttcatagtgggctagcccactacgggatatagtcatggcaatatcagaagagcaagcccaatgcacaaacatttttcaaacctctgtgttatgtttgttaacatcccatgggccaaaccgtccacaaggaggagggcactgcaaagggcacagatacaagtagggttgaagaagtggagccattaatgcagtcagtctaccatagaaactaactgtttctgaactaccaggactatctgatcccgaaacctgccctctctttcatttctctataccatctctgaaaataagagactatggaaatacacatacaaatatgaacctggcctgtttcctatcctgaaatccaatggggaagacaacatacacaaaattagcagtatgggagacttcggtatgtgctataatacaaaggcataacaaaatgtttagtatgatagtatagacaagggaatgagtcatttgttggaaaaggcccctttaagagaagatattatggggaaaaaaaaaaaaagagagagatgatattatgcagtggacaagcatatgcccttgatcctcgttttagatattgactctgtcagtatcctctgtcaccactacccatgggatcttgttcacgttaaactctatgtacctcagttttcttatttgtaaaatggacataataataataataccttctcaataagctttttgtctggagtaaagaaaatgattatgtaaagcacttgaaagtgccaggcatgtagcatgtgttccacaaagatgagctattgttgtttgagcaattggtagaatctttctgtgctgggagacaacataacacatctaactttattgggtcccctactgagtgtctggtttccctggaagaggggtcagttctacaaatgcagactcaacaagcattttttgaacaatatatcaggctctgagttaaggcagctacttaagttgattggagactctattaccaggtaagaacttctttgttcccttcctcttggcatctgcacccttgagtcaggggacagactcctg

SEQ ID NO: 62222 - DNA, 2102 bp, Bovine  19866880958949
  misc_feature (1)..(1): n is a, c, g, or t
ntaaggaaagttgagcactgaagaattgatgcttttgaactctggtgttggactcttgagagtcccttgggctgcaaggagatccaaccagtcactcctaaagaaaatcaatcgtgaatactcactgaaaggactgatgctgaagctgaagcttcattactctggccacctaatgcagagaactgactcattggaaaagaccctgatgctgggaaagattgaaggcagaaggagaaggggacaacagaggatgagattgttggatggcatcaccagctctatggacatgagtttgagtaagctctgcaagttggtgatggacagggaagcctggcatactgcggtgcatggggttgcaaagagtcgcacacgactgagcgacttaaatgagctgaatgatgggcttgaccagtcagaaaagacaggtcaaaaatttacttcacaaaaatctctgaagataagtattgtagtgtaaatttaatagttctggtagaagtcacaatcattattaaccaaaaatgggtgtttactcaggaaaaacttgtctttataatcacctgccaactattgcctaagttcaaccaccctccacatagtcaggactactttggggtcatagcagtctctctgacccttgctccaaatctccatctagggaccctgaacccatccttctgtgagccatgggccactggggctggtggggggaggggatggcagtgccagccaatcagaagcacagtccgtgcccgtgaaacaatgagctactgatgagggtgtggccaggagaacggcttttagagaaaactgtcattttatggtcagctttagacagacatggcacttctgctgtcttctgaataatgtcatccaggctcttttcctgtcttctgcactcctgactagatcctgaaagatctagtctctaatctaggccctgattttcctcagccttggagaaagaagaggtatgtgactgtaggagtagaaacagtggttgcagagctaagttgagggctacccttggggaagtaggtttgggagcttaaggaaagtggggaagccttgggctaggaatggaagttcatcttgaatatatctgcgtcaatcctttaagtgagattagaagtttgaacgtttcagtgttacctcatcctatttatcctagatgttctatttttctagattactatctatttacctctctcctgcaacttctcaaatgatacccttatcagtcatcaaatagcaaatgcctaccatgtgaaggagctctagaaagatgttgtggaggaaacacacttatacattgaatgtgatctctaaaacagagaagcttcaattcagagaagacataaatagatcaaaagataaccaaggattttaaaaatagataataagtcacttaaatttatagacactaaatgccctcatagcttagagggaaaattgccttgactagagtggtctggcaagctttcttgacagataacattatccctttatgttcagagtatctcctttggattcttgtaaaatctgattttacatattgatgaaaaatggggtggaaactaaaatctattatatatttagagaaacaataatggatataattgatctttagcttcattttcctttgagggtattgctgagttttctttaagcaaattaaaattggacacacactcttcttcattcaggaaaatctgtcttggtatgtcatcgaggccttgctctttcactctgtcagatatcctcattcctagatgctttcatgctttctcagtggccacactctgttcaagctctattcttgattaaactggacaaataattgatgagggtacctctgtagacattgaaagtgctctaaaattaaatattttctctaggttataaacatccccaaagtgtcataaaatgggatgtaccacgggtattctagaaagaatgctgctgctgctgctaagtcacttcagtcgtgtccgactctgtgcgaccccatagacggcagcccacgaggctcccccttccctgggattctccaggcaagaacactggagtgggttgccatttccttctccaatgcatggaagtga

SEQ ID NO: 62223 - DNA, 1632 bp, Bovine  19866881112409
  misc_feature (1)..(1): n is a, c, g, or t
nttttgaggtttggacccgaataataatctgttgttctctataataataatccccctctttagcagaaaaaaatctacttgattcagtgtggctatcagtttatttagaagaatggccaaaagtgtccattgtgtcctgagaataaacatttggaagatagttggggagaatgggggagtactgctgctctccttggcctggagtcataaagacctcaggaagaaaaaattctgaaaatgaccatcagtcccgcgtgacaatacccttccttattctactcatctattacattctaagaataattggaacactgtagatagggattctctcccaaatatttctttaaaaaatatcttattttgaaaatgggtgtttttcatcttttctgtattaactctgtttccacttttaggccaaattagtttctttctaatcttcatttagtccatgaaagagtttcttttgaggtgaagattattttatcttagcaacagtccttaataattcctgcagttgcctctgattgtaaatcttgaaatgataagacattttaattactactttccgggcttaggctaactgaaaaatgcaatgaggagaggaatatgtgactcaatgtggttagttatttcttgagtacacatgttatctgacacactgaaattcaatggtagggaagatttcattaatgaacacaagatatgttacgcttttttcccccttaaatacaggaaaagagtgtgttacataatgaacatggctttaaaataaagtgatctcttacctagaacagtttaaattggtttaaatatggaagatgagaaaagatcaacctgatataaattgaaatgtaggaggtgaatataagaaccatttaaagagttaaaaatatggcctccacatcattaaaaatagcatcagagaagcatgatgagatgtccttcagtagatgaactgagaaacttaagtacaaaggatattgttcagcaataaaatgaagtggtctgtcatgccatgaaatgatatgaaggaagcttaaatgagaaaagtcgatctgaaaaggctacattaactatatgattctagctatagaatattctggatgttggtgatacactaatgcaaagtgttaacactagagaaaactggaacttgggggaagcaagagggaatatatggaactccctttttttttttttggctgaagctcagagtcttaacgtctggaccaccagggaagtcccaggaactacctactttgtgtaaacctcaaactgctctgaaaattaaagtctgttaattcaaaagaaaacttaaatattaggtggaactgaactagtaaaaatgtcttcttactaaaaaacaaaaatcccagactctaatatacagtggtggtggattactgtatatagtttgtaatgttcttttatcttttctttgtcctcagataaatatgcacagtggtattcatgataaatcctactcctaaactgtccttgtttctctctccagtgacatatggtgtatcggccttgggaggtgtatacaccaaaagaaatcttcgtggcaaatgggacacaagggaagctgcgtgcagttcaagtctactaacacaaccggcacgttgacct

SEQ ID NO: 62224 - DNA, 1426 bp, Bovine  19866881317273
  misc_feature (1)..(1): n is a, c, g, or t
ntgggagcaagcccttgttaagaacacagtgctctggcatatttgaaaatggttcattttcccctcctcatactggaagtacaaggaaatgtttttcttagtatttgtgagaagttggttcagccctgtgaccaggttcccctggacttctgaactctcaaaaaagctgtgcacatgatctctagcatttgttatataggttttgccaccgctgcagtgcctcctgcaggggttgtctgctccagtaaaccacagctctttacacttggccatctgtctctccagtcttaggggcagcagtttgccctgtgtcctccactgtcatgtgtatccgacaaaaactgttgatgtttcagtctgctcagctttttattaggcaacttctaagctccatacacgtggaactgggaaaacggaagtcaccagagcacattcctgtgcacttgcattgcttaggtgatgctgtttctatctcttttccactttccctttggtccaaattcctgattcacttatcattaatgtggtacaatggctgaaatactaaagatggtagaataatgacttaacttttatttccataaataaaaactgctattacaggtaagtggcagaaaaccccaatttcaaaaacagctaacttccaaactacatacatgagaaaataagttattaattttaacacacttcattaaaaatcattctggcactaccaaaaatgttcctatatacctactcccacttttcatacagcatgtgatatacaaaagaatgagtcataaaatatctgtgtaaaggtctgtatgtctatggataaatcacctcaaaagttacaggtatgctaagagattggtaatggtaaatttttatagtgataaaattttatagtaataaatattacaaatatttaaatcacttttcaaatgtttatcattactgaaattatatcacaacagtgtttgctggctcctaagttcaaaaattattttggcatagaaaacttttgagcagactacttgttgccagtatctatgtcagttaacacctccctgtgggtgtgccaaattctgtaattttcagcctgtgctgtaacatgacaaaggttcagaggctctacactctaccatatgcaataaaataagagatatgtataacatgaagaatgttggggcttcttcatttcaaccttgagtttattttggcaataaccatgaaatagttcaactattcaaatggcatacattttctaaaagacagcatgctctgagaaaaaagataatcttgaaacttggaagagattttgctcactgaatattaaacatgtcagcctatgataatctagtaatttctgtgtaggcccaaatatttaaaatgttatacttctctcccttacatatatgaataattactgtctgcaatgactatt

SEQ ID NO: 62225 - DNA, 2359 bp, Bovine  19866881429848
  misc_feature (1)..(1): n is a, c, g, or t
ntattttctattcctgcccttgttctttcttcctattttgtcttcttctctttttctgctttttgtggttttcactgaacattttatgtaattccattttctttcttctcttagtttgtcaattatacttttttcttaattttttcagttgctgtagactttgcagtatatatttaaaacaaatccatgtgtactttcaaataaccctaactagcttcacatgtaggcaaataccttacaataacaaaatattactaattcttttcttttgtatcattgctatcattacttcacttatacataagcatatttaatataattgaatatctctgctgtcactgggagaaggcaatggcactccattccagtggggtcttgcctggaaaatcccatagatagaggagcctggtgggctgcagtccatggggtcgctaagagtaggacacgactgagcaacttcactttcacttttcactttcctgcattggagaaggaaatggcaacccactccagtgttcttgcctggagaatcccagggacaggggagcctggtgggctgccgtctacggggtcgcacagagtcggacacgactgaagcgacttagcagcagcagcagcagcagcagctgtcactactttgatcaaactgttgtctgttagatcagttatgaataagataaagtaaaaatttttattttcccttcactatttcttctctggtgtccttcctttctttatgtagatctgggtttctgacctatatcacttccttcctctctaaagaagttttaccatttctaataagacagacctattcttaaggcagcagattcctttagcttttgtttgtttgagaaactctttatttcttctttatttttgaaggataatttgcaggatatagaattctgggcttgtgagttttttctctcaaccatttaaatacttcaccccactctcttatttgcatgctttctaaggagaagtcaggtataatatctcagctcctctgcaggtaaagttttgttttcctttgatttcttctagatttttttttcttgatctttcattttttgcaggttgaatatgatatgcctcagtgtcgttttgttttgctttatttatcattatcctacttgattttcctgggcttcctaggtctgtgttttggcatctgatattaattaggggacattttcagtcatcattgtttcaaatatttctttcttattattgtttcaaatatatcattctttctctttctctcttctcctcctggaatccccatcatgtatatgttataccttttgtagttgccccatagctcttggatattcttttctttttcatttcttccagtcttatttcttgttgtcttcagttttttttttttaaactttacataattgtattagttttgccaaatatcaaaatgaatccgccacaggtatacatgtgttccccatcctgaaccctcctccctcctccctccccataccatccctctgggtcgtcccagtgcacaagccccaagcgtccagtatcgtgcatcgaacctggactggcatcttgtttcgtcttcagttttaaaagtttcttttgacatatcctcaaactcagagattctttcctcaactgtgcctattccactaatgagctcttcaaaagcattcttcatttcatttacagtgtttctgatctctaacatctctttttgattctttcttagaatttccatttctctgcttgtgtgtgtgtgtgtgccgtgtgtgtgtgtgcgtgtgtgtgtgtgctcagttgctcaattgtatccaattctttgtagccccatggactgtagcctgccaggctcctctgtccatggggttctccaaagcaagaatactggagtgggtttccatgccttcttccaggagatcgtcccaacccagggactgagccagcatctcttatgtctcatgcatcgacaggcaggtgctttaccagtagtgccacccttgttacatggcctattttttcttgcatgctgtccactttttctgttaaattccttatcctattaatcatagttttttttcaaatactggggtttgatcatttcaacattcagtgtcatatctgactctgatttgatgctagtctgcctcttcaaactgtggtttttgctttttagtatgtctcgtgcttttttctagtgagtggaacataattactcagtaaaaggaactaaagtaaataggtcattaatgatgtgatggtaaggtgtgaggggagagaaagcattctacagtcctatgatttgaagcattctcctgtgcctgtggctctcttttaagagcctgtatttctagactgcgaa

SEQ ID NO: 62226 - DNA, 1657 bp, Bovine  19866881430124
  misc_feature (1)..(1): n is a, c, g, or t
naacaattatataaatcttcataaatgtatttgaattccccagtttaatatacattccttaactttgctactaacactttaattatgaaaattttaatacaaaattaaaatttataaaataattttaataattttaattattttataattaaaatacatatttattaaatattttaaaaataaaaaattttaccgataagctcataacccagagataacttactgtccaactttaactttaatcttaatttttttcattatttatataaaaacttgattcttacatctttgcaatcttcttttgtacagctagttttgatgcgtgtatcaaaccacctaacagttccatcttcaccacaagacagaaaggtatacgggtcattaggtacagtcataatctgaagatggaaaggtaattgtacaggtaatgttagtgaacatttaaacagatggctttgaaaaatattactgctatatcacaaaatgattaaggcaaaagcaactaagaacaatttattggaattatttatgacttacccataccataatgcaaaacagtgctatacatacagatatatgcaaaatgtaactgctgaattaatgtgattcatttaccttcatttgaaattaatgtacctccagactcaaaattctttaaaattacaaatgccttacaacatgacaagaaaaatcctgcccctgaatagtcaaatttttatgttttctggatatgaatttacacatgctttagaaacaaagtaaaaaattttcttctctgacaatcattataaaaccctgtagtgccaaatcaagcattcaaattgacctctcaaaaaaattttgagtgatggtaatggttctataaccacacaaaagtactaaattgtcatgaagtgtatagttaaaaatggtaggaatggcaaatgtcacattatgcatattttataaaaaattaaaattttttaaagaaatgaaacattttagatattcctatatctatttctggtttagcaataaggctgtaaattgaggctctgtgtaccctcctatccaacatattccccccacccttctctgtcccaagaaatagaaactaccaaaattgggtgtttagcagttccacagagacttttatgcacccataaacaatggaaagtaggttcccatgttttaaaactttgtatactcaaaaaggtattcagattaactagtcttcaaggaaatacaaattatatttgtattcattaggtatttattaggatttgtatatattaggattaaatataaattataatcctaagtaaatatcactagacatcgctggaatgaccaaagcgaaagggatttgataatatcaaatgtcactgaggatatagaacaactagagctctcaaacatcattgatgagacggtaaaatggtatcatcactttgaaaaaccatgtgttagtatctgctgaagtggaattatgcttcttctatggcccagcaattccactacaaataaatgtcatagtcatctaaagatgtgtactacaatgttcaaggcagcacaattcatattaaatatttgaaagaacccaaataaccagaaagacaataagaaggaaattttatttattcttaaaataaaatataaagcaataacaataaacaaa

SEQ ID NO: 62227 - DNA, 1485 bp, Bovine  19866881570932
  misc_feature (1)..(1): n is a, c, g, or t
ntagtaaaagctagttgaatacagtagttaagagcacagaccaagaaggcacactacctgggtttgaaaatccagtccaccacttaatcttattttgtctcactatccttagctttacctaaacaccctcatctgtaaaatggggacaataacataatacctaccacttagagcaggcatgtgaagaaagaatatatgtaaaagtgcggagaacaatgcctagcacacattgagcaccacatccaccatgtaggctgttattagactataaataaagactgatgggtctaggttaaacatgtctattccttctctttctcccccgtccatggacataaatccatggacataatgctaatcttaaattattggtaggtttccacatctttagtgtgggaaatttaccttgtcaaacatgaagactttgttgatttggccttggaagaccctcaggacagaattaatgtgcacgcaggcatcctgaatagctgagcctatgacttctgctttatcttggtccttaaacatcaggttcacaaacataactgtcactgggcgaagctcagacaaataaccccgaagctgtttgtcatcaatctgtaatttagagggaagctttccttaacatgtgtccttggcagtggatatttcctcccaatatcatcaccaccacacccaaaattatcactgggagggaactagccttttgagattctctagggaaactgaagttatcaaagttgggaggtagaacaaagcagagccagctgaaagtcaaaaagatggaaatggaatgaactatcaaaatctcttccaataggaacttacaagcctgctcatttttgcccagccaccactcccttgccccaactgctagctccctcagccaatatgagccatgacaataaaagaactgctgtttcttttggctctccaacaatttaggaataagaagagcatgccgcataattcaacctaatattttatagcaaggtacttttcagaatatttccatattccgtcctcctttatcctcaaatgaaataaaattacattatcctcattttactaattagataattgagggacggagagataagaaaactttccaagtcatatgggaaaacagtagcaaacaaaatccaaatctatggacttctttttgtagcgcccccttgcctctctttggtgttgtatttcactcagctcccatcttcactccaagtctatccaaaacaggcacagggaaaggaaaggtgagtctttcccaaattatccctgcctatatcatcagccctgaattttgttaaatttaagtacataacaaaacaatgggggagaagcactgcattttttctcccccagacaacacaaaagtgtcagattctccattgaaaatatgaaacacatcttctggatgaaaaaggaaattgtgtatagggaatcttgggaatcatgcttcctatctagctgaggtttcatgta

SEQ ID NO: 62228 - DNA, 779 bp, Bovine  19866880753908
  misc_feature (1)..(1): n is a, c, g, or t
naagtgtaagaaagtaagagataaaacatagtgaaaataaaaacagtttggaaatggctgtgtcttcaaaaattaacaatgtgaatgttttactcttcgggcaattgtaataggaagcctacatcccataaagttttcaaactgtttcagtgcacattccttgcagaataatgggcgggaaaatgtggttctgaccttccaaattatcgtcattgcaaataccggatgagaagggaatttgcttataccagtttatgattttatcattttaaaatcatttctattgcgtaagtgggaagaacactaagatgataaaatcttacagtctgagttttagctttgtccccatcatactgaagcaagtgcttagcacacatggctatatttcttggggtctgtttccttatttggaaaaaggaagtttaaataagtctacaacaatttgttgcaattctaagtttctttaatctgatggataaggccttctgatatttatgtgatacatttctgctttctttctaccatatgcattttatcccatcagtacaagagtgactagaatgttaatgaggttccaaccacattttcaattccatgaccaaagacaatcccagtcatcatgaacattcaagattctagttacttggaatcaggaaaagatgcaaagcacattctattaatattaatgtttagtcagtactatattctgatattgaagacatttagattttagaacatgtatatgttattctccttgcttctcattctatgatgaaaac

SEQ ID NO: 62229 - DNA, 1176 bp, Bovine  19866881624144
  misc_feature (1)..(1): n is a, c, g, or t
ntctggctcaaggcaagcttctttctacatagcatataagctagaatcttgaaaataatagtttgatccttggataattagcaatggtatcacttgggagcttgttagaagcataacctcagacctaataagttataatctgcatcttaacaagttcctcaagtgtgttctttgccagttttagatgtgtgggacctgggcattactgaatcagagataactggatatctaccagtaaatatttctgtttttaataaaagaacttcctagttttagctggttaataggttaaccatcaagagaatacatttttaaaaaaatttttctggtaacatgctatagtgatggaacaaagttctgcccaagggaatgtgagtagaatgtggtctgtgatttccaggtcaggcctggaaaatgaatgtgtgtgagctccagccctgttccacctgctgctgcctgatctgtggtgacaatctgaacaactaaattggagccatagaaggaagccatgtattaaagaggagaaaaccaactgtggactgctaaactaacccagtgagaaagagagaaaaaaaaacatttatctagctcctgccacatatgttttgtctttctactattattgcaattgcatgactagtatatccaaaagttaactgtatctccatcattctgtttaaactacatctgtgacacaaaataagatatagtacattatatttaaaactcccatcatgatttttttaaacagctgaatcacctcactacaatccaataattaaggtcaatgaccatttttatctcttttgcacctttcaaatttgtgctatttagcagcctttaatttaaggatatgtcactctttctaacaggtaaaatgatcaaaatattaccagaaaaagtcaaaaaacaagccctagagtgtgttgcataattaaacaattatttatctttctgattttgaatgttaattttggtcttatattttaaaccccacataattgcatttttctgcttatacagttttatacttggcaaaacaaacactatttaacataaggaattatctttctataccaggatcccctagagttttaggacatgttcctggcatgctgctctgcatagagaatgtgttcatttacagagtctttttcaatttttaagatgtcattt

SEQ ID NO: 62230 - DNA, 1542 bp, Bovine  19866880167282
  misc_feature (1)..(1): n is a, c, g, or t
naaaattatgaccaacatagacagcatattaaaaagcagagacattactttgccaacaaaggtccgtctagtcaaggctatggtttttccagtggtcaggtatggatgtgagagttggactataaagaaagctgtaaagctgagtgcagaagaattgatgcttttgaactgtggtgttggagaagactcttgagagtcccttggactgcaagaagattcaaccagtcaatcctaaaggagatgagtcctgaatattctttggaaggactgatgctgaagctgaaactccaatactttggccacctgatgcaaagaattgactcatttgaaaagaccctgatgctgggaaagattgaaggcgggaggataaggggacaacagaggatgagatggttggatggcatcaccaactcaatggacatgagtttgagtaaactccagcagttggtgatggcaggggaggtttggcatgcctgcagtccatgggttcgccaagagtcggacatgactgagcgactgaactgaactgagctgaactgattgagtgctgggacaaggaaagcaggagtcagaccaactgccttttccccagttgtgttcagagggactttgagcccaggcttcactgatgatgagccactgctgttagtactactgtgcatgcatgctcggtcgtgtcctactctttgtgaccctatgggctgtaggcccatcagggctcctctgttcataggattctccaggcaagaagagtggaatgggttgctatttcctcttccaagggatcttctggacccagggatctaacccacgtctcctgcatttccagtattggcaggtgggttctttcctgctgagccacctgggagtcccttttagttctattgttcagctccaagtcagaaagaactgctatccaaagttgattcttcctacctttacaacttctgccccctagtgaaattttctcctgctattctttctagctccaagctttcaaatatctgaatcttcccctgtttttatattaatattttaagctcaaaaactatagccactacagctgctaggtgaagttagacaaatttcattgtgtctagattagctttcaaatgaggtttgataaattaaattatgataatctatagaggagtggatgagaaataaggatttggattcatgtcataatgtcacagcagcacagagctctctggatcttctttctttcctctctctctcttttccccagatgaaagaattatttctttttctacccaaaccaccacaagtcaatgtccagtatattgcaggaaagggttacttttataaaccagaggtgtactgtaaaaggcatttgagggccccatctagatagtttttcagcttattttctttttgacagctttaaagggcctttaaaaattgccaggagagtagattcatatttttatcattccacctgcatagcattttagacacatttatattcctgaaagcataataatacataacatttagcatttaatttagtgactcctgcca

SEQ ID NO: 62231 - DNA, 775 bp, Bovine  19866880381429
  misc_feature (1)..(1): n is a, c, g, or t
naataatattcaacacttctccctttaaagaaaaatgtaattttaactatgcaaagttagactgtgaatggaatgttttccatctaaaacctctactaaggactccaggcatgagaagaaaatgatggggaagggattaaaactctattccagtaagagctgaaaatattaaggggaggaaagagagaagaggaatggtaaaatttccctgggtgttttaaagacagatgatgatgaggcattggtcaaaattaggagagttttgacttgagccttagaagcgaacatgtagaaacagggacttagcttgtgttacaactcttaaattttgcaaatttattttgtagataagaaaactagaataatgtatataatgcagactgcatattacattcctttgcattctcctgaattttataaataacctctaggatagtttcactgttattagtcaatgagggcagaatgtcaggaaagaaaaaggagcagctttataatgaggaatgaatataattatagttattatcgcagagacaatgaggtataacaagtctaaaagaatgaaaatatgatcaaggatcaatttaaaatacattcttatctagctataaataccacacaatataactctgagaaatttcaataccacatttaggtaggcccatgtattttttaaatagctctaatccactgctgacctcaaaatgctcaaaacagagacccaaagttatctcatttaatccttgtacccaagtaggtgttaatatttatgtcc

SEQ ID NO: 62232 - DNA, 1138 bp, Bovine  19866880425330
  misc_feature (1)..(1): n is a, c, g, or t
ntcgtgtccgactctgtgcgaccccatagacggcagcccaccaggctcccccgtccctgggattctccaggcaagaacactggagtgggttgccatttccttctccaatatgtgaaagtgaaaagtgaaagtgaagtcactcagtcgtgcccgactcttagtgacctcatggactgcagcctaccaggctcctccgtccatgggattttccaggcaagagtactggagtggggtgaggttctctaaattttaagtttgattatttcattccgttgttgggatttctgacattgctgcaataaaggattgtactactataattcttagtgtactgtgctccttcaactcttcctgttctactcccattagagcactttgtcttggaagttgacacttttcagaatgaaatacaccactgttgacctcccaaatttcttccttaattgtttttctgagcattgatgtttccaaatcaatgaagagagggattgatgatggaacaattctactctggctaccacaaaaaataacagttatgtattttagggacagagtttaatgttttggtgagtaccttcttaagagtgtgatgaagagttatttctgtgtactttcagatgcactgactttttctgtttgtggtgacatagcatggatgctgccttcattgacctttcaatacagtttctgaaacttcaaatttagtggcagttaatccaaaattcgtagacagttggctcttagttctacttaaaaacatgagaatggaaatagtgctatgcctgggttgagccattcatgccttataatattttaagtgttttaaattgccaggtaatatttattattttaatagttatactcaaggcacaatttatttgctctggctctaatataaaattcatttagattgtgttagagacaaattcagtagaatttgctatgtgatagaaactatcattcattctctttttcattcattttgaatgattgaagaacatagatttctaaaagaatcaactttggattttaaacgtaaactttgaatcctgggtctacttttgaattgttttataccatcagataattttaacttttgctagttaaagaattttaacttccctaggtcccatttgca

SEQ ID NO: 62233 - DNA, 1683 bp, Bovine  19866880570188
  misc_feature (1)..(1): n is a, c, g, or t
ntgagactccctttaactgcaaggagatccaacccattctaaaggagatccaaccagtccattctaaaggagatcagtccctgagtgttcattggtaggactgatgttgaagctgaaactccaataccttggccacttgatgtgaagagctgactcatttgaaaagaccctgatgctgggaaagattgaaagagggaggagaagtgggtgacagaggatgagatggttggatggcatcatcaactcaatggacatgagtttgggtaaactccgggagttggtgatggacaggggggcctggcatgctgtagtccatggggtcgcaaagagtcggacatgactgagtgactgaactgaagtgaacttaggtaatcatattacctacattttagaattggttaatattaagcagtttcttagcgtgactaaagacactgtgtaatgtcacagacttgtcaggttgaagacccgagaataaaatccaggtgttgacacagaacggatgcacttgaccactgtgtcttgtgatgcttactccaaacctatgagcctctgagtccattagaaatggtacctctatttggcaatacactacaactaagctttttagattcatcaaaaacatttgaaacacaaaatcagtttttgaatatacatagagagtaaagaactctgtttattatatctgtgctatcaataacagatgcccatgtaaatctctgtaagtagtaccatatcccaataggatttgtgacatggttttttgttgttcttgttggaaagaagtagtgggagaggcaggggaaagctgaagttaattacagtgtgcctttgcagtatatcttatctcttttataggaagagttacaatattaataaagacataccacatgtaagtcagagatatattttggttacagtttgtgaaaaagacttttatctgcacacatatatcatctaaagagtagcagctgagaagtgtgtggtgacaggtggttatcaatctgtaactaaaaattagccatgggtgagcaattctcaaataaacaaccatcatgcagttcactgaaagtttatgttatataaatatgttactatatttgtttctttgaaagaaagccaaaccaaatctttataatagtgaaattaaaaatactatttatggattaagaccgtaacttctacaaaagcaatcacagaatatggatcactatacctaaattggtacatgtgtagagaattctcttctttgtgttttttaaatgtgtatttatttatttttggctgtgctgggtctttgttgttgtgcgtgggctttctctagttgtggaagtgggggctactctctagctgcggtgtgttggcttctcactgcagtgtcttctcttgttgcagaactcaggttttaggtgcatggacttcagtagttgtggctcgtaggctccagagtgtaggttcagttaattgtggcgcaggggctcagttgcctgcagcatgtgggatcttcccagaccaggaattgaaccagtgtcccctgcattgcaaggtggattctgaactactgggtcaccaaggaatccctatatagagaattcttagcaattttttttaaacttttcatttgactattattttcaggactacttgttatgctaaagaaaaaagttaattcactaattcatt

SEQ ID NO: 62234 - DNA, 1430 bp, Bovine  19866880599956
  misc_feature (1)..(1): n is a, c, g, or t
ntactctaggacctttggcctagatagcccttatacaatatcttagatggatttgccatgtaaatcatgtcctcaaaatttctagcaaaattggcatattgtcttagcaaaaacagctgctttgattcaaacagttcatataaaaagcaacaacacaaacttagttatagcacagaaaaaaaaaaaaaaaaaaggccacaaacaacccacaagtggtaagcaaggctctttgtctatttttaacatttgctttaatatcaatggcaacacatttttaaacaaataatattcttttttccccaagttattttcaaatgcaaatctctaaaaacactctgaggcaagcctttggaatctttcaagttaataaactccagctgcctttaaaaaagtgatttaatcttacactatttgcctgaaccttttctgattttaagatgtaattgaattggtcccgagtcatattacaaaagaaaaactctatgaggattctgggaaaggcagatgaaatgtttaaaattatttttttagttcatttagaggacagccatatagacttgaaactgtcatagcattaaactctgaagaagtaatctcagaatatatttgcaaacttggaaaaaaaaatcctactgtaatccatttttaattttggaggagatgggaatggaatatgtttagttatatatcaaattgtttttttaagcattttaccaagagctatcaaatgctgtattcttatattttgtaaggtcaggttttatccggtgtaggggagattgttaaacatgtgtacagagaaatttcaaccaaaatttggctagacagaaatttattactcatcgatagattgtcaggccccacaatcaccttccttgtacatgttgctaatattttgcactgattaaaactttattttgaaataattttagatttatgggaaaactgcatagtacgagtagatcttgtatatcctatctgtttcatcttatgttaaaatcttatataaccatgtcacaattaataagaaaagaaaattaatgctaaaacatcattaattaaattacaaaccttattaaaaattttactaattttccactaatgttattttactgtatcctatactgtgtttagttgaaaccatcatcaataatatcagtagacagcatgatcccttgatatgatgtacaacaaaaacacatatcattttagtggatttttttttttttttttagaaaaatacataagctcaatccaggcagaagaaagcatcattcttacccaagctgagggacatttgaaaaaagtaactcttcagagctattcaaaagcatcaatgtcatgaaacacagacttttatgccagttgcattctctctcttaacctttctctctcctaacttcctgaaagtctgagagttatagcgatct

SEQ ID NO: 62235 - DNA, 1665 bp, Bovine  19866880650318
  misc_feature (1)..(1): n is a, c, g, or t
ntcgatccctgggttgggaagatcctctggagaaggaattggcaacccactccagtactcttgcctggaaaaccccgtggacggaggagcatggtaggctacagtccatggggtcacaaagagtcggacatgactgagcgacttcactttcactttcttggaagatgagttcctcaagggccaggcctggctatgctcatttttatttactaaggttaagacaatgatctgtgcatttagtgtcctaaaactggaacttctgtgttgttcttttcaggaatattgcttggagtctatagcagatatctcatgtggagactattggaagaggccaccctgtatgcttttaccttaacaatactcagccaactgtctctccctcctcactggcctcctcaaccctatggctttctgcattaatatgtatcagattcccagggcctctaatgcccttaaaatagacagatgaccacatgaccctactccctgataaaggataggcagcctccaccggtcagtacagtctttccccatgtgtgctcatcagaattctggcaggctgttgaggactataccatagctgccctcatttcttttttggaaagaaacagaaagcagcagaaattttgctggagatatgctcaatttatgagcaagggtgttggggaggctcatgattgttctggaaagtctcccgttcctctttgttgcctgtgccactccatgatattttttaagatcttgtgttagaggattgtagtgagaatgatggcccagcccaggctctgccctctggtgcagcctgctcagagtatcatggcaacattgccagtgggaaaaatgcagctgagtccctgtgattggcgctgctctattaacaacgggaatgtgaaggatctcaggtgggagatgagagtgataacagaaaagctatttcttttcatttccccagtgtttatagactctgagcaaaattgctaacagaggcatctccaatttgaagtgctaacgctttggtaccatgttggaatagagactcttgattaacaaatgtgattgaatcacaaaagcacagcaaattgcggcatcgctttcattctttacaataatcaggtaacgaaacatcactacttggggggctgaatgatggaacagcaagcttccaattagaatgccttcttcctacaggagccccgattgtaccaatgtgtgtgaaaggatgttagagaggctgctcaggtagggaagagctgcctggggcgactccaacctttagtctgggcctgagaactgtcttaatggttttccaaaagggcagtaacacagtttgagaacctttctcttcagagagcttctttgaaatagccttttctctgttaacaaacacactagaccacctctgctcaggaccttggctccctgctctccttaaacacacacacacacacacacacacacgaatgtatacacatgcacacacacatttgtacacatccatctttgcttcatgtgttctctgcagggtttctgtgatatttttgatattttccccaccgtgtcataattagaaactaattgcaaactattgagtgtttgctaggtatcagatactgtcctttaacctacatgatcccattaatgcttcatatacctgctgggtagcaa

SEQ ID NO: 62236 - DNA, 1974 bp, Bovine  19866880692000
  misc_feature (1)..(1): n is a, c, g, or t
ntgcttggggctagtgcactgggatgacccagaggaatggtatggggagggaggagggaggagggttccaggatggggaacacatgtatacctgtggcggattcattttgatatttggcaaaactaatacaattatgtaaaatttaaaaataaaataaaattaaaaaataaaaaaaacaaaattgaatatgtatgtcaaaacatgcttaatgtaattctgtacaaggcaaagaaagtttatggtgaaacagaataataaagttttatttgttcactgagataaagattaaagagaaaggttgagtttttcttggatgccattatgtgtgaagagaagagagccacatagatggagatgttcaagagtatttagaattaagagtttagagcaagtgagtggatgcacaaaatcacagaaaagggcttgtcctaagagtcatttccaatgtgtccttggagctcccagcctcccatttttactccctttattatctcttttattttttgtctttttcacctagaattcctagacaacaaatgcttgtatttgtcttctgccctggtctctccaatcagaagtaaacctatcccataagctcgattagattagaattaaccccagggagaatctgcactataagaagaaccactggaatggaaaatgaaatgaaatgataattcataaaatttccccaaacccaatagttctgacaaaggacaggttggaacagaacacttccaccatggaccactggtaactggcttcttctccagtcctgtgctttcctataaaggaggttgctaaaagaggctggctttcttggaaggagggtaagggtcaaggatggaaatgaagccattgaatgttcaacggaacttacttctactgattttaagcagcaagactccggattaacttggaaatgatcactgtgaataggctaccagtagaagggtagaacacgtgggtgtctgtagcctcctaggcgtcctgaaaggctgtgggctgggaattgagagggcagaagggatccagatagacaatcccttctgaatgctcatctcactttccaaatttgttcacctaatacctaacaacaacaaaataaaccctcttacattcctatgataacaggttgagatttaaacaggcttttacttcctgcccgtcgttgcagtagtcatgttttcattaaaccactggcactttttctccaaagatttctgggtgaagtgacagctaaatataatggagcataaatcaatcagcaaacatcagcttcaggggcgtctggaaggaaaggtgagcaagttttcacatatgtgtagactctgtagcgagactgaatttatcgccatgctccccacaacctttcgagagctcaggatgtgaaatgggagaggggaaacctgcttcttcagcatcagaccttcaaatctttgcaggaggaagcatttgattaaaatcattcatgtttttttagtagaaaaagcgattttgagtttggggtaaaagaatataaatatagaatcctatttaacttaagaataaactattaaaaatctgttcgaacataatcaaggctctactaaggaaatctattacaggagattgtattactacagaccaagtttaaaactcacatctccaagtttatgattttctttttccttatgtccctgtctctctgctcctctcccccttctcactctttctttatccctctcatagaaaagaacacaatgcaggttttgaaactacaatcctcacaaagcacttatgattatttttcagtgataattgctaaaaatattgtgcatttagcttttatttcatcagcacactaaaaactcactttgtaaccatcagagattttatctctgaattattgaacataaaggctaatccagtgaaaaactgcaagcatagtacaaggtaaagacaatgcatctttaacacatgttgctctgctg

SEQ ID NO: 62237 - DNA, 1501 bp, Bovine  19866880753540
  misc_feature (1)..(1): n is a, c, g, or t
nggtgatgtttagttaatgataaggacactggaaaagaactggccaaacagtattaggtcagttttccatttgactgttttacacaagacggagactgttggaatatctgggattataatgtacttaaatcagcccaggtggcatgttttcaacactcaacacatataggacttccctggtggctcagacagtaaagcaccttgcttacaatgcgggagacctgggttcgatccttgggttgggaagatcctctggagaaggaagtggcaacccactccagtactcttgcctggaaaatcccatggacagaagagcatggtgggctatagtccactgggttgcaaagagttggacacgactgagtgacttcactttcactttctatgtgccaggcatgtattctagtgaatatgaatttaataaaaatgttacaaccgctgcaattaagagcctagagtctgttggtgatggcagtacccaggagtcccattgtaatgctatgtggcttgttgctgcaaataaagccattatcactgaagaagctctcttagatggtattagccataagaccagatgctgtaggttcaagtttccagttgctatggtggcattggggcaggtatgatggactttctctgcttgtcttcatctgtaatactggggaaataacactaaccttacagtaggagggaatggacagatagtagataaatgtgtggatggttgagtaaatagattactaggtagacgataaataggtggatgatagataaatagatatttgtgataacatttggcattgtgagtgctccataaagaagtgtttcttctctccttcacctaaccctacagctgagttaacataaaatacttcaacctataaaagaaaaaagtactcagtaacatttttccatggatgatacaggtgctcgtttttaacactacttcatattttatagcaactttgtcaattttaagactatctcacttttggtaccacatacgttcacctacttacctttctggacagcgtttcagtaaatagaaggacccacacatttgtaaattaaaggcagtttgcctacattagatgcaataatatcagtcataggcttatgagatgtaataaaaaacacatttgttttagagtttcatagaaaatatgttatcttagtttatctattaaagtaattagagtgtgattttttccctctctctgccgttggctattgagttttttaaattcttcgaaggatcatgtatttgcacagatttaacatctgcaaagtaccttttaatcaattattggctattcagagtacaataattagcatatgtgtgaaaatatagggttgaacatccatttgttaaaaacgtgacaaatatgtatcttttgtttacttgaaatgtcaatgggtttttgcaatgtatatcctatgataaaatgttttaatttatattacaggtgcattttattatgcaatattagaatacttagaa

SEQ ID NO: 62238 - DNA, 1980 bp, Bovine  19866880778344
  misc_feature (1)..(1): n is a, c, g, or t
ncccaccagggctcccctgtccctgggattctccaggcaagaacactgggagtgggctgccattttccctctccaatgcatgaaagtgaaaagtgaaagtgaagtcactcagctgtgtccgaccctcagcgaccccatggactacagctcaccaggctcctccatccatgggattttccaggcaaaagtactggagtggggtgccattgccttctctgagaaggatatctattacccacttaaaaattgtttatttggctgcactggatcttagttgcagcatatgggatctagttccctgaccaaggattgaaccttggccctctgcattgggtctacagtcttaaccactagatcaccagggaggtccctctattacccatttttaaaggcagaatttaactctgatttgtgctttgcttagagaaaaaatattcaaactactccaaacaaaaacccttctctcaagatctcatttatttctattttttaaagtatcttaaatagtcaagggaatttgtttaaaataaagcaaagtagagatgaaatgctttccttttgaagcatcattgcattttgtttatgagattgcagttcttgaacatgttcttggtgagttaaaaattcaagaagaatgagggaaatccaatagatttaggtaccaatagttagtaggaacatgcaactggtttgttatttctgtagaagactaaagcattttgtaaggagctttgctctagaagctagtcatgagtgatttaaaagtagaaggtattaacattcacaaaataaagctttgttacacatttattttaaaacttacttcacttggttattgctatgaaggtcagattaactgtagtcaagaaatgcattctaacaagatgaaatggaattgcatactccctattgccatgtttaatttgtactttataccttaacattcaatatgatggaatgtcattaaactgtgaaactgtcattaatgaggtcacctggtttatgtcaggctttctcgtggcacttattgatttgattgacttcagaaattctattctgaataatattttaaatgaaagatagaagtgttaagaaatgtcctcattcttcatcttaaacatggagttttaaaggtttaaaagaggcctttattccacttttattttaaacagctttccttatttagcatattctatcaagtactcatgaaaaatcttaaacataaatttaaacttctagttattttgtggtgttattttattatgcaaattgtatttttttaaaagtgctgataatcagaaagagtaattaatataattataaaattcatattaaaattgtactaatgactgttactgatatctaaatttgtattaatgccaagataatgttgaaaaatgatacttttattatgagcttaatttcccaacctattacttatctttctcccctgtgttccttttcatttagatatgacaaattcttggcaaataaatcttggagggttaagtagagtattatttaacctccaaagcatactaacagataaaaagtctatttattaagtagagctactgattcaaaataggccaggatggattcaaaaatatgtatataactgcaaataattttcttgcccaggagattatctccatagcagccaactttttagaactgaatggcagttatttatgactggcttagaaatatggtttttaatatctgaggagcaagatcaatggttttcggtgaactaaatatcataggtgtgcaggttgactgacgcacggtgggtgcctagcaggtaatcagctttctctccttttgctatcactgcagtctcagtatgcagtgctcagaccagcagcatcaccaccatctgtgaacttgttagacgtgcagagtcttgggccccaccctagatttaccaaattagttactctggagcttgagggttagcaatccaagttttaacaagtc

SEQ ID NO: 62239 - DNA, 1101 bp, Bovine  19866880857101
  misc_feature (1)..(1): n is a, c, g, or t
nattcttattttgatataattctattccatgcagtcaataataccaactagactgacccacttgtgttttacaaattctaaagaaaaagattactaacttccgatggagactccagacttgatctctttggtgcctgttccattataatgtaaaataatcttatagccattgtgttttctaatctatttacatgcattttagacttattaaggctcttcggatgatttactcaagaggtcgatttttttactcctatatccattttcttcctatcatgatcattttacttttcatctgcctaagaaaagcaggtgcccatgcaagatttaattaaaaagccattgccagctccagagctattggtttcctacattactctagtcatgtgaaagaaaataagaactgggacggtatttctcaagaggcgttaagaattctttctgatgaacagttccccatccatcttcaggagactctcaaaggcttgaggtgtgtaagcatggctgaggcctgaaaaactgttttcaatattttcctggttgactttgtatgtaccatggccaaaccaaccttcttcgagacacttagtttgtcctgatattttattgtatttctgggtctggataagtaacagaaaacaagtctgtctgtctttcgtctgtgcctctctctctcattaaatgatccttctttttatctgtcgtcgtcctctcttcctttgaaaaaaattgactccacacatacccttcaccagaggctggcctggtctggagcccaaggagctgttcaaggtgctgaaaatatttctgctacagagccaggaaccaattaagtaaataaaagctgttctgctgttttctttgaggtcatcagctttggtcggacccgcacccaatgcctcattctaacaacacaaagaagtaggtgctgagatcatataaaaaaactcaaacatctttagataaggcgaaggagaggaaagggcaaggagtggatacattcagcctggaaaagaaatcaattcagctttgcaaacccccaatacatatatttttactctcatctaatattacaacttttcttgtctcacgggaaagaaa

SEQ ID NO: 62240 - DNA, 1312 bp, Bovine  19866880980555
  misc_feature (1)..(1): n is a, c, g, or t
ntgcctgagttagagatgatggatgactgcagtcatggcattgatctctgggagctggcttactcaggtcttgcatggcttatcatgaggccatccactccgaaaatgcatgcatacaggacaaatttcacactttacattctatcagggccctctagctattcttttgttcatataactttgacctaaatgtacctaaattcaagcactactacccactgtaaatattctgttcagatacaatgactcagaaggagagggcagccatataaacgatcttcttcaatcactgtggtttgttcctaagtgaagctcctgagagctcaacttgtgactcatgcaaatctttcacattttcaagtaaccagggaacatgtgaaatattagggatttatctcaacctgcagcatttcaagatgataaatatgtccattcagtttcaatttatatactctatgaaatacaatatatatacatttttttggatcaatagtgacttgttagttaagtagaatgcattgtgacttcaagaagactatttttatttaaatttatttaaatcggacattttttcttgaaaggcatctcaacttcagtttcatctactgttccaagaaacacatgaacacaggactggtaacaagagtcatttcagattccacaatgcacgtactgttcctctaatcatttaccaaatgcagcagttaagcttcactgccccctccttgactcactgatttattggctgctgaacaaaactgccaaatgcacacttacaggggtgcttgttggaactgggttaactatcgtgatgccagttaaaaaggacaactgctaacttatcctcatcaccataatatgtgcactgctcattacacaaaataaacggggaaaactgttgatgaatgagcaaagcaaaagaaggaggaaatttatctttgtctctgttatgcattaacctaagtcagtttgactgttcagccaatgtcaatttttttttttaaattttgtgttatgttgttggtagatgttggtaaacttcatggttataggaaggagggcagtatcttttttaaaaaatgagctcttctgatatattttaccaaatgtggtaacatttattattacacagatgttgaagagtcacacaaactgctctgtcctttggagcagtctttgcccttgatgcaaggcacttcaccttgaggaaatgatcattcctcagacacaacactgacagctaagaataatgaagaactgactggcataggttagtgttaattagcaatatgtttaatatatatattcaata

SEQ ID NO: 62241 - DNA, 1626 bp, Bovine  19866881029395
  misc_feature (1)..(1): n is a, c, g, or t
nttttcagttgatcatgtatacagtctatcagaccatcagataaaccacatcacagaggactggtaataacaagtgctatgaagagaaacaattctggataaggggatagagagtgatagcaggctgatatttattgtgctcactgttgaaagcctctcagaagagttggggagtgagagcagttaaggaatgatttttctgtctctatgagtccctggtatataataggtaggatatgtggctaagaattgaatatccatttaatgtacaacagttaagatagataccatatacaagaaaaagaagaagactatggatgtatcctcacttatccacacccagaaagtccttttggaagaatgaaggctattcccactccatagatgaccaagtaaccagacaccagggttgcttgttctccatcgtgaaggccatgctggcagtgaggatgcagcaggcttctctagaatgtgaatgaaatgaatactcgtaaggactcacttaaacacactatcagagaatattttactcacctcccctattcatacacttcctgggatgttaaagctttctctagagaaaggagccccttcaggatccatcacttaacaacagccatagatttaacattactgtttttgctgacactactatacctatcgaaacacaaaccagaatcttcatgaaaccttactcattaaataaatgctaagacaagctaaagtgcctttgcatataccatcactttcttctcaatcctactttatcatgtaatcatcacccagcttttaaaatgatgttgtgaaatgggcttctgtatcctctttataatattggaggggtcaatcaaccaagtataactgtgacattttctatactaggacaaaaagttactaggacaaaaagttactgactttcctatgaggaatataactctctgttgagattttgtaggtgcaaaatttctactataatatgttatattttaaaattcatgttctaccaagtgatccatctcccataagagtgaatcccaacaagttatatgtttggaaagatgtatgaaacccagggactacctctactgaaataacattaaacaaacacacaactgttcagtctcttgaataccaagtaactaatctagctagtagtttataccctcttttaaactgaagcttcatgcatacgataataaaccactctaacaaccaatcattcagaacttgggaggaggagggaaatccctaaacctagttgtttacccaacaaaaatcaactcattctgtaaatacatttacagaacaaatcctgaaaaaactacacttagaaggaattagaggtcatcaggtccagccatcttattttaaggatgatgaaaccataacccagagaggttaccaagcttgcccaagatgccaataccagtaagttgcaaatcaagaaccagcattagagccctttctctgctctgtgtggttgtcgccgtcaaagccatgtccttgtactttgtatgcccagagaagagaataagactctttgggatttctcttctgaaatgtatctaacatcactgaaaatccattcgacttagagtagagccatctatcactcagcctcaaaag

SEQ ID NO: 62242 - DNA, 746 bp, Bovine  19866881041936
  misc_feature (1)..(1): n is a, c, g, or t
naccccctttttttttcccctgaaaagtaatatatgccctttaaagaaaaaatggagaatgtaggcaactataaagcagaacatgaatcattaataggcttgcacccagagctagtctgagtgacatgtttctttacagcctcttaacaaaaaataaatccatatttccccaattcacttcttaatcatgttaaccagtgtaaagctaaaaggagttgctgatgtttttcagttgggtaagatgaagacctttcaattagttgctaaaatctgtttgaatgtgaggcaaaatcagatacaggtgagctctcatttcaaaagaagacttcaggttggactctcctattctagttcacattttaaaacccatgatggaacattttgaacacagtagaggagccttctaaaatgtcaagaataattgtaacctctttccgcaaggtctttttttgtccttttcagaatgctagagatgaggcaagcagaatttgtggtcttaggtgggactcttggcaatatacaatatgaagcgatctctcatagaaaggatgctcatcgtttaagtgtactgcaaggactgtggcctgttactgctagctgtctctgagtgagcatactttattgttattctcagatcaccagggtcttaagtattccctcgctttcctcggcctgtgtctcttccttttgacaaaagggaaagtgcagtctaagaacactgatggagccagaatgattggctgact

SEQ ID NO: 62243 - DNA, 1075 bp, Bovine  19866881077217
  misc_feature (1)..(1): n is a, c, g, or t
ntttctctttcctttttttttttttttttttttttgcaccattagtccattaacttatttgcacttttgaatttattgagatgtgttgaatgctaactctacctgcacagctgtgtcttcctctgccacctggaggcagacacttatttcaccagagttatagacatgactcccatatcaggaatggacagatcagtgcaccaaagtttctattacaaactcaacttctcttatccggacagaacagcaaatgaactgaaaaattccaccaaccttggagagacctcaaggtgctaatgtttgacagcaataaaagctttaaatggtttggggaccattggtccctgctttgtaaagtattcatgaagtggaattacgatgaccttctaccttgatatgatttccaatcgcctcaagctctctgcattcagtttgacctcctttgctaccattgccattgatctgttcctgagattgtagctataggctttatgtttgaacctgagattaaagacagagagaaaagtcaccataatgttgctgccaataagtttagggccagtactgcagtccttggtaatgatcagggtagccactgaagagtccatctggaaaacaggatcttcagggactagagttgtggtgaaaatactgggatggttgcagggagagaaggcagaaaaggaatagttgtgacactaagactgctcctgaatttcagaaggaaatcagagggagatgctaaagaggggccacaagcactttgtatttaatattggcttatctaatacgttcagctcgaaatgatctttttttttccttctcttcttgggacttgctaagatgcttctgagtgtcatttccacaactctgtccggtcttcttgctttagttttttatttccctctatgccccatgcacagtatagcctggagtacttttttctctctgtgccgcatcataatttactacaatctcttgtgccatctgtatgtgtttttcgggttgttttttttttttttttttttttaccatgattaacagtttttaagcaggtagtaagtttttctttttt

SEQ ID NO: 62244 - DNA, 983 bp, Bovine  19866881112236
  misc_feature (1)..(1): n is a, c, g, or t
nttttttttgccatttttctcaacttaaaaaaaatcaacaagcttcagaatttattttccatctattgatttttttcaagccattgcagttttaatttttaagaactctttcatattctgtgactgttcctttttatagcatcctgttcttgttttatgtatgtgatatcttcccttctctctccaaggattaatctattattttaaactttcttttcctgaactatgtttgtttctttttttccctcatttctttctgccttcatgatctctgtttccgtgttagaggttctccttggctgtctggttagactttttaaaaattgcaatatatttgacatgtatcattgtataaatttaaggtgtatgtttggttagagtttagagtgaagcaactaaactctgtttagcttagggaacgctgtgtgcattggcagagctcattaagctaatgaagtttcactctagtggttgattttgctatatttcattggcatacctccagctttcaatatctgtgttattcctttgggttggtctgtttctgttatgtagaatttttcaatctcttgtcacgatggtgtaagcttggctgtgagcattttgggatctgactgtgggaaggaggcatggataccttaagtaaaagactgtttaagtagagacgtttattcttctgggtttcagtttggtgtctttgttctcactatgcttgggtccagcctctctaaggttcaacatctttaaagaataagcctcctttatttctccaagggcagaaagggtatcttggaagcctacctccttctttcaaagactctaagccaatccacctgtttctagttacgctttatgcccattctttcggagatggatggtgcctccaatcccttctatagttttttccaacatgcaaagcttgcttcttggctctccctcccttcctacagactcaaattttagcttcctcagttctgctgtta

SEQ ID NO: 62245 - DNA, 981 bp, Bovine  19866881168946
  misc_feature (1)..(1): n is a, c, g, or t
nctcccaacaccacagttcaaaagcatcaattctttggcgctgagctttcttcacagtccaattgtcacatcccatacatgaccactggaaaaaccatagccttgactagatggacctttgttggcaaaagtaaatgttctactttttaagttagactcatctaaatggaactttgtaaggcagtggatgcctatttatagaaaacatcaaagcagagacattaaacttgctgttggagatatcttaagtagggttcatgcctcagtagaatgctcaattgatgacttttaaaatccatttttatgctgacacttcatgatcctgttcctgaatttggaacaaaatatatattcccctaagtagtccagaaattagtgagaaaaaatgatccctgaactttgtttttccacagttatctgggaatatgctttatctctttctataggctcctctgtttagggggagaggtggggaaatacagatatgttcatttccaaggcttttggatccctctcttatcaacaaatataataaatgactctttcatgaaagttcttgatcaaatgttagtgggatcataaagtttctgagatttctctgtattattattattttttcattcagtaagaatcagcctgaatcacacttcctgttgaaagggttactggagccttaaaggcattccagtcaggatctccatgactagataacaaagatgccaattaatgctggttgtaaaggggaacagcagggcccaccagtcattttcccatatggcacacaagaacaattagatacataggctgacatttcatctttggtatttacataatgtatactacggtgattgataggaaagaggtacatagatgtgacagactgacagaggataagggcagaagccgtccatctttttcattatgatgaccattttaacgaacagaccaacttgtttctgcagtccattaaatcagttgaca

SEQ ID NO: 62246 - DNA, 2370 bp, Bovine  19866881170593
  misc_feature (1)..(1): n is a, c, g, or t
ngctgtcctacagttatgatgagaggagaaaggcagccctgtcctctcaggaggccttgcagactggagatgcttcacacagtaaagtcccaaaactgtgtcttacatgatataacactttttaaaggagataaaagtcatccctctcttcctgctttttatacctttttatagtattttggaaacggcacaggaagtgactcgcaattgaaaagccatttgtggcatcgctgggcctctaatgacagcccactcccagcaggtttatttgtaaaaataggactttaagtttaacctagcaggctgcatgcttctcataacatccggcagttcacagctgattttgaatacgccccaggttccaagtggatcacggaactaaatcatctcttatttcagcctgctctttttgaaccaactcattttacactgtggttagcatagcctttccagctaaggatgattgctcaaagcacttagggcaatgttgtcttagcccagcatctagaatgaggtagttgacacaaattgcatcttatgctacttgagatttaatgttgttactgccaggagaatatttttgcaaaggttactgatgtataacaaaataaaacatgcaccaaaactgaaccctccatcagaattcctctttagtccaagattccaattacatcttttttcttaaatgtaggctattaaccaaaaagacaataagcaaaatctgcatttcttgatatcacaagtctttggtataataacaatatgaaaaaaatactgtccactgtacaaatcctttggttccaaaataaatacaatggacacttctaagatttcagaccaaaaacgttatttgttcactgggcactctctatactaaccctaactgttacctgtagagttcaaaaagcaatggcaatgattaatgtattctttctgtgttctacgttaaaggaaaggaaggctaacataagaaggaatgttagcgaagcactataaatatatggaggacatactggctatcctataaaatgatctctgagtaacagaacaattcacttgcatttcctagaagcatattgtgctggaggtcataaaatttaaaactgcccaattagattttatatcaagcaatacaatttagccttctgtggatccatgaactctggctcaccatgcattaaacagtcctgcaaatcactactacaagatgatttgcatagtatgtacatattcttattaattacttctttaatgctaatgtaattaagaactggccataatatgttgggtccttattttaattacagttatacatcctgtaataagcttaaagaaagccccttttgaacctacctggctttatgatcagaattttcctttttatttctatgatttccatttaattgatctgttcttcacagctcaaattttaaatttagctgtgattaggccaagtggctcagtggtaaagaatctgcctgccaatgcagggacgccagagacatgagtttcattgcttggttgggaagatcccctggagtaggaaatggcactccaatattctttcctgggaaatttccatggacagaagagcctgggagcctatagtccatggggtcacaaagagtcggacaagactgagcaactgagcacggtatgcacaggtgtagctaaatagcctttattctcttctggaaagttccatctagtcactatttgtctcaagaacataggaaggacacagataaaagtggatgcatctacaaataagtagattgcatttgttctcataaaccatcagcattaatatgttggtgatttgttctctatagtcatttaatctcgctgttgaaaatgacataacagtcttccaaaactggtagtagaccaatacactaaaacaatttaggtctttcttcaaggcctgaggtcatcaaaatgatcacatctttcattcaccacaccatcctccaggtgagggatgaagtcaaggaatccacaaaaagggatatgtcattagaagagaaaattattcttatttccaaactatgattttggcatatctttttttctttcctttctttgaaaagagaatcccccaaaactttcagatgaatagattttaaatggttctaggaatctgttctgttgagataacctatccaaatttggaaaactattcaatttcacctaaaccaatgaagcttctaacgtaaccatggcatacaaacagtcctgaaaaatgtttctaattcatatttcagcttgaaaaagaatatgtaggaattcaaaagaaaaaacaatgggggaataagtccataaaaatattattttttgtattaaataaatatctaagggtaactctgggat

SEQ ID NO: 62247 - DNA, 1198 bp, Bovine  19866881177851
  misc_feature (1)..(1): n is a, c, g, or t
nttgtaaacggggtagaacatattatactttaaatccgaaactccttggagtagcatctctgttggcaatgacttctggtcatactgttggtcctacttgaaaatatacatcccaaactaaaaccaactgggcaaagtttagaaaatcccaatatattaaaagaatcaaacgaaaggaactggaaaagaagttaagtaacacaatacgtctgtataaaggatgtaaaaattcagctgctcttggatttgctaaatgcctattttccttttaaaatgcttctgggaataggcaaaacccaaaaggtgttttactaagcactttttccattcatgtagaaatgtcccagaggaaatttaatctccatgtttctgatactttcacacttaacatcaaagaattgttttataagagttatttgatatattaagaggattttttgagcttttttccaagactttcaaattgtttttcttggaaaaaatgtagtcacatctaagcaaggggaaactaattcatacaccactaagttcaaatttagttcaaaactctgatgccaaaatatccaaagaagagactttcctagtttaaaaaaaaaaaaaatagtaacaattccagctcaatgctccaactttatagcagatatactttttttattaattactgtactaatttcacacatatcattacaaaaagagctaactcctagtataatgcaaatgggaatatcacatgttatgctatgttactgtcatgaattgaagacgcatgaatgacttcacacaaatttgcagaaagttcaaagggtgagtgaaaaagaatgggaactttattagcaataccttgttaaatatatgaaagttaccaggagcaaagagatttaaaattcattatgaccttagacttttctaatgtttaaccccagaaatatccagacaccatcatctgttattgagattacagatatatcctattagttagtctctataatttttataccctttgttcagttcatttttcataaagccaccagctatcttatccactgcaatcttcagtccattcttcatagataagtcagcattatttccttaaaattaaaatccaatcataactgtgatccacttgaagactatcaatgatcactacagactgacacttgtgttcccccaaaattcatttgtttaaacctaatcccta

SEQ ID NO: 62248 - DNA, 1318 bp, Bovine  19866881302670
  misc_feature (1)..(1): n is a, c, g, or t
nataagaggaggactctgaattggactacattaaaatgaagacttcatcgaaagatatcattaatgagtaaagatgcaagacatgggatgggagaagatatttccaacacatttactcaactaacacttatatccaaattttgtgaaactcacaaatcaacaataaaaaggtacacaattgtccaataaatgtaataaaatattatcctcccattaaacattgagaaaatggaaactaaaatcacagtgtaataccatcccacacactcagcagaatccttgagcagataaataaatatgtagtatactattttataaaacaaaatactatgcagcaaataaatgagcaatatattgcaatgtacataatctgaataattctcacaggcataatgttgagtaaaagaagtcaaacaaaaagaagcattaataactccatatataaacttacaccaggcaaaaccaatccacaataatgttaagtcagattagtggtaattatggtagaggacagtatggattgggtactggaaggaggatgacttctgaggacctggtcttgttctatattcctatctgatgtttattatgtgggtgtagacatatgcaaaacttaatcaagttgtacattacaatctactcccatcatgtagggacttcccaaggtggctcagtaggtaaagaatctgtcttccaatgcaggagacacaggagatgcaggttcaactgctgggttgggaagatctcctggagaaggaaatggcaacccactccagtattcttgcctgggaaatcccatggacagaggagcctattgggctacagtctacggggttgcagagtcagacaggacttagcaactgagcacacaatcacacgtgcctaacatgtatgttttgttttattaataataaaaattgcaaaaaagtgcaaaatatccaattttaatgttgtaatccaacacagtcatgcaacaggaaaagattaaaagcaagtgaaaggaatttgtcaaacacacattcacttcctctctgaagataaaatgaaggaaatatgtcataataatagagaagaatgtggtgagagtacttcggaaaatatttcatattatttgtgaataccatctattaccactgttttcacaaaagcaaatgttatatctatgagataattcttcatcctcctaagcactgactgtctaacttttccgaaactaatattgatctattgagtgcttagaatacatcagactctacaagaattttgaaagtactaccccaatttatagcctcaaaatccccatgaaacagataaaagt

SEQ ID NO: 62249 - DNA, 2935 bp, Bovine  19866881313705
  misc_feature (1)..(1): n is a, c, g, or t
natcaatgcttttgaactgtggtgttgcagaagattcttgagagtcccttggactgtaaggagatcaaatcagtcaatcctaaagaatttggaaggactgatgctgaagctgaagctccaatactaaggccacctaatgcgaaaaactgattccctggaaaagaccctgatgctgggaaagattgaaggcaggaggagaaaggggcaacagaggatgaaatggttggatggcatcactgattcaacggacatgagtttgagcaaactaggggagatagtgaaggataggcaagcttggcatggctgcagttcatgaggtggcaaagaactggacacgacttagcaactgaacaacagcaactgttatgctagggaagcccctatcacatttctagctgaacaagattacaaaagtgatatttacaaccacagaagccaactcgccaccatctgtggagctgtttggaaaaggaggaaccaagggaggaggactcgaactgacatatcccactcctcagagcaaagagctttgtctctcctctctttggtgccttcccttggtaagtaatgaatcacaaaaaaataataaaaataataaaagtgaggtttttctaccattcaacttcttgggggaattttgaaaattataaacttaatttttgagtgttggagttcacttaagcttcaagaaggagtgatgatactagataattttcacttcaagagcaggcagatgtggaagagttgagagctattatccttagaataaaaatgaaacttatcatgtagaattacagtaatagcagtggctaaatcaaaactcacaaatgacagtatatgatttaaaacaaattttaaacccatgaatgcttattcattgagatattatttcaaatatacctaatgcaacttacaatcattctatgaaataggaagtattatcccgggtttgctacagaagagaaaaaatgagactccaaactgttaagcagcttgtccaaagtcatactattagcacataaccaatggacgtgagtctgagtgaactccgggagttggtgatggacagggaggcctggcgtgctgcgattcatggggtcgcaaagagtcggacacaactgagagactgaactgaactgaacataagatttaaggttcctaacctgtggactccgtactatttccacagcatcaccccgtagcactgaggaaaagaaagtatgattgttaaatgacttcacagagttgtcctcaaaatcaactggaacgtcatgcaggaataggttgtataaagataaacctgtcatcaatatgcaacatgaccttggtcctaggtcacctcattctctgtgccccaataaggagagactctctggggggttcccttcactttttgttgttacctgaaattccaggatcacaaggtaattttagttttagcatccaattctcattttaaaaatgcctaaaacagatgtgcctcttaatagtgaaacactatattatgttagtaaataaggatagtggggaaagaagcaggaggaattaggggtagctttgttttttaaaatcttggtcctcctccaaacttgcactcatctgaacagagccagcacctccttagggatcgtggctctgaagtagaaggcaggcacacatgtccaaccaaaatcattggaagcagctgttcagccaactgtgtttatcctttcctggggctccttgctatagggtaagaaatggtgtggacagatgaaaagatgctgccctggcacttctgaaatgtgctgaattgcaccagaaaaaaagcagctaaagtgtcagagtcaactctccagggaaaatacaactctcagccacggaaaatggaaagcaatgaaagccaggcaagagaaattctcctggtcaaacactgacatttaatacacaggttctgtggatgtttgctaaacagcgacggaataatttcctattcatgctgttgctatctcagcaactgacatacaggaagagaactacagtgatggagatttctagaaaacagaattgagtaggatgcattgtcaatggggcagactatagaacagggtcagctactccatgttcaaggtcaggaggcagggccagtaagacggtaggtgttgcaagagggcatcagagggcagacacactgaaaccataatcacagaaaactagccaatatgatgaaactaagccatgccatgtggggccatccaagatggacgggtcatggtagagatgtctgacagaatgtggtccactggagaagggaatggcagtattcttgccattcggtattcggtattcttgctttgagaaccccatgaacaatatgaaaaggcaatatgataggatactgaaaggggaactccccaggtcagtaggtgtccaatatgctactggagatcagtggagaaataactccagaaagaatgaagggatggagccaaagcaaaaacaatacccagttgtggatgtgactggtgatacaagcaaggtccgatgctgtaaagaacaatattgcataggaacctggaatgttaggtccatgaatcaaggcaaattgggaatggtcaaacaggagatggtaagagtgaacatcgactttctagtaatcagcgaactaaaatggactggaatgggtgaatttaagtcagatgaccattatatctactactgcgggcaggaatcccttaggagaaatggagtagccatcatggtcaacaagagagtctgaaatgcagtacttggatgcaatctcaaaaatgacagaatgatctctgtttgtttccaaggcaaaccattcaatatcacagtaacccaagcctatgccccaaccagtattgctgaagaagctgaagttgaagggttctagtgaggacctacaagatcttttagaactaacacccaaaaa

SEQ ID NO: 62250 - DNA, 919 bp, Bovine  19866881323437
  misc_feature (1)..(1): n is a, c, g, or t
naaaaacggtaatggaaagagaacaaatactattacacacaacaattacatttttatgaagaacaaggtaataaaacttgcataatctcagagatttttttttttaattataaaagtaagatactccaaattcccttttcatgaacttttcaaataaaaggttggctcacaatcatatagacaagcaatgtgggcagaataattaagattcatgactataaagacctagaaatgacccattcttctagcaatgaggactaatagagtaattgtgaaaaaaacagggacactgccctggaaggaagagggaaaagattgagatctaatagctttggtctctgaagactaaaatggttctgcatgcagatttgatatgcaaagcccactcccctactgccgtgctgctcagagggaaggtgcagtttgcatttaagaaataaccctagttctaaaatccgaacagcaattaagatttaatagcttctaggaaggtcactttggcatctagcttgtctccacaagaagaacctgctttcatggctcccaaattctctacccaaggctgctgtccaatcttagaaacagagatctgagcatttaagagtcacgtcaattacatgaaaaatgaaggagtcccttttcaccttgatagcaagccacgtaagtacagggggatgtggtcacctggtaattcacttcttcatcaaagaaaatgaaaatcttaaagaatgaaggacataccttggaagatgacaaggaataataactgcaagctttacagctatgataaccaggcagcataaatacaagttgaaagaaatagacctaagaaagtattttacacactaaaaaaaaacattcttaattgccttccatgcaagattgttaaaggcaaaaaccaggaccatttacaaggcaa

SEQ ID NO: 62251 - DNA, 821 bp, Bovine  19866881374154
  misc_feature (1)..(1): n is a, c, g, or t
ntctatctttcccagcatcagggtcttttccaatgagttgggtctttgtatcaggtggccaaagtactggagtttcagcttcagcatcagtccttccaatatatattcaaggttgatttccttgaggattgactggtttgatctccttgcagtccaagggactctcaagaggcttctccagcaccacagttcgaaagcatcagttcttaaatgctcagccttctttatggtccaactccctgtccatacttagtaccaaatgagtataatggagggccccgaattaaaggaagttagaggccatagtacagcactgtagttaagaacagagcctcttagtccatccagcttatgtgaaaacacatctgttatcactctagcttccacatctgtagcataggggtggtaataatataaaacagaccataaacagaatactctttgcacagaactgatgggttatcatgcacccacaagtcagcaatacgtggttgtcattatgattatagtgaattctagctcttctgggaaaaatgtaaagacactcagtctcttggttccttccatcttcttagaagcgtcacagatccccacttgtgtatgggtactgattctatcaagtaggtgaaaaaatgttgctgtcccaaaattggacagaaagataaaatacagacattgaagaaaggtcaggaagaggcagatgcccaggaagagtgagttgaaaacaacattcaaggtccgactcctggatgaaggtgttaaatgacaggtggggagcagtccctgctgtaatccagttaacatttagcacctaattatca

SEQ ID NO: 62252 - DNA, 763 bp, Bovine  19866881392891
  misc_feature (1)..(1): n is a, c, g, or t
ntatattagcaaaaatattggtcttgatttctttctttctttttccctccttcagtctccaaattcagttattattgcagttgctttttgctttaatagcatctgttttagtaattagaaccaagtgtgtgattttggacatttgtgcctccagagggctcttattctttagaaagggaaaagcaataaaaacttgaaacaaaatgaaaggaaaggtatatagagaatcaagataatgagccaaaaatgcaggaaattaatactgcattgcatatttgaaagttgctaagagggaagatcttaaaaattattacaagaataaaaattttgtaaccatgaatggggacagattttggctagacttattgtgattatcaattctcaatatatacaaatatcacatcaaaaaatgcaagaattctattttagagatgaaacagtttttgatgcttaaaatattttgaatttggaatgatgtaatctatccaattttatttctaagtgttaaaattttagagttaagatgcataactgtgcttccttcagagcatatgttaaattttgaagattttttatcagtgttctttagtgttctcatattaattagaaaaaaagagagacttcataggctatcttgatttttgcaattattacaattatagttatacattttggccttttatgtttctgctgatatttattgatattctgatatctagtgcttcaggaatggagcagtgctgataacagtctgtagatggca

SEQ ID NO: 62253 - DNA, 965 bp, Bovine  19866881463536
  misc_feature (1)..(1): n is a, c, g, or t
naaaaaggacaactttttttctttctcccattccttaggattatataccaataatgtatcctgcctaaggacagtctttggattcaaccttctgttatcttaaaatgtaaattatgggagtaggtcggaggaggtctttacaacctccagacattctttggattatataacctcattattaacactagcaagcgggtactctttctgcccccttctgatgcctatatcagaagctttctctatctcctttatactttaataaaactttactacacaaaagctctgagcgatcaagcctcgtctctggccccggattgaattcttctcctctgggggccaaaaatcccggtgtattcgcgtgattcaacaacaacctttcatatgtttggtagtttagtcactaggtcatgtccacctcttgcaactccacagactgtcgcccaccaggctcctctgtccatgggattctccaggcaaggctactggtgtgggttgccatttctttctccaaggggatcttcccagtccagggattgaacccagctctcctgcattgcaggcaggttctttactgactgagctacaagagaagcctttcaacctatagtataataactaaaaagaaaacaaatcctttgtaatgaagaaaaactatgcaagctttgtaatccacaattgtaaccaaatttgctttaatgagtaatacatcttgagaagataccttaatgcaaagtatatgaaagatttaaaggtgaagcaaattcccttttccttttctttcataaacaccatcacaactgacctttaacgctgataaagctataaggaaagacaagggcagatgcaatattctgccagacctgtttgaatatatttagcagatggacaaggcaatgaccctttatccaaagaaatttcaagttgattttaatttctgtgtcagtatttgtatataaaagttttta

SEQ ID NO: 62254 - DNA, 2471 bp, Bovine  19866881587558
  misc_feature (1)..(1): n is a, c, g, or t
ntaaatttgccattctagatattttatatcaaagtgaagtgaaagtgttagttgctcattcgtgtttaactctttgcgatcccataactgtagcccaccatgttcctctatccatggaattctccaggcaagaatactggagtgggttaccattcccttctctagagattttatgtaagtgaaatacaaatatttgtcctcttatgtctggcttatttcacttagcatgtttttaaggttcatccgtgttgtagcacatatcagagcctgatttctttctatagctagataatattccagtgtaggtaatataacactttgcatatatccattcagtggtggtgtcccttgtattatgcttctggaagaactttggaatcatttttgtcaaactcctctcccaaactcctctagtgtcttcttaacattctttaatgtccctttctatctaccttttgttctattaagcctgtcttcccactttactggtacagaatgccttcatactggcccaagccagcactctaccttgatcctggaagttccctcaagctgcctcatgcttcacagttaacttgttacatcttcattctccaataaatatggacaatttcttttttgcaattaatctcagagaggtattgggaaaattagatgcctcttggtggaatgtgtattttaggaaaagggtatttgtgattttaaatgatttgcttttttaaaaaaaaattccaataacatagcaaaatatcttttaaaattttagtctacaggagggtagcttatttttgagttgacagctccttaagtctgcctgcccatccacagtatgttaaggcatccctgttttgtcagctgatgtctgtgtgaaatgtgaactcaatttttctgttggccttcctcctatagtaaggaccattattgactccagtgacagtagatgtgttggatgtagtttgtgtgtctggttggcagtgagtcggtataaatcaggtactattttaaaacagagatatcttgttaacaatctaacactaaactgtgtattctggtacgtagttcagggaagcaaaagagaaatgagagctggcatgctatgggacagcttcatgggtatttcaagaataatttatttgaaaaagatacatttcttctggtctttgcaaaggtaaggacaaacttctagaaggaagaaactattagactgatgatgtttattagtccactgttgcgtgtgtagtagaaaggtcagtggctttggaattgtgtataaatggcttaagttcttggttctgtcacttggtagcctatgttatctcagtcaaattaatgtttcctttaagccttagtttcctcaactataaaatatacttcactcagctgttttaaagctcaaacaagataaatagtgtgagacctcctagcaacatgtagtccattgtaaacactcagtgaagatccatctcctttcccttccttccctgtgatgatgtgctcagtcatggccgactctttgcgaccgcatagactgtagcccaccaggttcctctgtccatggaattttccaggcaagaatactggagtgggttgccatttccttctcccttcctttcctcagtcagttcagttcagtcgctcagttgtgtccgactctttgcgaccccatgaatcacagcacgccatgcctccctcacaactcccggagttcactgagactcacgtccatcaagtcagtgatgccatccagccatctcatcctctatcgtccccttctcctcctgcccccaatccctcccagcatcagagtcttttccaatgagtcaactctttgcatgaagtggccaaagtactggagtttcagctttagcatcattccttccaaagaaaagaaatcctagggctgatctccttcagaatggactggttggatcattgcaacaccacagttcaaaagcatcaattcttcggtgctcagcataacaccatttaatttcacaaaatgtcaaagagaagtagtgttagctcatttggccctccacaagaaactattttatctaagatcaggtgtcttaatgattaaagctttttatgaatgtatattcctaggcagccttatgtagccactgcgaagtcagattatgtttcagaaacatgggtgccttataataaagctgttttcttcatgaggtaatgttcctgaaatatatgctggataatccatgatccactaaatccatgagctaatgggtctaaaatacatgccataaaccacagaaacttcttgatgggaaaactggacatggattattatatttctctgcatgttagggtagtcaggatgaccaaaagtgatttttttcccctctttccccattttgtttcacaaaaatagacaatatttacactgccaattatttcagaagaaaaagtcacttatgaaactcttcctgcaaagaaaggagaaacaacaa

SEQ ID NO: 62255 - DNA, 1420 bp, Bovine  19866881759398
  misc_feature (1)..(1): n is a, c, g, or t
ntccatctaggctatggtttttccagtggtcatgtatggatgttagagttggactgtgaagaaagctgagtgctgaagaattgatgattttgaactgtggtgttggagaagactcttgagagtctcttggactgcaaggagatccaaccattccatcctgaaggagatcagtcctgggtgttcattggaaggactgatgctgaagctgaaacctcaacacttgggccacctcatgtgaagagttgactcattggaaaaggccctgatgctgggagggactggggcaggaggagaagggaacgacagaggatgagatggttggatggcatcaccaactcgatggacgagagtttgggtaaactcctggagttggtgatggacaggaaggcctggcatgctgtgattcatggggttgcaaagagtcggacacaactgagcgaatgaactgactggactgactgactgactcaatttgcaagattcatcaaactgttgacttatttgagcactcttctgtatatatgttagtgaaagttgctcagtcatgtccaactctttgcgacccccgtggactatacagtccatggaattcttcaggccaaaacactggagtgggtagcctttcccttctccgggggatcttcccaacccaggtattgaagccagttctcctgtattgcaggcagattctttaccagctgagccaccaggggaagcccaagaatactggagtgggtagtctatcccttttccaggagatcttcccaacccgggggattgaaccggggtctcctgcattgcaggtagattctttaccaactgagctatcagggaagcccaaatatgttatatggtatatgtccctgaaaagtttatttttaaaaaatgtgcccagggtataccagtgtatgtgtctatgtagccactcgctcttctgacagatcctgggctgcccaaggaaagagaaagatctccaaaacttcagacatttcttctccttggagcttaagagaatagagtacaaaaaaaaaaaaaaaacagagaagagtgagtagcctgggtctgtgtgagaagaagagaatcatcaggaggctgaccgagccttctgtaaaatttcatggcgggggtgggggcgctcaattgaaagttatgttccaccatttaaagtgagaaaatagaaatgtaaataatctccaatccaaagtggcttttaaatcctctattaatggaaaattcgatatgtagacagtactacacaaagaataatttcacagtataaattgaggaaaatttatcagttcagcttagttttaatagcctcagttttttagtggtatcttcttaaaactgttatcttggcagcacagtacaccaattcaggggccatcgaaccaggtagattttctaaatcaaattataa

SEQ ID NO: 62256 - DNA, 940 bp, Bovine  19866881931597
  misc_feature (1)..(1): n is a, c, g, or t
naccttggactacaacactgaaataatgcttatcaatttctttacctcaatcccatgtgaaagtgtaaatatataattaaagcaaaatgtcaaggagtacttgtacttaaccttcccacatataatgcactctgatatttcctatcctgttccatttcactttttaaaatacttgtaaccaccaaattgcttccatggctcactaacgtgtggcatcacaaagtctaaaaaacactaccatgagcaggaagattcagcaattatggacatggtattgaaaggcaagagtattttttttttaccatatgtaagatgaaaacttatgtagacagaatgcatccttcttactctctagaatattttacttgtccacaaatgtaagacacataaatatcaagccttactataatggaaaactacccctactaaagagaagtattttctgtgtctattttaaccagatgctcaaagtattagacacagttcatttgtgtaccttatgaaaacttagtactgtatatgaaaactcatatttataacctaaaaaaaaattgagatagggaagctgaacattcacatttcaaaggcaaccttaacttaatgaaggaattatgtcaataagtttaaatagaaataattctcctaatgcacttaagtcaccaataaaattaactaatcacttgacagaaccagccaaagggaaactaggttaaaaaatatcactgtcaatttccttttaatcagagaagaaaatagaacattgaaacagggaagatgttccaaggaaagatgtctccatttataaaactgttttttatagtcaacttttttaaagtaccaggataaggcagagatgttacagtcagtgatgaaagaatttgccttgctcctcagttaggtctgatgagaggggcaagagttgcccatgaataagctaagg

SEQ ID NO: 62257 - DNA, 1259 bp, Bovine  19866880425495
  misc_feature (1)..(1): n is a, c, g, or t
ncaaaatccacctgtaataaaatccagtggaagatttctatggattaaattttttgctgatggagagctggaatctatgggattttcagcccggtacaatttcacacctggtaagtggggacttgtttttttccccgtcaatgttttcttccttagctctcttgctatcatagtgtaagaacttctgtaagacaacattatcatttccaaagagcttcccagttctatttggaaccaaacctatagtgctctctcttttcatttcataaattctgaaagggaaattacttttccttaaaatttagcctactctagaggtaaaccgtagtgactcaggggtttacatggtcatcagcaacatgattaattagttggacttccattatgccgaaacatgtaattcaagaggcagtctgtaatagagaaactaattatactttgaatcccaataaacttgaaaaggcaattgcaatactgtaaaatgtatccatcaaaatgatctttggagaacttgaataaaatattcatttgttctgaaaattatcatttttaaagcaaatggatcttaggataaagccgtctaatctcttttttagaaatgcaaatccctaagagttgtgatgaaaggaaaagtgagccccctagcagcccagtattcatttgcaaggcctggcacacattatctgttattatataattatccgttctatgtcaattttccttttaaactgttaatattaaaaaaggcctatgatgttgactggcttactttatgatgagctatcatttgttacaataaaaattgttatcacattttaaactttgtgaacatcatgctgcagcaatttgagatttgatgaggtcatttttttttaatggaaagatgactcaaattacataaagcacattatttacttataattacatatttttttaaagtttgtgtgtatcgttttactcaggttgtaacaggcagtaaattaaattgaaatgtatgtaaactttgttcaagtttccatcccacgttacagaggtaacatcagagcagggctgtgatgctccgttcaaacactaaaatgttttaaataattaatatgagattaatgatgacttttattatgatactatagactaataatataattaaaataagtgagatacaaactctatgtgttagccttaaacattactagattgtggtttttattatgtttttctaatattgggttgttaacagaagtcaggatattttatatgtg

SEQ ID NO: 62258 - DNA, 1472 bp, Bovine  19866880451717
  misc_feature (1)..(1): n is a, c, g, or t
ntattttaaatcattgtcatttttcagtttgaatgtaataacttttaaacaaataatatagatgcaatattttatttaactgtcataggaacacagctatgatgtatacatttaaaatataagcagtatgtaaattatacaaacagaaaaaatatgtttgtagctctagtattaagtatttttatactctaatcaagtaaacaactgtgatttttcaactctgaaaaaaattataaaaaaaatttgaacatgaaattatagaatttcaggttctttgtattgaatcttaatcattgccaacagtctacatttacatacatggtaaagggctaattcatattttaataatgactattcatataacatatgtggatataactgcactaaaggagaatttctaaaacataaagtgatttatcagttcagtcactcagtcatgtccaactctttgcaaccccgtagactgaagcccaccaggcttccctctccatcaccaattcctggagcttgctcaaacccatgtccatccagtaatttatagtaatcattaaaccatatactagattagtgacaaatgtcaaatgggctatttcttgagatatttcaaagtagagtagatgccacagaacttggatggataaacatttatttttctgagaaactgagggcttgctgtgaaaatttcttaaggccattttcagtatcagccatccattaacactagttcaaattatttctcagctcttgagaaagctgccctttagatttgaattaaagcttatttattaaattctgcaagtttagaacttcaatgtgtacatgttattgagataagcctccatttttgttacatatagattctatagtcctttaccaaaattactagagctcttcttccaaaatctcgctcatgctcatgtacatctagctaatccatgtctcttctcctgcctggtctacgtggttctcccgtcgcccaaggacagtgaagtccgtagctgtacagctggagtgaggtgacagagctgtgctaagctcacaggcacatctttactcatttctccaaaacataagaaagtcagtgcctcacagatgctatcatttatttcctcaagttgatagctattcacgtggatgttagttcacgtaacccccagaacttgtaaaacagttatcagttattgtaagtgggtagctgtagtgacttgatgggtgccacatcctttatttattgatatggcaagcaacattttccattcacagttacaagcaaatgttacaccattttaagtgacttgagcatccacaagtttggaatctgtaggggtcccagactcaatccttcgtggatactgaggacaactgtattttaaacttaaagatgatactattttttatagataatttactttgaaattgttttaacattttgcttttctgtaatgaattgataagcatgattgctaagttta

SEQ ID NO: 62259 - DNA, 1355 bp, Bovine  19866880563521
  misc_feature (1)..(1): n is a, c, g, or t
nacagacatgagctaagggtatgccctttaatgtggttggtcactgaatcacatcgtgcaaaacattgttaagttcagatgatattttttggctagccagcatttctgtatggatgacactgtccatagactcacattaagaagtgacctctttgacttgagtagtgaaaccaggaatgccatccagtcatggcaaccattgtgtgcatagaccaacacaaaatgaccagttcagttttcctgatatgtaatttaaaagacttgaatagttctgcagctgtggtattgggtggcacaaaagggcacaacatatcatcatgcacatcctcctgaaaaatacagctcacagaaacaagcattgttgccttgttgttaacactggtagacatgttaagctagattgcataccatggtgactcattcatcttctctaccaattgtgtttcaatatcttctgccatttatcaattcatctagctatggtactgctgaaagagggaaatgttccaccttttgaactgcagtttctccaaaatgttcacaacagttgtcctcagcaccaggcaggattgactcttcagtaagaataaaggacttcttagctttagcaataaagtttgccactaagaataatgctctcagtgcagacgtatttgatgatgtgaaggccttcactaattgcttctgtttttcattttcatgtttttccttttgaaaaactccaaagccttgtcttttgaagcaagggacttggtcaccatttggtgaaacagtttggacagtttcatggctttattaaaattagtgtcggattctgatttaaagtctttcccgaaatgcagctgtacaattgaagtacatcaactcatgtgttactgaacagcttgctggcagatgcagcttgtcacttgccactcactgatagagttttgatatgagtctgcaagcaattgacttattttagtctctgtgtcatcaacctctctgctcgtgataatctgtgtttgcaggtgctccccagtgctggcatcatcccttcagctccacctcagatcatcaggcattggattctcataaggagcactcagcctagataactcacatgtgcagtttacagtggggttcgtgcttctgtgagaatctaatgctgctgctgatctgacaggaggcggagcccaggtggtaattacgcaagtaatgagaagtggctctaaatacagatcaagcttctcttcctcacccatcgctcacctctttctctgtggcctagttcctaaaagcttgcacaaatacagatttccatcatgtatcactgaggtttgtttggaaataaatcatcaagcccaacaagactg

SEQ ID NO: 62260 - DNA, 1186 bp, Bovine  19866880590940
  misc_feature (1)..(1): n is a, c, g, or t
ntctcctggaggggaggtggtcttcctaattccatttctgataacttggagaagcatatagtctccccagcaattctgatttccccaggtttcctgttttcctccttcccataccagagacctgtggggagagagagagagagagagtgtacacgtgtgtgtgtgcatgtgtgtgtatttggggtcaaagaggaagatgacgacccagagctccaacacgcactgcccacctccagaaacacccccttccccacgaagagggaaggcggtctggtttccaggaggatggaaactttgctcctattattatggaataggcagtccaatgaatcatctcctagagctgctttctgctctctgggggatggttcctattttctaggacagaagccttgcttcaggcaggaaatcttattagctctcccactcctcctggtcttcctgacaacctgtatatctttctaaattgaataaccatagttcctacttacaggtaggcattgctttaggttttttttttaactgttagatttaaatcaggaattgaaaagtcaaacatagtgtaatcatcacctagatcttttatgtgtctatctcaggccaaaacaaatgtttatgtggcttacacaatatctatgccttgcagttatatctcttcattagagaagttattcttattttttaaccaggaattatatggcacttactaggtaccagacaatgttttacgaataatcaccatattccttaattaatctgagagttctctccatcactgttatgtccactgtacagaagaaagaactgaggaacagagaggtttgctaatgtgctcaggaaggtgcagccagtaatggcagagctgggattcactctgagcagtctggctccattaatctgtgaactaatcatgaaattgagcacatgtatctcagcgtaacggagaagctgtggtgcacagaataacatccccatggagatgcccacgtgcacatgtgaaaatggtgtgttcaggggaaacagggatcaaagttgcacatggagtcgaggctgctaatcagccagactcggaatgggcagattaagctggcttgtcagagtgggtccaatggatcacagagatctttccaggtgagaaagagaaatgggaggtttgaagtcaaagtgggagaggagatgccagagg

SEQ ID NO: 62261 - DNA, 2852 bp, Bovine  19866880675133
  misc_feature (1)..(1): n is a, c, g, or t
nttacacagttagtctcatgtctccttagacttttctagattgtgacagtttcccagacttgtttaaaacaaagtaagttcttaaatgtgggagctgtatcatgatgctaggccattttctggcatataaatatgtatgccagatatacctatgaccacagaatagctcagctggtaaggagtctgtctgcagtggaagagaccccggttcgtttctttcgtcgggaagatccccaagaggagggcatggtaacccattccgattctttgcctggagaatcccatggacagaggagcctggtaggctacagtccatggagtcagaatgagtccaacatgacttagcgactaaacaacaacattttaacatatacatgtgtacatgcatgagtcaaatattctgagaatgcaccttattccaaataagttattctgaatatagtaacagtcacattttcataataatattgcatttctaacactatgcagaaaaagctgaagaattgtcttccccatcatactttcttcctattctattaatcttcagtctttatgaaaatgaataactttacctgtcaaactgacctgaatacatagtctaagcaagtttgccctttttctcattaaatttgcagcctgtctagcttataatgaccccaggttaggagacgtaattaagtgatttggtttaataaaagaccttcctctttagctcctgctaaccatctctggctaagcagttctcatgggtttataaaatgtaagaaatgatctcacatttgcaatggaaataaattaagtcttgccactgaaaagcatgtcacatgatgtgtgtgttagttgctcagttgtgtctgactctttgcaaccgcatggactgtagcccgccaggctcctctgcccatgggattctccaggcaagattacaggaggaggttgtcatttccttctccagggcatctttccaacctcgggtatgaacctgcatctccagtgtctcctctgtctgcattacaggcaaattctttactgctgacccacttggaaagcccaatacaaaataaaaaaattaaaaaaaaaatcaaatccctatttatgattttaaaagtgagtctttgcaatctaagaaaacatataatgtttgaaagtgagagtcactcagctgtgtctgactctttgcaaccccataaactatacagtccacggaattctctaggctagaatactggagtgggtagctttttccctcctccagggggatcttcccaacccagggattgaacccaggtctcccgcattgcaggtggattccttcccagctgaaccataggggaaacctaaaaatactggagctacaatgtttataatattacaaatttattgttatttaagctcagaataaagcactgcttttattcaactatgtaatagaagttctggtcaagtggctacttttttttttttttaattttgatcttttcctaggctgacaataatgctgtctgagcttctcccgtgatgctagggggacacccagctgcagcccaccgtcagccatggggtgggtcaccagggtagacaactgatacatttacaaccatcctgtacccaagtaacagccattatgctgttcattttcagtgaagtactcaatatgttacaggatatctttaacatttcattataaaatgtcattcagtcgccaagtcagatccatcaatctgtgaccccatggactgcagcacaccacgcctccctgtctttcactatctcccagagtttgctcaaactcatatccattgagttggtgatgccatccaaccatctcatcctctgtcgtccctttctcctcctgcgctcaatctttccttagcatcaggtggccaaaagtattagagcttcagcttcaacatcagcccttccaatgaatgtgaagtgttgatttcctttatgattgacatctttgtgttagatgattttgcccaactatagcctaatgcgactattctgagtgcatttaaggtggccaggctaagctttgatgtttggtaggttaggtgcaataaatgaatttttcgactttaagttttttcaacctactatgggtttattgcggcttcccaggtggtgttagtgataaagaacccacaaaccaatgcaggagatacaggaaacaggagttcaatccctgggtcgggaagatgccctggaggaagaaaatggcaactcacttttgtattcttacctatagaactccacggacagaggagcctggtgggctacagtccctggagtcacaaagagttgaacacaactgagcccactaagcatgatgggtttatcgagatgtaaccccatcataagttgaggatgatctgtctatgttttaattgtgtggaattcctatcctttttttctagtaaatatttttagtagatattttccccgttgaagttcctaattactttttatgtaatggttttgccagtgttgtcaaggacaaatatacattacactgagcccacgcagcaaaaatattttgctgattctccataatttttgtcctttcgatggcttgatttatttttagtgcttttaataattctgtctagaacatttttttcccaagggcatacaaatattgtgaaaccctgaggaatatttttttgtttctaaaaatacatcaggacttcaatcattcaaagttcctcatatcagtaagacatgtaattggtgcctcagtgagtcaagcaagatgccggttgtgtaggaatattctggagattctttccatcaccataaaaaataaaaagactacttttaattggcaaagtttgactgatttccctttt

SEQ ID NO: 62262 - DNA, 960 bp, Bovine  19866880700031
  misc_feature (1)..(1): n is a, c, g, or t
naaaacacgggcattgtatgtcttccctactgttttggttatgggtaaatatcttgggccaacagacatttaacaaattctgtactgttagacccatacattaagccacaaaaaatcagacaccgaaattactcattcagtcattatctattagcagggtttctcacccccagcattggcatgtctcattcagtccctaaattttgaagacttgaagggaattcctcatcaacactgtttgtaatcagatctaatcagggaaaggctacttagaatactagttaatgtcatttatgagacagtattaaatattgtcttcaatatcaatcttattggccttaaactcaaataaaacaaaaacaaaaaaatagctgatggttgaagagaaggctagtagtggggaccctactctgagtgtccttcttgaaagtgttttagctcattgctatgagctgtggtttcttaatgtatctttgttgggaaatgatcagacacagacagcagataccagaattttactcaaagattattgtgggtttttaggcactaaaacaaaaaaaggagttgagatatgatttccacatttcccagaacgttatgtccacatccttaaggatgaaactgaggacatttcgggtagctttgatgtttaatggagaaggaaatggtaacccactccagtattcttgcctggagaataccatggacagaggagccttgtgggatacagtccatggaatcacaaagagtcggacacgactgagcgactaacatttgatgtttaaagaaaacgtcttaaaagagattgtgttaaagttaagattaatctaaatggaagaacgtcctgaaaaatatatttgcaatgtctctaatatatcagactatcattccaagtttgaaatatattaataatgtatttttcaggaatttttctattatacagatttattggggattttt

SEQ ID NO: 62263 - DNA, 961 bp, Bovine  19866880777994
  misc_feature (1)..(1): n is a, c, g, or t
ncacctgccggtgcaggagacttgggtccgatcccctgggtgggaagattcccctggaggaggaaacggcaacctcactccagtatcttggcctaagtaatcccacggacagaggacccttgtgggttacagtccatggggttgcaaaagagtcggacatgatttaaagactaagcaacaacaaagcataaagcatgaaacaagacatactccatttataccaggtaggacccctattctgattattgtgaaggattccgtgacctttcgatcaactgccaggaaattgagctatttgcttcagtgagtgcctctgtctccctctgagtctacagacctcagaataacattggattattagcaaacctacataaaatcatcccataactctctttggttttagtgtttgtccgtacttacagctaaactgtcaacaaatagtttttcaatagttcataaatattactaagaaaatatgagatccaaaaataggaaacaaaaccaagaaacctgttattgccacttcctaatgtctttttcctccactcaaaggcatttaatactttttaatagttgaaattatatttatctatcttctgatgccttgcacagacacaggtagcaaaaggatagaatgattaactgtctgtgatgctactaaacccaagctgatcaatttttcttttatctgatttcctacagttaaatctgactagaatatcatcatgctaaattaccttttattttgagttactaggtgtatttaactattaaattaattttgaatcacatttttcaaacaggctcagtgaggagaattttaaatggcccttttatcaggtaaattaagcaacagcttgcatatataaccagttatacctctcacccataactatgaaaaataaccagcttagaattaattggcaacaaataaactgcataactgtaattccctatcatt

SEQ ID NO: 62264 - DNA, 1373 bp, Bovine  19866880792645
  misc_feature (1)..(1): n is a, c, g, or t
ntctttctctgtccccaacacgatcatttccatatttcaattataagacactagaaaagtttctacaaatttccaactggactagtacttttaaaatgttctctcgtcgtccaacagtgaaccagcctcgtcgccttcagggcactctttttaatcaggtttttaccctagtgctgtaggataaattaaataggatggccattaattaggattgcagtcatgcacattcatttagacgccatcgccagaatctaagtctccacgacagggccagagccaaagaaaacagcttgactctgctttaaaaaaaaaaaaaaaaacaaagaaaaataatcttcatcttctataaatttatggtaatgtgttcttcttacagctttctgcgggctggagaggaatggaatattttaggcttccttgcagcttgagttaaggaaaatccctctgggtacttaatctaacctctttcctctgtctcaacactcccatgtgtcaagagtcagaatggcttatttctgagatagtttttaacactgtatatgctgccagtgagtttagggaacaggaaatctttcattttgttttattggagtatagttgatttacaggcttgtgttagtttctgctgtaagcaaaggcaacttatacatatattcactctgttttagattcttttcccatacagatcattacagagtactgagtagagtttcctgtgctatacagtaggttctcattgctgttgctgctgctgctaagtcgcttcagtcatgtccgactcttagtgaccccatggactgcagcctaccaggctcctccatccatgggattttctgggcaagagcactggagtggggtgccattgccttctccaggttctcattagttatctatttaatatatagtagtgtgcatatgtcaatccctgtctcccagtttatccctccccatccttttccccctcagtaaacatgtttgttttttacatccatgactctatttctgttttatacaatttttttagatttcaaatataagtaatgtcatgatatttgtcattctcacacaggagatcttttagattttgtaagctctacattcaatccaccaacactcctgacttgctatcttctagaattaaaagaggggctggacctatctcacttctttttaaagcgtccacatgcctattgaaaatcccatgccttgtggagctggacatgacttggcactgtccctggagccaggccctttgctagagaaaagaattccttaccttcgttgtatagcagaggctaaatgtgcggtcagcatttggacacatcccccaaggaagttttttcgagaataaaagaatggtatatacaaaagca

SEQ ID NO: 62265 - DNA, 1988 bp, Bovine  19866880797399
  misc_feature (1)..(1): n is a, c, g, or t
ntggtgcatctgccgtgtgtcgggggtgtgacagaatgagaacacttatagcccaaattaaaatgtctcctggtgtctcccaagtgattccgaaatggaaaaaataaaagccaaggtcagaaaaatgtcaccatttgaacaagctgtcaagcagcctccaaggaaatatgttcagatgacttctatatacatagagtaagttagttaagtgagaggatataattcaaatgtgccttcattaagcctatcagggattgaaagaaagacatattcatttcttctgggaagaaagggcttacttttctttcttcctttaattctctctgcatgctcactcactcagtcgtgtccaactctttgtgaccccatggaccgtggcccatgctctgtccatgggatttttcaggcaaggatcttccccactcagggatcaaacccacatctccacatctcctgaattcgaaagtggattctttaccactgagccacctgggaagtcctaaattctttctactcctccaaaattctggggtggggatcaagaaattgcctctgtattatggtatcaaaaggggttccctttggcatgggacatcatgggaagaaggtcactaacaaatgaactttctaggtctttgcagcaggaactgtgagactgttaggtccagaaagtgcttacatatactgactccctcaccagcagactctagtacccgcctgtccacctatatgtcagtttcacattggtgtcaacaggtgtattaatataaactattgagtccccaaatttgcaaggattgtagtcacaaagttttactatttgtcttaaatatgggaattccataatcttgtagttgattgtttaaacatttataagaaaatgaaaaaaaataaggtttttactctcatgaaggaaataaatggtataaatgaatcatttactggtaagagatgcaggagtaggaaattgttctttctgctcagctcactgggacagaaactgagaagaaagagaagctctgttgtcaaagagatgcagacacatcatgggacattactctatgacatgcatgtgtgtatgtgtgtgtgagtgtgtgtgtgtgtgagtattcagtctttcagtcatgtccaactctttgtgacctcatggactagaacccaccaggctcctcttgtccttggaatttttcaggcaaggattctgggaagtgggttgccatttccctcttacagggcgtctttccgacccagagatcaaacttggcatcccttgtgtctcctgcattgacaggcagattctttaacactatcatcacctgcgaagcccgctctataacataggtcctctaaactcttttccttctgctgctgctgctgctaagtcgcttcagtcgtgtccgactctgtgcgaccccatagatggcagcccaccaggctccgccatccctgggattctccaggcaagaacactggagtgggttgccactctttttctccatacagttaaaacctcatgtctgggctacactggcttggtgcctcaacaataatgccttaattgagctgccgtggacagctatgcccttgtctcttatcaaagattattttaaggaatagccacatggagaaaattatcttattttcagcaaagtgcagatcgacattatccagtacagtagttagtgtctcttaagactttataccatatatatatttttaaaacattgaataccgtgtgtatctacttagtatgttgcatatgtatgtatatactcacacacagtctggctttcatgtttcttttttgaatgaaatctacctaaaatcatgtttcagttttattttcttgggaaagcaaagttaaactgattttgttgtcctctttgtttcctaagactgtttcctccttcctttccatcattttatgtatttctatttcagggcttttacttttatttgttcagttttgtatgcctcttttaagcaaa

SEQ ID NO: 62266 - DNA, 2101 bp, Bovine  19866881022147
  misc_feature (1)..(1): n is a, c, g, or t
nttgatttcgtttaggactgatgggtctgatctccttgcagtccaggacactctcaagaatcttctccagaatctttgtgtcatgtaaaattttatttctctctgggtgacagagtggctattccctggtccccaagttgtgttccagatgccctcaggcaccacagcaaactcacagggacgattcaggacatggtgcagtttcacgggaagcaacaccatctgtcagagcttgatggagttcacaatttcagtgcctggctgacatagttccccgttttaatgttagatcaccacagtcctgtcaatggagtcatatctctgcaaatcctttgtgtgtgtgtgtggtttctctaatgaaaagcaagtactgcttgaaaaccaacgtggaacagacaatgagggtgactgtgtccagtttgattctaaggtttccactgcccagttcattgaagcttcgagttctgactcctcttgattgagaaatgtctgtgatactcagtgcatactttatatgggttcttttaataaaggcagtggtgaaaggacttggcagagttgaaatgctgtgcaaatacaagttcttaacaactttcactaatatactgttgtagtttcctattagtcaagacatagaactgaaagtttattcaactgaattgaattgatccctgggtaaactttcttcatcatgtttctgtaagagaagtgccttagctgactttcatccccacttgcttcctctgcttttcctctagtaatagtactaatgactagcaaaatggccataagcctgaggccaaataattgttattattattcatatttatatatattttaacatttttagtatattgtgacttgaatgatccactaactgtgaaggtgtgtgtattagtcgttcagtcatgtccaagtctttgcgaccccatggactgtagcccaccaggctcctccagccatgggattctccaggcaagaatcctggagcggattggcatttccttctccagggaatcttcccgacccagggatcgaacccaggtctcccgcattgcaggcagacgctttaacctctgagccaccaggtaagcccaggggaaggagagggcgggacaaactgagagtagcaaggagacacatacacccccatgtgtggaaaggatagccagtgggaagttgctgcaatgtgcagggagctcagcccggtgcactgtgaccccgtagaggggtggggtgcggagggaggtgcgaggggggttcaagagggaggggacacgtgtatacttatggctgacccatgctgatgtgtggcagaaaccaacacaatactgcaaaggaattattctccaattaaagataaatttaaaaacaagatatagtccaaacttaatcatcagttctcagtatgtcatttatggtattagagtggctagggacatatttgacctaacttgactgacctctctttgactagctttggctcaaggacagtgaaaaaaaatttttttttcatcccaccatattgttttgtttttattttgtgtttaaaaagaaggcaatatggcacaaatgctaaatacacatttagagccttagtggaaacaccatagtggaaaatgaatcctacttgtgaggaggtagtttaaaattttagtctttcaggggtaatttaggtttgacgttttgtgaaaatgccttcatgattcacagggtttttagaagccagttaccttagtgattttatttatctttctgaaactgtctgacagttgaaatgtacttggttacacctgctggcagttgctagttttaaattacaggaaattgaaagcaagttgcttctgggacactgaacttagaatttctttcttattttggcaaatgctgtgtgactagtagtgtaagtaataccactgtaaagtttttgtcttaatatttagggatgcctcacattaaaacgagcagatagttaaatttattcaaagacataggtgtacaatagacctagatgtgtatctgcaggcacatacatgtacacacacacacacacacacacacacacacacacacacactcagctttagaaaataatgaatat

SEQ ID NO: 62267 - DNA, 782 bp, Bovine  19866881079368
  misc_feature (1)..(1): n is a, c, g, or t
ntgaggaacataggtaaacatcagtacatttcctggaaatggatgttaacagagactaattatgccaaattagttattcatccctaaacaagcaatcccctgacctgaatgtcatccaggtcttacctcttgtttgtatgattttgggcaactcgtgtgagtctcctttacttttatttatttatttggctgtgccaggtcttgaggcatctgggatcttatttccctgcatgcgtgctaagttgctccagtcatgtccaattctttgggaccccatggactgtagtctgccaggctcctctgtccaggggattctgcaggaaagaatactgaagtgggttgctgtgtcctcttccaggggatcttcctgacccagagattgaactcatgtgtcttatgtctcctgtagtgccaggcaggttctttgccactactgtcacctgggaagcccagggatcaaaccagggtctcctgcattgggagcagggagtttcagccacttgaccatcagggaagcccctgaaaatcatttaatcatttccttgatttgcaaaaagtaccactttccctactcatttcatcaattacttttgaggatacaaatatattttaaaccattttaaaaacaaggaagtactataatgaatgcatttgaaacaaataaaaatctttcacattttaatacaaaacaattatttgcgccaatgacattaataagctagagatttaatagtcacacaaataaaattttgccaagtcaaagagagtttaatcaagtaatt

SEQ ID NO: 62268 - DNA, 1193 bp, Bovine  19866881106961
  misc_feature (1)..(1): n is a, c, g, or t
nagagttaaactattgaattttacaaagggttttgtcatatctttttatacattctagcaattacctttttaatgagaccagatgtcctgaactttcttacacaattgagttatcaagtaagagtcaaagtcaagtatatttgttttcagcacaaaatattatgacctgtactaaggaaaatactattttcttctgcccttttatcctctctgcctacaggagataacatggttatgatcatattacatttacactgaatatcaactcctctttctttcactgacttgtaatctgttgactacagcatattttgaaaggatataaggctgcaccaccaccatctggctatttgaattttccagcaaagatattttgggcaatgaattattttactgttgagattctcctggttcatgaataaatatcatcaaggatttctgtctgcagggaagaatgacctctatctattctatgaactcagtgagagtgtttgaccttcttaaatccttgacacaaaaatacaatatggatgcaaatgagttctggatttccaaaataagttccctccatgacaccctctattacattttacaaatccagccaaagagagacagttcaaagcactccataaagtgaattgaattccattctgtttccaggtgctcacaaatgcagaggctaaatagaatcttttagaaagcacaggtcagagagaaagaaaaagagagaaattgtaatgtaattgaggaatgaaacatatagaggtggccaaaaagatagttaacaccatccataaaaaaaaaatgtgttttttctattgcactgagaaacccaaattctatgaggtattctcagcaattggaaatgaaaatctagactgaagccttcattgacttctctaaggcctttatgtggaccacaacaaacagtggaaaattcttgaagagacggatataccagaccaccttacctgcctcctgagaaacctgtatgcagttcaataagcaacagttataaccggacagagaacaatggattggttcaaaattggaaaaggactaagtaaaggctgtatactgactccctgtttatttaacctctatgtagagtgaaaatgaaagttgctcagtcatgtccgactctttgcaaccccatggactctacagcccagggaattctccaggccagaagt

SEQ ID NO: 62269 - DNA, 815 bp, Bovine  19866881592243
  misc_feature (1)..(1): n is a, c, g, or t
nttttattacaggtggattttgttgtcccaaaaacgtccaattattggagaaaatccaaaaggtccatctcgaacttcaatatgatcaaatttgcactcccaagatggttcaatagagtacttttcatcaaagtaaagttcaatgcactgtcttggggcagctaaaaaagagaaaggaagattatgtctagaaggtccttttttaaatttgtagtttgacttttcggattctatttaagatttcatctggtataataacttctatccaactttgtgacatacacagaaacactaaggacgtttgtttcagttagtattctacgggataaaatttctgtaagaatgtctaagggatgattcttaaaactgaggaggttgcccaaaatattattctgatataaaaagaccatttcaatgtctgacacaatgaacaagtcacggtatttttgtgagaggctcccaattcaggtttaaagagtggagaggcgtctttccgttacttctcccgtatcttcaggagaagccagttttccggtcagacaccacttgagatctgcttcgcgtggagttctacagtcattcaagtagtcccaatcagatgtcttggttagagcaaaatgtgtgtagaggaatatgaaaagtaactcttccagaacacaagtcttatcccatcattctcaggcttaaactcgttcagagaccctcagctataaaggaacaatcaacaggatggacacacagctttcttcgaagcctcctacagctcaccccagcaaggctcttccacctcacgaacagcccgagcccaggccatt

SEQ ID NO: 62270 - DNA, 1862 bp, Bovine  19866880123096
  misc_feature (1)..(1): n is a, c, g, or t
nacatatatatggaatttagaaagatggtaacgataaccctgtatgcgagacagcaaaagagacacagatgtataaaacagtcttttggactctgtgggagagggcgagggtgggatgattcgggagaatggcattgaaacatgtataatatcatatgtaaaatgaatcaccagtccaggttcgatgcaggatacaggatgctcggggctggtgcactgggatgacccagagggatggtatggggagggaggtaggaggggggttcaggatgggggaacacgtgtattacccgtggtggattcatgttgatgtgtggcaaaaccaatacaatacagtaaagtaattagcctccaattaaaataaataaatttatattgaataaaaaaaagcagctatttcataaaacttttaaatgtttcctttcagacttgtgtgtacatactcaatattttacagagtaaaattgtatagttataggtgtaattttgtgttctgttgcactttgctacatagtttccattataatcattatgactgtgtgaggtctgggtcttactaatattcctctatgttggtcatgaaggttgtttcttctcttattagaaatggtgctatgatgcattttctttatgttacacacctttttttttttttccctttgaggatatagtcacaaaagtggaattactaggccaaagtaagacacacacacacacgtgtgtgtgtgtgtattacgtatacacatacatacactaagtgtgtgtataaatatatatacttatgttttactgcttatattgtgtgtgattgtttatgcatatgtgatatacacatgtatacatatatatgaggtgggaagtgagaaataatattactacgtaaattttactttcaaatgtaaacagtagatgtgaaggaaattattaatagtagttggtatagtcaatacctttaatccaaagttctttttcagaaaaactgtgatgttttctttagaaaataagattaggataatctagttgactgaagttatcaagcacacatttttgtcagttaaattttcaggcaaatagagtatgatgaaatatacttttttttttttttttaatatactgattattgagaagactctccacagctgtagagcctaagggtacacatctctgaaagcagagtataagaaggtaggttgatctgctctgtaggacacgatgaagtgtcatgtaaactcattctttgaaagaaattcttatgcacttgtttccttaacgtttgtctctttaaaatagatgcagaatgtgggataagatgattgggttagcttctcgcacagttaggtaactgatacatgatttcaaattctctagtggtagacggggagatgcatgaaagaaatttgaggggtttgccatgacactgatgagctaggaatgactttagtgataaccgagagcttcattttttttaaggctcggaagctgtgtgcttggtagtttagtttgcactttctttctttttatgaatgtacatatttgaagtcttaattcaccgcttctttacacagtttggcctcagtttcatattttactccttcacaggaatttgtaatcagcatatattgcctttcttttatagttttatgacctttgtgaactgttcagaactggaggtcaggttcctgacacaaactacatatttatggtatgtaaacaccagtgataacaactacttattttattttacattttttcacctacttattttaaatggagatctgtcttactacatgtagattatataatactttcattgccatgtgacagtcactatttaaatatgtaaaaagtattcaatacttcgc

SEQ ID NO: 62271 - DNA, 2516 bp, Bovine  19866880366967
  misc_feature (1)..(1): n is a, c, g, or t
natcttggagctaagcacaatgcatgtctccccatgaacattttagtgtctctgcacggagaagggttatctccttagtattcaatctgagatggaaacatggaaggaagattggtccgtttcttaagaccacacatttcaggattgtgtcattacttgaactatatactccacaggtactccagcggaaagtaacaggggcatatattttattcaaacagccacatgaactacttttagtgtcagagtgagcctgaagagtaatcagcccaggccaccgatgtagatttcactcaatgcagtcctgtgttgtaatgtgttcttaagtttgcatgctatgcattaaaagtaacactgtgataaggtcttctcttgagggctggcttgtaggtactggccaatggattaaataatgacaacaaatggcaaacacgctgcctctcgtcatgctcaggcccagggcagacatttttaatcaatcaccgagttgacgttgctctcagatccagcctgagatgctacctcagcgcaatgctctgggcagtcattacaaacctgactggagctggtgtaagacaaagccctctttgcttctctaaggtatgtgctactgtacttgatacttctgttaacaaaatactgtgatcagaagtgttatgattatgcctatggactgctttatgaggagagaatggaggtaaccatggaaacttttggtagaggttattttataatcttacacaataatgacatggatggaattcatggtatatgttcagtgatatattcttttagtgatgtggagatggtcaatactggcaattgagaaggtgaagggctcaagttagcacaagtggcatgactatcaaaacacttctcagcctgagaccctgtgctgggaaaaccaggctgacctgcccaatcagtaaaaacaagccttggacaaagaaataaggggcaagaaagtcctttgaatactgtgagactgcatttcccaaaccgcacaattaagaggagattctgagccaacagatctgggacgaggccaggagttggtgattctgatacacggtcatggtaggaactgctgctttacagtagcatgtaaatgacaggccttccctgtcttgattcttacatgggtttattggcagccctgtggctggtgtgtcataattaattcagtttctataagccagataacaagaacttattgatagtatactatgggcttcttagatcatggctggcattcgccatctgatccttttcttaactttttgaccacatcatgtggcaaacgcaattttagttccccaaccagggatggaacccatgccctctgcagtggaggctcagacttaaccattggaccatcaaggaagtctaccttttgatgttgtagagtcagtttccctaaacctacttcaacctgccagccttgggatgtttgggtagcaaccatgtcttagcaacccattccagtatttttgcctggaaaatcccatggatggaggagcctggtaggctgcagtccatgaggtcgctatgagttgggcgcaactgagtgacttcactttcacttttcactttcctgcattggagaaggaaatggcaacccactccagtgtacttaggctccttgagtacactcttgagtacgctccagtgtactcaagaacttcttgcctggagaatcccagggacaggggagcctggtgggcttccgtctatggggttgcacaaagttggacacgactgaagcgacttagcagcagcagcagcagcaacatgtcttagtgcctgatcctgcagtcaagcgtacaggagctcaagttaatggaaaaaaatttcaacttagcataagttcaagcaaggtctacccttaaagggcatctgtgcttttaggcccaacatggaagggaagcagacaagatgaaaacaaaatccaaaaacgtttttgggaaatataggaacggtcaggcatgatggccttgtctggtgagttttctgggctggtagagcaaggatggcaaacagatttcagcctaagaaccaacaccaactgattggtgggtgctgcttctgggctgtgttggaaaggggtcaggtctgtgccagagggaagaggtgcagtgattggtcagcactgtgaatggaggagggtctagcagcacacacgctaccctgacactgacctccagatgctaggggacggagaagagtaaaggatgcagagcatgtttggaatgggccaactagaagtaatcacttccttggtgaagggacactattaatgaccaaggtgtctgtcatgtgatggactggactgagtgtacgggattgagtttcagtcccagttctgctactgggatggatatcctactgtgtatgtgatgactgagggggagggcaagacagtacttgttaagtaacagctaagtgccagtaagcactaagtgctttatatgcatcacaggatttcattaatgcttccaaatgtcagttttctgtca

SEQ ID NO: 62272 - DNA, 1105 bp, Bovine  19866880418969
  misc_feature (1)..(1): n is a, c, g, or t
naacccccagagatctgaattcttccgcacccctttcctaccaccctcagggtaaccctgtcattgctgggactgcttcctggtctggcctcatcgcactccaacaccctctggtgccacagaccagcccggggcaccgcacacacccacctgtccacaccggggatgtcctcgcttgttaacttgtctctaaaagacttgcccatgctggccctccagctcaacccgcacctccatgggacacattcctagacgtcttcccacacagtgctcggccgtcagagaagcccgcctatgtgtcacaccacctgcagccgtgtccacatcccccgtggctgtccttggggccagacgtgccaatcagattccctcctccaggcgcctgcctgtgtcagccccacgtgacactctccctggccatcagggcatgctgtccttgggttctgggagacccctgtggccctcccagaaagtcctctttctccttgagctgttctgaagtgggtttccgcttctggcaaccaaaggagcattgctccagagagatgtgcagtcacagctcagcaaacattcccagaccaaggggcagctggtgacacctcggtcccagaggcctcctgctaaccagcctcagaaacaacgctccccccgtctgctctgcagactttggtgctcctgagactaagattcagcatatcctattaggcgttctcatccgctgtccttttaattgaagcagtggctggtcatagttattaattaataatatatcacccatattactgtaagttcacctctttcccggagaaaccttcttggaaactttatttacagtagctaattcttcagatctccccaaataaactgatatatgctgaatgtctggggccagaaaagtgaaagtgccggtattttatcctggaaacatcacggtgatatactcaccgtgactataaattcaatattgaaaaacctagctaataatttctgaaaaacctcgctttcggtcacttgacaaatgtagcctggttctcaatcgtggtactgaaatgttagaattcttagctgaaagttcatcattttgtgaatgtataaattacctgtt

SEQ ID NO: 62273 - DNA, 1650 bp, Bovine  19866880425654
  misc_feature (1)..(1): n is a, c, g, or t
nttatttaatacgagacgtatagtagttccattacggagaatttccaaggtcacaaaactcaactgtggctgggaagatagggaggagtgaaataaaggcagtctcttctcttttttttttaactgaagtatagttgatttacaatgctgtgttaatttctgctgtatagcaaagtgatttagttaaaattatatatatacacacacatatgtacatacacacactcattttttaaatattcttttcctttatggtttatcataatacagggcagtctcttttcatgatgatactaaaaagtctgaattatgttcagtaaacaaggggaaccacataaggaccttaagcttgagaattacaagatcaacttgcacagtatgtgaatcaattacagattcaaggtaaggaacccagtcaggaggctactctaagagtctggcaatggggtaataagagttaaacaagggttactgaaaagaaagtaaatgtaagccatatttgtgatctttaaattcccagtaatgctagaaaaagtaaaaagaaaaaactgaaattaatttgagtaatagtttatttaatccaatatatctaaaatattatttcatgaagtaatcaacacaaaaattactaatgagaaatttgccatgctctttttgtactaatctgaaatttggtgtgttttttaatacttaaaatatatgcctcaccttggacattaagtttttcattggataaatttgatctgtatttagatttcataatttacagatgaaaaagcagattcacatatccaagttgttccagatataaacattttccaataattaagtatccatttttaaatttaaattaattacaactaataatattaaaaattcaggttctcagtcatgcgagccacattttggagtgttcagcgccacacatggctaccatattgcccagtacaggcctaaagagtgacaagggaactttggctactgacgccttccaccatcagcatttcgtatctacttactgttaaggttttccaggtattaacatggataacttagcaagtactattacagcgggtcctactggtcacatcctcactactgtagctttctttctctaggccagtgccaacatctgtgaaaaaggaatcttcaaagactacacagaattgctatcaagtacctgacacgtggaatgtgctcagaaaatggaaccgacgcacgcacggaataatgcacttgctgcggactattttgtatctattttcctgtggttcagctgtttattacactctatgtacaatgaattttttaaaagttacctattttcaattatttatttattagaggcattataatgttaaaagcttcagctctggagtcagactaagaggattcaaatcctggttctatcattgattagatgtatgatcttggggaaatgcccagtttctcttgtgtctcagttctctcctgtgtaaaacagtgtacacacttccttggggagcttcaaggattacagaagataatacaaataatcacctgcacatcgtacctggcacatagtaggtgttcaataaaccttagcttttaaacagagctggtgaagaagttaaattacggctaatgtaaaaaaaaaactaggacttctca

SEQ ID NO: 62274 - DNA, 1439 bp, Bovine  19866880535483
  misc_feature (1)..(1): n is a, c, g, or t
ntgatgacgaggtgaaccgctccaggaagagtggctgctgggcagcctccacctgctgtcccaggaactggacaatgaaaggagaatctggggggccgcccccgaggtgatctgccagagcccctcactccacctgttctctctccctgcaggtcacgcaatatttaaactcacgtatctaagcaatcacgactataaacacctctacttcgaatctgacgccgctaccgtcaatgaaatcgtgctcaaggtgagtgttccttcttggcccaggcccggggtgtgcagggctgcacgctccccccctcgcacccccgtcccacagcactgatgaggctcccgggccagttctgcagagacgctgcgctggcttacaggtcgcccggctgttgcgcacccaggcctgggccacatcgtaagtcagctgctctgcgctgaggggctcccacccctccagtgtgtgactctggccagtcatatcacctctctgggcctctgtttctcctcctgtaaaatggggatcatgttagctaccctgctccaccccaccaaagggctgctagagagaatattaaatgagatgcggtgagcctacctagctaagtgatcattcattttccttttaagagtagacatcatccaagtattaataatagtagtacaagtactaagatctactgaagggtccaaagtgcaggatctgagccaggcacttgacctgtcccctctcaaggagccttcacacctcggtgaggtagtgatataaaatcattcccattccctagatgaaaaccgaggctcaggggaaaacactcagccaggattgggacttggcagaaccgcagcctgaccccaggtctgggggattctagaacctgtgctcctaaggccccaggtgtgcatggcattcaggaatttaaacaggagatttcggtgaaatgaattgtttcacagaaacattttgagtttacaaaagattttcaaaagtggtagatgagaattaaaaggataaagctgccaggaggagaatttagagccgagacaagagtattgtaaccagttggatggaaagcagaggatttgtagactaccccaggtcagagcccatcagaatagccagcgggcggtgcctgcctggagtgcttgaaaccagtgatctaagagttacctgcccacgtccccaggccacccagggagctcatgccacactcaggggccaggtagagaaatactcccattaccccgtcagggctggcctttttttttatagccaacattaaaatattcaagacttgagaaggattctagtaaaattataatcctgtatttgacatcaaaataattttcacaacagcagattgatgacagaaacacaggtttatgacttcagtgcgagactgcggaagaacaagtgcagagaaatcattttccaggaccaa

SEQ ID NO: 62275 - DNA, 1496 bp, Bovine  19866880597641
  misc_feature (1)..(1): n is a, c, g, or t
ntgcccttgagggcgttgtctgtggagagaagaccccgtgttcacatccgaagcagcacccaccactgcccgggatcctcccccaggcccactgggctgccagcactggggccatgggggagaggaggggctggcccctgaagagtgaaaagccttgcaaagtaggaagtggagagggcttcctggtcggcagactggctgtaagcccctcaggcgagtggcctcggtcaagtcccctgcctcagtgggcctcagcttccccttctgtgaaatgagagtcgtgaggtctaccacgtcaagctgttgtatggattagagaaaaatgtataggagacatttgcacagatcctggcaaatgtgaggcgccggacctgagacccctttccctcctaaagaaacactttgtaccagtgttttcatttcctggatccaatctccggaggcagaaagccctgctcccatgttacagacgttgtctttgtctggacccaccctctagtctctctcatccgggatttgacaccgcaggtagggcaggccaggtgtggccagcttcccatcccctctggaccccaggtctctgtccccttgttcatctcctaactcccatctctcagcttgcttgccctcccttcttcttccacccctgctggcatgggctgtactgaccggaacttcttcagctccatagcactggttggggccctctccggtcatccctgacctgcgctcccctgggttggaatggctggggtcagggaaatagttggaatgggtagggaaagcagtaagactccgtggcacagagcagggaacgaaaatccttcagcttactgggctctagtcccattaactcgctgcaaaagctggaggtggtcacttcacctctccgaacttgtttcctctcctggatcaactgcgacagcatgtgtgcaaggattcaaagctgtgataccagagacagaggaatcgtgctgtcgttactgtagtggcagggctcccagagatgtcctgaggctcatgtgacttctaccttgtctcttcctgctgggcttcccctttgctcagggtgtagccaggccccactggggagcagcccctggtctctagggaatgaaggcacaccctctggccagcaggcctcagccgggcccaaccttggcacccagccagggcagggcttgttcccacaggcctcactggaagagtcagatgcctgcagctgttcatgggcagggccctggccaggggtcagcggctttacacggtggccaggctgaactggcaggactcagagctgacagctggcaccaggagctgggagaagaggcccctgagatctgagagaccaagaactgaggggctcttgggagactggtccctcacagttccactcctggcccccttgggcatgggctaggcagaaagcctcagtggaggaggtgatcagcaggacccaggaaggggaagcaggctggggacacctctcagggaca

SEQ ID NO: 62276 - DNA, 1418 bp, Bovine  19866880714391
  misc_feature (1)..(1): n is a, c, g, or t
ntgaacggaggaaaatccctcgtctgtatttttctgtcttttaccaaaacgtacctgggtgacaaggttaaagcatgcagaggaaatccctgacgcttatcatccaccggcattactgataaattgcgtggtgggggaataaaggattaccttctgtattttttcattacacttttcttttgttacagaatacataaatccattgtggcacaatgtaatatgtatcaccatgctacacctgcggatgcttccgagcggctgccatgtctgtgcagtcaggaatgataagtgaaccacccgtgaatgttaacgatagtgatcattctgaggtaactcggctctccatcttcctttacagcctccgtgctgcagccagggtagcagggttcatgagaggaaaatgaaaacaacagtggagggaaggggcaggcttggcgcggaatgtgccttctcaagtgtgcgggcgctggcgcaggggctcggcagcggcgaaaaccagcaccttttaaaggagaaagaggttgtgacccctgcgtcctgcatgctcagccggacttaatgaaagtttctttgggtcagcctcgcactccacttgctcctctcctgccagacagaacgcctaccttggatcctgtcccaagtctacgggacttaaaatgtttctaggacaccaaggggactggatcgaggtgcttcttagaatccatggaggtgcaactgttatgtgatgttcccatttaataaatggatatggaggcttgctaccacaattttcagcttgacttccaaacagtctgggttttatgcctcatttcttcatatccagggttttttatgggctttctaaaatgtctattgaaatacatcctttaaagctgcctttatttaatgttgggcactgggtctgagacggaggagaggatgatctcggggggaaatgtgtgcagcaggcaggaaggtgccagccctgcctcccttccacacagcactgtgttccagtctcagggtggtgacccgtgctggggatgactcggccttggacagacaggcgggtggatggacagatggatgggttacaaacccactcttagctcagaaactgctcctccctcatggacagatggcttctcttctgcccgtgcagggcattctaggggcgggcactggaccaaagcagctgcccttccacggccccctgggctgctggtggtgggttcaggacgaggcgccacctcagggagctgactgaatgctgccaggaatgcttcagtcagttccaacttaggccctgtcaagtctcgtaaccactgaaaaaaacatatgggcattttaaaaaaagattactcacttgaggaattcagctctgtcccagtgcaaagccaccggttaccagaggcaagtttttatacctgcattaa

SEQ ID NO: 62277 - DNA, 1174 bp, Bovine  19866880726709
  misc_feature (1)..(1): n is a, c, g, or t
ntggctgtaccttaccagcaccggttaacctgtactgcatccttaatctgtaactgctactgttctgcggagaaggcaatggcaccccactccagtactcttgcctggaaacttacgtggatggaggagcctggtaggctgcggtccatggggtcgctgagagtcggacatgactgagcgacttcactttcacttttcactcttatgcattggagaaggaaatggcaacccactccagtattcttgcctggagaatcccagggacggaggagcctggtaggctgcagtccgtcgggtctcacagagtcggacacgactgaagtgacttagcagcagcagcagcagctactgttctgagagtttgacattaactccgtgttctctaaacctcacatctgctttatgaggagctttagctccaatattgcccctatcatatactgacgaaatcatccgtcggtgatgggcattccaaacccaatcggtcaaacaccagaacttgaatgcttggctccttcacactgttggcttcacccagtccactcccaaactcttattcatctttcaagatcctgttcaaatatcctctgttggatattcatatctcccaccagggtacacctagatccccagtttgtcctcttactgctgttgagttctctgtggactgtgacaaatgatctctgtgtgattgccacctcactactattccccagctccagaggggaaggggagtccttagagtaggggcgggaggtggggggtgttgagccggggaaggagacagaggaggtgggtcttctgggccattccttcagctctaggttctaagatgagttaggatcagatggccttcctagagccaaaacttccctttgtcacagacttctggaggtagtaacttccccttccctggatatccaatcaggagctaagtggcactgcagaaacctctggaaggcctctggaaggggttttctaagttgactgtcaaagatggacagaaaagttcagtcaaactctcagcccttggaagcagctcctcctcttccttcagagtccagctccgttgtcaactgccacacaaaaacctttctagatcttgactggtcaaatccctgtgttctcactctcatcattataaccccaactgctgagggcaataatcgctgag

SEQ ID NO: 62278 - DNA, 797 bp, Bovine  19866880743148
  misc_feature (1)..(1): n is a, c, g, or t
ncattgaaatctcttggcaggtgttctctaagctttaactcttctcttatgcaaactaacccctaagctgagccctcctggctttatcacactgagccttgacaagaaccatcattagtgtccaagctccactttttccaggctgatgacatgtgtcagaccttgactcctgatgctacttctgcctgccaactcaggaaagacttctgtaatggctttgggttttttgaaatactaaagtcacatggcagcagctgacaccaactccctcctgaggatggacacttggccaggagcccaagctgaagtcgatttggaggttcttgatctttttagaaataattcctaacatcccactggcaattaaaataaaatcctccccagagaacagccaaaggtcgggcaagcctcttccatccataaaataagtcacctctgattagagaaaagtgttcaagtatagcagcaactgataaatgtcagagcctggagggccttcacagagttttgataacttacagctatttctcatttcataccatggacggttttaagccaacaccactcagcattgcttacttagtcaaatggggcaagtcagcataccaaactcaagtcaatggtcctgtttgcactagttctgggttcatccctaaggctaagacgtttgacctgtcaggcaaatgacctgaagtgccctgcagaatgcccaagaggacattaggaaacgtctgcaaaaagctggctttttcacggggagaagttgtgtaaataaataagcgaacacacacgtgcaa

SEQ ID NO: 62279 - DNA, 3219 bp, Bovine  19866880768035
  misc_feature (1)..(1): n is a, c, g, or t
naagctgggtctgacttctctgcgtctttgctggccttgttacatctctaattagctctattcctaacacatgaaccaatgtttttaatttttaaaaatgctttaaaatacatgctgactgcaaaattgggtatgtatatatgtatatgtataagacataagcgtctgcttactacccactgcccccagcctcactccttacagggactggttgtgaacagtttaggggtgggtgtccttctagtgacttctcctctgaaccctattttccctttgtaaagtgtaaacagtgatgcttggtccaaggggctctgtgaagggaggtgttgctcagtccaaagaggcaaagtaaacagagtgcctggcctggatctcaaatataataggtgtgcaggaaatggctgcttatttttcagcggttaccaataactccttgtgtgattgtgccccttcaagcctcagtcacccacctcggtctccccagcttgcagcccagggtcaaaccccatttactgccctctcactggatccagaagaaattagttctggcccaaaaaatcaggggagatgtagaggaagggatgaaactcccagaacttaatggcctccttggggtgactgatctcactctgtcttcagcatggggtacaatcccattttttgcaggcaaggagaccagggttggagtgtggaagtgacttagtcaagaccacctgactagtgggcacaagagccagaatggataccaagcaggtaggtcccttctgccaagccactctgatggcaagtcagtaattcagtatcctaaatccctgtattaggataggcccagtggaaatcttgaaaatgttttttgaatgaaagaataggtgaatgaatgaatcaacggctacttgatcaataatcaatgaatatcatatatagttaccatttgtacagctttggttttcttttcacatccctcatttcacgtgattttttaacagtaatactacctgctaggaagcttcatctctgtttcacatatggggaaataggtttgttttttctttttggccccaggccttagcatgagaaggagacagagctggaactcaagcccaagttggctgaagtcagaggccacgtgagccgtttccactggccccgctgccctctccacagtgccggggccagccctgggagctcctgaaaatggcgtgctactgctgttgctaagtcgcttcagtcgtgtccgactctgtgcgaccccagagatgacagcccaccaggctcccccgtccctgggattctccaggcgagaacactggagtgggctgccgtttccttctccagaaaatggcataggtcaggactaaactaagtgctcatagatgctgaaacactaggcgcttgcactgatgcctggggaagggatacggggcctgtctgctcaggaccgtgtgaatgatgggctttgggatacttgcccaaattctcctggatgcccatcctatcccagctgggtttggtctccctggagccctgcataggaaggctccagaagaagtggacacccagctctggtctctctgtgtccttcctggctctgagggagaagggttggaggaaagggtggggcttgctcaggtcctgaggcatctgtgaaggcagttgaccaagattggcatctagtggacgaattcccacctcctgaggttttggggggacatgaccctgccctgctcaggaagtcaaaactgggggccctagaatcctcttccccacctgcgctgggagccatgggcttggcctcaggtaggggccagcctccgcctgctcaccctctcccctttccttccttctttgtttctgccctccacccccactgccttcctctcaccttcatccctccctctggctctggctgaatcctgcccctccacccgctgagcctgctacctggctctgccgggtctgagagctccgggaggagggcctggccccctcgggccatcagggatgtcttctaggcaggcttcaaggcctctggagttaaggaggtatctgccaaatgcaaatcagggagaggatctgggagggggaatggggtgtcgggggccctggaccacccggggggcatccacaggaaacagaaatgagagctgagaagaggtgaggaaatgcgccttaaatgccaggctaaggggcttcacatgcccagaccagtggttctccaagtagatgtcatggaacccagagggtacaagaaggagcctcagaactccttggaggggtgaaaggtcaggaggaggagacccaggggtggaattctgggcccctggccccactccagccagaatgactctaatttcacaatatttacagactatgcttgggaagcagtgaaaggcattcagcgggatgagggcgtgagacccacctgggctttaggaagcgagtgctggctgccagagaggaagaactgggctcatacaggcctcctgaccttttctcctcacgtcaccaggaggtaataataataatagcaacccgatcatcccagtgccagcacactgcgttacctcatcaggcggagtgggtacctgtgccggtggggagcttgagggctcgggagaggaagagactccaaaccagggtcaccacccagcatcaggggcagagtcaggatgcagacccggggtctggtgtaccccgggagtgcctgacccccaggcagcccagagcagctgtggagcagctgccatgggatccgatctcgggctagagccccctctgcccacctgccctcccaactgtctcagccacacctggcacgcatataccctgtggaactctgaccagccttgtgctgccctccaaggagacagctggaaggtgggggttgggagacaggagtagggtgggggccagaaagcagaagcagctctggcagggcagggagagactagccgcctctacttgctgtgtgaccttgcgctccttgtcaggcctctctgggctagggctgctctgagccacctggagctggggcttcagggtgagctacatggaactggtggcttcctgggttcatctgttcatgcctgaaacagcacactgggccccacggggtgccaccacatccttcaccccagggccagagtgctgggagctgaccgcccgccggtgagatcccaggcctgtgtctcagcttcctcatcagtacattgagagggt

SEQ ID NO: 62280 - DNA, 1358 bp, Bovine  19866880819723
  misc_feature (1)..(1): n is a, c, g, or t
ntttgacttttttttaatatatgctgttgaaatgactagggaaagaagtatctgctgttttcaggtgagaagacccttaatttagtgttgtttggtagagcaaggactaaaatctgttttttgtctggcactctttcccattaaaaatgccttctgagctggcttctaaaatacaacaagcaaagttcatactgctataaaatagacgaaattcgattaacagtactagtaacttaattcactgctcttttcagatccagtaccacccactttaagttgatagagtgcccttgccactgcagacttaaaagtagaaatccaaatgtactaacgtttatcagtgacaactaacaatttttgtgtgtgtgacttctaggtgaacgacccctgacgaaagacaatcaccttctgggaactttcgacctgactggaattcctcctgcaccccgtggggtcccacagattgaagtcacctttgagatagatgtgaatggcattcttcgagtgacagctgaagacaaaggtacaggcaacaaaaataagatcacaattaccaatgaccaaaatcgcctgacacctgaagaaattgaaagaatggtcaatgatgctgagaagtttgctgaggaagacaaaaagctcaaggagcgcatcgacacaagaaatgaattggaaagctatgcctactctcttaagaatcagattggagataaagaaaaactgggaggtaaactttcctcagaagataaggagaccatggaaaaagctgtagaagaaaagattgagtggctggaaagtcaccaagatgctgacattgaagatttcaaagctaaaaagaaggagctagaagaaattgttcagccaattatcagcaaactctatggaagtgcaggccctcccccaaccagtgaggaggaagcagcagacaaagatgagttgtagacactgctctgctagtgctataatattgtaaatactggactcaggaactttcgctaggagaaaattgagagaacttaagtctcgaatgtaattggaatcttcaccttggagtggagttgaaaatgctatagcccaagtggctgtttactgcttttcattagcagttgctcacatgtcttggggtggggggcaaggaggaattggctataatcaaaagtgggttaaaaaaaagctgggttagggcgtgtgttcaccttgaaaatgttctatttaacaattgggtcatgtgtatctggtgtaggaacttttttctaccataagtgacaccaataaatgtttgttatttacactggtctaatttttgtgataaagcttctaattaggttagtcatttaaggttagactctcatgtgttggga

SEQ ID NO: 62281 - DNA, 820 bp, Bovine  19866880879206
  misc_feature (1)..(1): n is a, c, g, or t
naattaaagtgtaattagcctttacgcttttatattcattaactcttctctgttaatgatgctaggctggagcagaagccctgcattacgaaaccacatccaggaaataaaatagtgatttagataatggccacaatgcattgctacttacacataattaaacaaatgctccatttaaacttggaaacatgactgaatgttgattaaccctcgcccagcaattctgctcggaactggggaaggggaggcaccgtgagctcatccgtaacaaagtgtctggaccagtcacgtgtgcccactacactgccagccatgcccaccagccccacctgtgccggctgggtggctacaggtctcatgccaaggactgtggccgtggatggaggtgaccgtgaaagttatcccgggaccacttaagaaaccacaacactaagtgaaacaagccagacacaaaaagacaaatattgtatgattccaaatttatagaaacagaaaggagaaaggtgaccacccaggggcagaggctagtgcttaatggatacagcatttcagcttggggtggtgaaagatgttgaaagattctggagatggatggtggtgatggttacataacaatgtgcacacacttaatgccacttaactgtatcctttagaatggttaaatagtaaatttcatgtataatttaccacaattttttaaagcttatttaaagcattaggaaaaaagggaaaagtcaccacaccccaactctactgcccacaaatacgaaaagtctgaatttcaccttctcagagatcaattcacaggttcatcacgact

SEQ ID NO: 62282 - DNA, 1850 bp, Bovine  19866880882823
  misc_feature (1)..(1): n is a, c, g, or t
ncatttattgaaataaaccattggttatgcttctaaagttttccattgatagcctttctcattaagtatattcagcctattaaagagtagccttaaagacccatgtataattatgggatatgagcagttattttaatgactctgtaatttatatcatgaggatatagcatatctaaagcagccttcaattaattagaagaggctatttaatctacatgtataaaaatttcaattaaaacatctttgctaaacttcttgtccagttttattatattttgtatggttcaattgattgaaacatccttgaaaatagttactgtgttgaagtggtaaaacactgattaaggatttactctgtatcaggcatatgctaagtattttgtatatattatttcatttaatcctcacagcagcctgtgtgtgatataggtagtgtcactggtttacattagttcacagatgtgaaaatttctctggtggctcagagggtacatcgtctgcctacaatgcgggaaacctgggtttgatccctgggtcaggaagatcccctggagaaggaaatggcaaccccttccggtactctagcctggaaaatcccatggacagagaagcctggtaggctacagtccatggggtcgcaaagagccagacgcgactgagcaacttcgctttcactttcagtcctctctactggggttaatatgacctacttcagtgtgtcatgaggattaaacgagatagtacatgcccaccttgaagtacatactccagaaatggtagctgctattcttgctttttttgatttcatattttaaacaggtagtggttcttacgattcaaaaatgtaaaaaggtattacacagtgaaaagcctctctcctgtctgtcctccattcatctagtgcctacccatacccattttactagatattccagagtgtccatgtacaaatttaaaaatatattcttattttttcaccttttacacaaaatgttacatactactaacactgttgcagagcttgcttattttacttcacaatataacttggaaatctgtctgtattagtgtccagagaatttctagaatttctcattctttcctattgctgcatagtattccactgttttgaaatattataatttatttagccagttctctgttgatggagacttgagttgtttctaatattttgctattataaacaatgcagcagtgaataatctagtacatatggcattttgcaagtgtgcagttatatatgtaggataaattccaggaagcagaattgctgggtcaaagggaatatgcctttacaattttttgtcagtattgccaaattgccctccataggggttgtgcccattacactgttaccagcaatatatgagagtgcctgtttcctcacagcttcaccacagaatttatcaactgtttgaatttttgccagtctaataggtgaaaagtgaatctgtgtcattataatttgcattttccttatgagtgaggttaagcttttcatttgtttaagaaccttggcagttttgtgaacttcccagatgtattagattcttgatctgtttctaattttctaggagttctttatatattaggaagattagtccagtttattgtgtatctttgaactttgtggttttttggactatacatacgtttttttatatagtgaaatttcttatttttttctttatagcttctatattttgaattcatttgtttggggaggtatctttcatatgctctgcatatttcttaagttttactcctagatatttgcagttattgctattgtaaatggggtcttattttctgtatgtttctaattatgt

SEQ ID NO: 62283 - DNA, 752 bp, Bovine  19866880888614
  misc_feature (1)..(1): n is a, c, g, or t
nggttgatgggcagttctctttgtatagcccattatcttaaataaaatatacctaaaaacctgaaaagttatgtactatccccaaagtatctcctcctttacatctctttttctctgagtagatctcaactctttgagtcatcctttcctgaaatcttagtcatttttgactcctccttctcctataattaaaatgcagaggtccattaatttgaccttttcaagctttctcatgtcttttctctcattcaaatttccactataacattcagttatttattcattaaataaatatttgttcaaattctatataagctagcatttctgccccccagcaagtaggaattatgtggtttccataatttaacatagaaatgataggtcccattaaatacttgtgaaataactcgctaaatgaaaatattgggttgaaccataagaaattattgtttttctagggtcaaaatggtcaaatgtcagcaattttgtatactcaacaaaaatatttctgatatgaaggagaaaaatacatatcaagttactcttaaatagtaacttaatgacaagttcaagtatgttaacagtaatattaacgtgtacagtaatattaatgtgtataattaatgttaacagtaatattaacatgtaagattttctttcttcaaactgtgtaacttgacttttctctttatttgtttaccaggaaacacggaattatccagaatcatatccacagctgccaagggatggaa

SEQ ID NO: 62284 - DNA, 1315 bp, Bovine  19866880931283
  misc_feature (1)..(1): n is a, c, g, or t
natgtggaggtgacaactggatgacctggtttggggaaaaccatgacactcggctggatggtaatgagacagtaaagggctgtctccaggtaaactcgccagagcaggctgcctccatcgctgactggcccagtggccttaggcaagatgtggttgcctcccagggagcctctgtttcctcacctgtgaaatggggcgaggacaacccctctcctaacatgtgcggccctctcactggagggccggcccgccagcccaggctaggtgttggtgtaggaggggccccatcgcgcctctcctccagaaggtctaccttgaggagctcgggtgcctgtttcttgagtttctccatcttccactcgttctcgcaggggttgagtgaggagggcggcgccgtgcaggagcagcggcagtcggtgccggagctcaccgtctccaccgtgtagaagtcctccacgcgcgcccgcccgctgcgcacccggctgcacgcgtccttgctcagcggccgcatgatgcacttgcagcggcagtcggagccctccgaggtcatgcgcacctggtccacgtcgccgaacacctgcagagaggccgtggtgagctgaaggccagggctggggcgaggggagtgttccccttccctccgtccttttccttcaagcccaccctgagaggccacacacccgatgtcttaagtgtggtcactgggggcagcagaactttcagcctgcaggagtcagctgggtgagatcagtggcaggcaccaggctccagcctgctttgccctcacacaccagtagggccctgggagtcccagccagaactcccctagctggctcagcccgcccatcctgggctccaggctctcagggcacagctatttatgactcagtcaacaaacccacacctttgagctctcactgaagccaccaggacccaggcaaattcaaggcccccttgggctttctgccaagcccacccccatgagcatcccagcgtcctctgggaagggcagtaggcactccatttctgctctgagccctcagacacctgtttgaagccctggcctctgccagactctgggtaggagctggaggtgcagaagaagtagacagaggggcatccttgaccttctcagccatgggagaagttgatgcagtgagccctgagatccagagaaagacacccatgaagactgctcggaggagggcaccccgggggacatttctaagcatgagtagaacagtccagggagagcaagtcagatgtgcaaagacaagcaaggactgggcaccttgggagcctggaggaggttcat

SEQ ID NO: 62285 - DNA, 1619 bp, Bovine  19866880935084
  misc_feature (1)..(1): n is a, c, g, or t
nggctatgctgctgctgagtcgcttcagtcgtgtccgactctgtgcgaccccgtagacagcaggcccaccaggctcccccatccctgggattctccaggcaagaatactggagtgggttgccatttcctcctccagtgcatgaaagtggaaagtgaaagtgttggttatggctgttgatattacaaattctatggcttctgattgggaaggagtaaagtctcctatgttaatacctcatgacttttgcgcattagatggaggacagtagggttttctttgtgatgaatctttggaatttagaggctccagtttctcccttactcctcaaattcctgatagggaaggcctgctcattcttgcttattttgaaccaagaaataccattgttgctgatttcccattttgcttgtcagtggttgtagacagcaagtttgggacatgtggtatgtactggaactggatgaggaaaaccaattttgtccaattcatatggcctccgcctcccttttcagtggtagagcagatgggtagccatgcttagaatatgggcagctgttcacactctggccgccttcctatgattcctgggcttcctggagtccaatgttacggcacaggttcaggctaagttcatttctacaagaagcatctctgtaccctgcctattagcataagctagggacaagggcagtcaaaggtcaagagaagttcaaaacagcataacctttctctgcttctgtttccaaataaccccagtctgccctgctccccaagttttttttctcagccatcatgtttactgtgtagttgtaaaactcaagagaacaacgactgacttgatacaagggaagttagagaatagaagtcattgttgcttaaaacaggagaaataattgatttatgtttgggggccaattaggctataaaacaggaacagtaaagggacctatgacttcaggacagctacttgctctgatttctgtcccacagacaaggggctccccaataaaggctgtcagctttctaggctaaattattaattcctttcatgcctctcagggattgtaaacagcacataatacaggaaaacaattgatactcttcagttattggccagatagagggtcaaagggtaaatagttggattagcaacagctgttcttcttccctagtcagactttgtcccttattacattttagcaaatccattcctggatttttggcctctgaatagttaaatccattcctcttcttataaaaataatcctataaataattggagaatggatattgaccaaaattgaaaatactgatattttagttcagtttctgtagttgaaggtgagcattctttttggtatgtgctaactggaggttgtttggtattcaaagggtgtttcccaaggaaagtaacaaccttgaagtttagacagattagtagcttttttagctgtttataccatctgcttggaggattttcctgtagcttgattaaaagacagaaattgcctttatttaaactggttggtaggataatggcatgttcattgtggaaaacactaaaagaaaaatacaagcccctaattccatcacctggaaataaccattgcttcttatt

SEQ ID NO: 62286 - DNA, 1064 bp, Bovine  19866880940285
  misc_feature (1)..(1): n is a, c, g, or t
nactcccacaggtggggcaaagagcccagcaagtggatgtgggtgtgttctgtgtggcccaggccaaagaggcctcttcctggggactcaccccataatccaacacccatccccaccagcagcggcctccacatgactgcaacattccttccctcctcagatgaggtgctacgtcctgatgggggtggccaaggccctgacacaggccaggaggcaggagtcagaagaggacctccactccagccccagctgccaggagcctggggcaagggccccacctcctgtggtcacagtgtcctgtggtgcttgactggaagcagcagagcctcatggaaagaagccaggcctgggctcacatcccagctcccacatgtcctcctcgcatggccctgacccctctgagtctcagcctcctcctctgtaaaatggggaggataacagtcctttccccataagcttgtcctgaggctgaaatgagtcaatgcatgtggagcacctagcttagaacagctgctctctacttgctactgaagttgctgccaataacccttttgcacgtttgtacgtagttttctacctctgtgctctcaccacaaccacacatcttggagaggagaaatctgagtctcagagaaggtgagggatttgcccagggtcgcacagcacagcctgactccaaaatgtagttcccatgcaagtcaccaggcaagggcttctccacagcaactgagctgggagagagatggtggccctggaaggatcaggcctcggtcgggcaggggaaatggatctgatccattttgccctcagtctgcaggctggggttactgccaagcaggaaagtccctgcctgagcccccatctttccctgcagcctcactcagcacacactgctgctaaagcccccaggagtgtgggtggcttgtgcttaaaaagatccccagctatttgcaaggaaatcccacagtaagaggccaagaaggcatgtttgatatttctgaagagagatggataaatcggccagaatggggaagtggggtttcaacctagaaaatttctaggaa

SEQ ID NO: 62287 - DNA, 1638 bp, Bovine  19866880974169
  misc_feature (1)..(1): n is a, c, g, or t
ntggccttgggaatgcctggttctctccccaactaaacagtaagcaattggagggtaaggaccagttcttggcttctgtgaaatccctggtgcctacacagtgccttcggcataactgccccccaataaatcaatggacttctacttttgagcagaagtagaagcctggtctgatcggctctggccctgcctagcagcttatcctctgccccatccctgctcgagaaatttggagtattgtgactatacctcagaatacccctgcctggcatgtttttctcacttatgcatctggcaaagtcctagttaatcttcaaaaaaaagttgtcaaattacttactccagagtatcttttctcagaccgctgcctcggccagcagtttttaagcactctcttatctgtgctgctttagtagctcatgtaccatattctagtgcctctctttttgagtctgtttccacgtcaggttttctacctgacttctcatacggtggctggaatggagcaggcagcactggacgacggtcactgcactaagcagggtgtctcagagccttccggagctttcgggcacacaaggccctctgtatggtgcccctgattcatcctctcaggatgttacagctcaggaaaggaaagctcagaaaagtaagtacatgatgacacatttggttttcttactctaaaatacattttaaaatattttaaaaatcaggatacagcttaaaatccatatgtacatttaatatagtagtatttatttctttcttctctcctgaagtgctattattaaattagtggggtttcagaattagtccctagtgggtcccgggaaaggtcccagaatgcatgcgccccctctaccctcacggagcttgctgggagtctttgtcttttctcttccttccatttttttttcccctttaatctaatccatgcctgtgacttccccagatggggtgaatgaatagattttgtgatggaaaaggaacttctgaaagattagcaactagtaggaagagtaaatgctggtcaaacgtagttttggtgaatgatatatttcgaatttttctgatgtggcggctgcaagagctcataacaccgttctaaaataattgggtctctaaagtggttccaaaagatttttgcttgacataaattctctaaatttccaggctttctggataaaatagttgactgtaatgccatctttaatgtgctctgctctatactcaagaagatccatcaggagccgcagagcactccagacagggggaggctcaggtgagatgaaaccacaagataaagaggcagagaaaggaggcagggggaatatttaactccaagctccttgcaggggccacttctgacttgtgagcatcttggcagtccacatttactgtatcattttcccactgggtcactggacaccaagcatcaggtctttctttcttatccaactcctacacatgagtgacatctgcatgattacttactcttttaggagggagaagttttctgcagaaattactgcccttttgacaaagaacatttaaacagtcctatttaccttttctttctcctttttaaaaagaggattatttgctacaacataaggaaagtacctgtctgtgttt

SEQ ID NO: 62288 - DNA, 871 bp, Bovine  19866880984896
  misc_feature (1)..(1): n is a, c, g, or t
ncctacaggaaaaataccactttgacatctggaacaaaataatgcaaaaccaattgggaaatctatttataggtcttaaaaatacaaacagaaagattaaacattgttgtacatctgtgttaaaaatagtcaagttcagaacactccactacttctgattaaacctaataaacttctcactttgacatctggaacaaaataatgcaaaaccaattgggaaatctatttaaacgtcttaaaaatacaaacagaaagattaaacattgttgtacatctgtgttaaaaatagtcaagttcagaacgctccactacttctgattaaacctaataaacttctatttcagtagatgaagaacttttggaaaaaggttactggcaaaagttaccttttaaagatacgtcacagttaccaaggggaaaagatggggggcagggatggataagttaagagtttgagattggcatatgcacactaccatatatggaatatatggtcattagggacctatcatatagcacagggaactctgctcaatgttctgtaataatctccatgggaaaagaatctagaaaagagtagacagatgtgtatgtgtaactgaatcacaactaacacaacactgtaaatcaactataccctgatgtaaaatttaaaattttttaaatgaaagatatgtcatgaaataatcacaaataaaataatgtctggaacatgcctaaacataatcacataatcaggagaggggatgaaaaggtgggagaagagatgaaacaactggccaggtgtgtatgtgtactgttgcatctgggtgacgggtaatggtgctcagtgtactgttctctcctgtattgtttaaaggtccatatttaa

SEQ ID NO: 62289 - DNA, 1670 bp, Bovine  19866880994658
  misc_feature (1)..(1): n is a, c, g, or t
ntattcccagtgttaacactgtcgatcagggctctagcaggaaacagactcaagttagggattttgaagagtctcacagagacttttcaaagctgtgggtggggtaagaaagtccacaagagataatgtgctagaagcattgggcataaagggggcaaaggcatagacaagaaacacagaaagagcaaccatagctgggggtgaaccaaaggtaaaactaagctgtgacctttggccatgggatgcaatcaaatagaagggacctcacgtggagatggctgggggaatacacttctgatcacactcttccacccagttcttttggtgttccccactggcgccctcaattacaagccagagggcaatggagccctgctgatgcagtccctatgggccttcagacacacagagaaaggcaggggatgggtagagagtacaccaagaggggcaaacaacagacatccagcacacccaccaagaaaaacgaagacaagagctttccaagtcagtgtctaatcacctggcaccctgctgccaagaagtggtaccagtgtactaggtactggagaaagcattttccaagccccagagaagaggccaatattcacaaggagacaaaaataagatgaactaaccttttcaagctgatccactttttctgaccattcctaaaacaaaacaataaagaagtacagtttccaggcaagagtatcaataaaatcaagattttcagaaaacaaaataaccctccccaccccacccaaagcaacatatcaatcaaacaaaacagcacattaaaaaaaccacgatgttggcttaacagtaagaaagccaagagtcctaaaaggagaagaaaatgaattttatataaaattctagagcacaaatataagccagaaaacttctaccaagagcacataaagctatatagctcttctgatgcagctttcagcttctttctgagtctctgtctctgagtactattattatttcttaggagttggtagcagggagcagctgagttggtaactctgcagttgatacttaaaaattaatttactgaaaaagaggtgaacagcgtggtcttcaggagtccctgatcattattttccttctcattttaatttttaccaatatccttcttgccatctggtaaaagttaaagaagaaaggattatgcctcttattcaccaatcacagaagaggggaaaaaataaccactgggacaaaaggctgtatcctaactgcctacaatcaagtccaccaatgctagattatttcttcatttacattcacaccacagttattcactaagtattgctgaatgatgttttctcctagctggttaatgtctgagatgactactacacactgtaaaacaagccaaccaaccaccccacttactgaagatgaaataaattatgtgttttcttcaatgcaatgtaatataatacattgaccccgtcttaataaatcaaaattatcattataatgcaagcatgctaagtcccttcagtggtgtccgactctgtgcaatcccatagacggcagcccaccaggctcctctgtccctgggattctccaggcaagaatactggagtgggttgctatttccttttccaatgcatgcatgcatgctaagtcgcttcagtcgtgtccgactctgtgca

SEQ ID NO: 62290 - DNA, 1162 bp, Bovine  19866881020101
  misc_feature (1)..(1): n is a, c, g, or t
ntggatggataacaagaaagtaatctggctatgtttgtcactataaatttcatgtgtttgcaatgctgttaaaattttttaaaattcatctctgaatggtatgggaaacttaccaatctttgcaaaaggtcaccaacttcaacacaaaacacttgcagacgcagaaaaaagcccttcggatgaggaaaatatcatagggtaatagctaagggctttgtgtcgaaagagacttgagttcaaactgaagctgcattgctcatgggctatgtgagttcagggaataagcttcatctccttcacattccacttctacaaaaacggtacaattaaccagaggtggctgtgaagtttcgatgagatgatatatgtagtgcctagcatataacagaggtagaaaaataaatggtagtaatgataataaagtctgatggaaaataacttcaacagtaggtcaaccctgaagacaaatcgtggatgcatactggagcaacaaagcagcagtgaaactgggcgacatgctctatgtgccaactggagtgactgtgtctgctgtgctctagccttggggcccactgagcctcggggagtttatgaacagggaagacactgatgaagcaagcgatggacagcacagattatttactgctgtgtaaatcatcctgaggaatgtctgtgagtccctagcaccacagaggtttcaagggcaaataataagtctattgatcaaagcggaaagccaaacattggtatcagaagaattctgctttgattgtcatgggacgcccccaaatcccctcaaaacaaactcggcaaatgtcacaggctaagctctgaaagccaaaagactcactgcgccaagtgctcttctcccccagttcttgaatataaagtgtgatatcacgtattcattcaaaaagcaactgaaatgcctaggctatgctatagtctgtcctgagcactgggaacacagcaaggaaaagaacgaatggttcacccagttttacaaattaatggaagtcttctctgggtcatcatcaaagtttagcagtaaacagggctcccctaccaaacctgtaattgaacatataaggggggaattgactaaaattccatatgctaggcatgggtattgggttctctgtgcctgtatacaggaatcatg

SEQ ID NO: 62291 - DNA, 1039 bp, Bovine  19866881032865
  misc_feature (1)..(1): n is a, c, g, or t
ntctgactccacagcccacactcaagtcctgtggacttctgggagatagaggtgggatttgaacccaggacctactgccttcaggacccagtgctcccttagcctcccttgggaggcaagaagtaaaacaaagccagacctcagaccgtgggatggctcccagcacatcaaggcagaaaccgcagctcggaagcaggccagcttccaggcgggctccgagctcagctgagtccgaggaagtggctttggatggagcccctgagcgggtggaggactccccaggggcctggctggggcagggcctggactccccagatggcccaggagttggcgggcatttgtgtcgaccgagtgttttgcagtaattactgtttcctgcctccaagggcttccaagttcttacatttaatttttttaaacagctgggccttgcaacctccttaaaatattcttaaacataaaattcataaacacatattcagagatgacatctctttttgtaatatccatactctctggacattattatcaaagtctgatgttgattgcccaagcccctctggaagaaaacttgaaatatgccgtcagaaccgttaagggcatgggctcctgtccgtgaggcaggcctgtctctccagctgcatgtctccagacaaatcacgtcacctctctgagcctgggtagtgggcgttcttatcaccaggagtgaaagagatgcccagtatcccagtacacccaagtaaactacatcttgggctcggccctctgtaaggtgatgagctggctcctggtgaccagactgttttcctggaaagatgggtgcccttggccctgtctctgtgccttggcctttgctggccctcccatccttctgcttcctcacactgtgcaatgcctcatccatgctcttcaccccacccaggctgcacaggggcttgggtgtgacagtgtctgtcccacggcatagagatggcaagcctgaagcactggtggagccatagcaggcctggggccagggttcccagagcccaagaggcag

SEQ ID NO: 62292 - DNA, 1945 bp, Bovine  19866881122451
  misc_feature (1)..(1): n is a, c, g, or t
nttagaatctggatattaattggcataaaatttttaattgtccttgatttctagagctgctgcaacacaggtacatactaatttttaagctattgtaaaagtagcttgtcggtgcttttggaatcagctgcaatacatagataagtcccattctggctcttttaagaaagataattgttttaaatttatgaattctaggttctgtgttatcagatgcctctattactatatttctgggtgggtttgtgtgtttgtttgtttttcctttggggccgcatcatgcagcttggggatcttagttccccagtgaccggggatggaacctggggccctggcagtgagagctcagagtcctaactactcaacggccagggcatttctctgggtggttttattttaaaattcaaagcaaataatttaaaagcttaaaagttaggcttcaatcctgaagtgggaggatggggaggaattgcaatttggtttttctgaaaaagggaaaaggcagcggcttcacccatcccgcctcctgacgtagaggttgctctggtcactgcttcccacgtgcatgacagtctgtgtgtggtctcgcttaggtttatcttaaggaggcaccgtggccctcggcacagtcagaaatcaggacaataagtgcttacaagacgccccgggacaaagtgcagtgcatcctgagaatgtgctccacgatcatgaacctcctgagcctggccaacgaggactccgtcccaggggcagatgacttcgtccctgtgctggtgtttgtgttgatcaaggtaggtcctcgctaccacccgtgagaagagtttctttgccatcctgattcggggggttgtgcagagggtcgccaggtgttaacagactttgactcttttacaagtttccagctctgtgatacccaggaagaaagtagttaacgtcaagttatgttctgttctgaagttagggttttccaaagaaaggaagagctagattcctagatgaacattttcagctttttaaagcagtgcctgaaggtcttgcttggagctcagtaggtaattactgaatgaatgaatgagggcaggttctctggtcatgtttttaccatcttctttcatgttgaattcttcatagtggttatcacataaactactacattttcctgtcatctttctcctctttgacctcacattttattaattgtaccatattgtttttaaaagcactgacacctcttgtccttttttgactttaaagtgtcaccattcacatggtttattttgaacattttggtttggaggtggggaccctgcagtttgggtgcacaacagccagccagtatgtgttccagtcagctcagccctctggtgatgtctaaagtgtatttgacatatagcttactaattcttaatgttgcggtatttctgcagcctgaactcttagctcagagtcagaaccctgactctgaatcagtgtgcgatgagcctgcttcactcctcctattgcccgttgctcagctcccttccgcaggtgatgtgtttagtccctatgcagagccagtctaagccccttttaaggagcaggccttagcttgccctcctgatttaacacacttgagcctggaggtgaaaagcaggagtttctgtgctgcctcctgcagcagagggcctactctttttttttagtttttttctttctctgctctatccttacttactaaacagatataactcaatttgtctgcagcatttccttccttatctggaatcttgggatgttgagtaaagccactgggattagtgcagcccctctaaggacccgtgaggtcaagtgctttgttaggctagaaagctctagatagtcgagctaggattagaacctgagtcttctttccaatacactgttgctcctcacagtaacttgggtttacaaatagttccaaaaagga

SEQ ID NO: 62293 - DNA, 1279 bp, Bovine  19866881170924
  misc_feature (1)..(1): n is a, c, g, or t
ncagttgctcatggggacctgctgggggcacgtctgctaagtttgtaacatacaagaatgtctgtgtttgtgaagaaaattgactggtactgagatactcagtgggttttcttacactctctgtaaactttcttcatctttccctaggacttactaataaacaagaatttccttgtgatgattggaatattggtatcagagtaaaagacatttggaggtatcaccttttttttcctcctgggagaagcctcctttttgctattaaattttcacttaattgttgacttgggccttatgaacctataattttttttaaagagttatataagtataatggaaggtttgcatgcatttacattctccttgattttaattatcatttcctcaagtttttttttgattgtaacactagaagagatcctaattgagaagaaggtaaggggagagattgtttcctaccaaagaaatctgtgggaaagatttctcagctggataaatgattggaaaaatctgtttcccttgcctcctgccaagctccaaactgtgctttcataataaataaatggagtgcttaggttttaagttattcctgtagatgtggaaatagtaaggcattctttcattaaaatcaacatatgtattgcttacaagactcccataggcaacttccaggacagggtaactgtaaccagattagcccttctatcataaatgactggaaaactgcacagaatgtaagaaactgttctcagactttggaaaacaagcagtacaggactgtgaaccccgggagaagtgaaacaaatgaggtgagacctacgatcacctcagctttcttccagggttttccaaggagaatagagcagtctcactgagctaagagacacagatcagagttaggagaactaaaattagcaaaattgagtatggagattgcctggagtatcccagaggaacctggcaggctacagtccatggactcacaagagtcggacacgacttagcgactaaaccgctgctgccaccaagtacgaaggggagggagctataccgagagagctctaggaagaagccctgtaaagccctttactcttctgttgtatactaagctctgtgtgtctgtggtggatctcacgaatctggtcaaaaaacaactgctgggagctagaaactaacattctggccaaaactcaagtttatagctccccagtcattgaagcatccaggacatttcgtcatgactctggaaaggccatatcttaggagtaaggctaaacta

SEQ ID NO: 62294 - DNA, 1692 bp, Bovine  19866881207453
  misc_feature (1)..(1): n is a, c, g, or t
ntatttataaaacattagaagcttagagagatttatttcaacctcctcgcttttacaaataagaaacagatgcctatttcaaagaagaataaggtgccatgatcacctaattaaatggtggcaaaatcggtttccagagaactcatgtctccttacttctctttcattacactttgatcacttcagaatttagtggcattttgaagtggggagagaaaaagagaggcagctttaggtccttgactcagaaatatgccaactatagatatctagagcttccaagatgatgaaaatggcgcacctcttcatgacagtttggtggaaggaagaggggttttccagtcagatccggttttcatgttaacacaaacaagaatgagctatgtggccaaatctgtctgagttccattttcttactcataacaggctttctttgatttccttaggagaatcatttggatctcaagttattctcacctgagttcttacagaacttggctgttacttctgcatataacttaccatactgctctttttcttatttatacatctatgttctcctcaagagcaaggattctactgtctctgcattctcacttaagagtaaaatggctggcatttataaggtacttaacaaatatttgttaaatgaatgaatatatgaatgtgtagactgaatcactctacccatgaaaaaaacatattgggtattattaatgatgtgtgtgttaatgagaagaggagcagtaataggctttctttttcttgctggtcacactgatatctgttagccaaatggggttttcaaggcaatgtacatgtgtagagattgcaattcaagacaaggaagaaggcccaggagaaagagaaaacaaaagacacattcttacagttaatcaagatgtgagtaccagcatctcagtttttttatggagaaaaaaaaaacacaataagaaattattacaactatataaaaatgttcaattacatacatataaaaagactagaagaaaagggaccaaaatgtttataaagattatgttaacattcaagcaatgagcacttttttctaactttctatattttccaaatgtcccacaatatatatgtataactttcagtttctttataaaatccatggaattctccaggccagaatactggagtgggtagcctttcccttttccaggggatcttcccaacccaggaatcgaaccgaggtctcctgcattgcagccagattctttaccagctgagccacaagggaagcccttcttcataaaatacttaactacatttttgataagggtaacacattcttactgtggacaatttagaaatatggaacaagacaaagaaggctgggcaatcctctcacttcactacaaagagaaaatcattcgtcctagagactctgagcatagccagcctgattcacacatgtggtcatttactctaccaggttttggaattaaggaggaaataaccacaacaactgcaacagggcctgataaggattaaatgacataattaactgcacagtgcctggcatggagaaagattctcattttgccaaaatttcttctaccacatttaagtttctgattacacagaagatgaactaactatctatcaagagtcttatgtctccctccctaccagagggagaagaatggtcaaaatactcacaaa

SEQ ID NO: 62295 - DNA, 1398 bp, Bovine  19866881234846
  misc_feature (1)..(1): n is a, c, g, or t
nttttaatggctgtggtgaggtgtacatctctttgggggagtatgagatttttatagttatcagaaagggtcatgggttaaagatggtcatgaaacactgcattagtttctgttgctatctaattttctatgattctgtaatgaaaatttcacggaaggcttcagtggaatgagccctacttatttctagtgtatgcatgtgttgtacctacagtttttgtttgcttgtttgttttttaaaattggattctgacactgttaccttagtagttatatgaccatgggcaaatcacttaatctctctaagcctcagttttttcatttgtaaaagagacatgatgataacaccttctatataagattatagtgataattaaataactaaagctcttagcttagtggatggtgcatcataaatgttctgttcatattaattattattattagaggtttggggtggatattaaccacacctctccctgatctgactttggagccttgagagttccaatatagaaatcagaaaaatggaatttaaaatatccattttattattggcgaatctggttatgattggcaaccctattatttcctccactgaatgtatgtcagcattatccaatagaattttgtatgttgatgggaatgttctctatctgtgctgtccagtagggtagccaccactcacatgtgactcctgagtacttgaaatgtgactagtgtgactgtgcaactgaaacttaaattttatttaaattgacttaaatttacataggcacacgaatctggtggctactgtattggacagcgcttctaagtgcccagaacaggtaaggaaggccatgtcagttaactcactcttcccgggacaaagaagaaaccattttccccagtatttcaaatagggcacatattaggtctgctttgtgcctaaagctaagaagcctcaaaatagaaggaataggtccccttatattagtcactgcatgtacagagcattttcttactaaatttaaaattttcaatgccttaatgataaagacttatttttattttgcttcattctgtactttaaatatgaccctagttgtttctttgcaattcctttgttcccttcctcatattctttcttttgggcttaaatattaaagggagtcttatcagcacagcttgtttctagaaaggggaaggttgatgtttcttttgaaatttccccaaaggaacatcgtgcttatagctttgctccatgtatagagattgtgtagtttcgtgatgtcggacctcctatcggccatgagtaactgagtgaattcaagatgacagtattttgggattagatcttacatttgagaattttatctgaaattgccaccacatgtacagcaccccctcccattt

SEQ ID NO: 62296 - DNA, 1870 bp, Bovine  19866881287833
  misc_feature (1)..(1): n is a, c, g, or t
ntataacctcaaacagcatgaaactcggccccacaagaacctcccagaggagttgaaattttagctctctgaaagagatttgggggctttgcttcttgttgctattattgcattctgatatcttataaaattacctttgggcatggcagaaacaaaacgttttctccaccaaggtctgttcctgtctgatttctcatcatcgctatctttgcgttcttcagtctgcagaaaaagtttgatgttttatttgtagttggacagcaggataaattactatgaaaaggattttagttagtctgtaaaatacaaaaaccactcatttgtcttcaaagcaaaactgttcttattgtggtacaggcagcttctggaacatagacgtatacctttcaagcactagactgattgattacttgagggcaggcattatcacactactgtcagtaagccaaaagggtaatagagtccagcatagagtaggcactcaataaatactcataagggatgactaaatgcaatgcagataaaatctagagatttggagagaggtagcagtagtattaataataaaactaagtatgtactgtgtgccaaacactgaatgaaaaacatgtattacctcatttaaacttcacagtagccttgtgggtgctaagtggcttcagtcgtgtctgactctttgcaaccccacggactatagcctgcaaggctcctctgtccatgggattttccaggcaagaattctggaatgggttgccataccctcctccagggtatcttcctgacccagggatcaaacctgggtctcctgcattgcaggcacattctttactgtctgagctaccagggcagcaaaagggcttaacaataatatttatagtctcaggaaataaatttattactaagccctctttatagatgagaaatatgaggctaaaaaaggttatctccccaggttccccaaagttatacagactggatgtggcacagctgctcaaagctagatgtgaccaattgcgaagttgctgctttgaccatcaattatgagttatcattaagactacatgtcaaaaggcagagactataattcctttactaatctatgatatgaccttagacaaatcattttattttttggtttctcatctacaaaattggaactaaaaataccttctctgagggcatccatgtgaatgggatatcagaacctaagaagggaaatgagggcacccagggagggttcagtggtgggggtgggatattcattacgagggagactcatcaattaagtacctacatgaagaatcatgaaagcaggcttctcactgctggagaagggaattgcaaacacagaatgagagacatgaattctgctgttcttgaactggaaatgtttctctacatagaaagatagagaaatatgcactggagcatcgggttggcacctaagtctcacaaggctgggggagggaggctctttgtgtctcattccaactttttttagtaaccctgtgagtgctgaaaaattaaaaataacaacttattggaaaaagaaaaaaagcagttcctctatccatctctgaaggaaaccgtgaggtttaaatgagatacaaaatcacttgtagaaaagttaaaagtatcataaaaatgcaagatactacaaaaccaaagtagagggatttttttaatgggttaaggtgctggacataccagactgacaaaccacctttagacatgactactgtccctccttcaccctagatttatatattccgcattaatttcaggtatcaagagaactaggcagatggaacactaactgtagctgaccataacgagcaagctcttctgcatgggcctgtgtcccgtacct

SEQ ID NO: 62297 - DNA, 984 bp, Bovine  19866881302666
  misc_feature (1)..(1): n is a, c, g, or t
ntattttatgggaaaaacttagtcacttagcttctcctttaggcaccaagaactaataaaaatgtattgcctaaagacacgaataaaaaataatttaaaacttctccaaagttactaattcaaacattttgaaaacctgagatttcttcattgagtattccactctgtaaatggtgggtggtgttctaaaacgaggagcatggtaagaaaacacggaaatcttgcccaaactatgcctttccaattcttctcaatcagactaagtgccaagattcatgtgtgatttgacttaacacccacaacccttagcacagtgcctggcatgagtcagatgttcaacaagtgtttgctggttgaatgaggcctgactgctctcagcaggaaacctggcctgaaagcacagctactgctgataaaagccctttattccaggaaagtcatttcattaaataaacaggaagggacgccgggacatagaaccgtctacatgtatttcagagctagacatgatggggctatgcggtgaaatgggattctacctgtactatgctgagctctttgaggaggatgttcttttgaaacttatcccatttttaaataaaaaccttctttttacctgagtaggataacataatttaaaaatcaacacaagaaaaagagagacgaggaattaatttccctccagatgctctgcagtcactggagacagtacacagctatcaaactcatggttggcttgtcaatactacctctcatactttttcctttcagggtgttcattcataatatgccaaaaagaagctgcaaaaatacaaatgctgcatgaggtaagaacccaacccctagttatatattccttgggtcagataacaatgttaaaatgattcaagctgtaaaaaaactggtcaagtttacaaatctactgatgttgtttgaacacttctcggggaaaaaaggaaatgattaggtaaaacagaatttcag

SEQ ID NO: 62298 - DNA, 1085 bp, Bovine  19866881399779
  misc_feature (1)..(1): n is a, c, g, or t
ntatcatataaaatctattatttaattccatccaaagtttctttggaaaacatcaatttagaaactaatcttaggtagaacatttctgagttctgggtcgtattttccaaaacaactaaaattgaagccctgaggatttactttgaaattgtagaaaggaaaactacattttcttttgttggatatcaaactattatagcttgctggctaaataaagaaaccgtctccactttctctttagatataagaaatgacattactggtaattctaggtgaggggagagggatattcttccatctcaatgagcagaagagaacagtacatgggtttctctgcaagctctcatgctgcaacctgagcaccaaggggccagaatgatgtccatttcaaaatgaggggacacggcacaacaaagttgtaaatggttttgttcttctttcttctgtgatccattagcaaacacaagttccaaatgatagcatacctgaaatactcatcagatgagattgtgaatgatcaaaaagtgctttggaaatatgaactgttgtactctatttggttctatggctttaggataaacacataccaaattttatgttgttggaaaaccaatatgcaacttttaaactactactaattgttggatttcttcaaattctatcattactcaccaaacacaaggatcaattacaacctcaaactatgctataattacatgtggctatttttatttgaatttaaataaaaagtaaataaaatttaaaatttcagttgctcaatcacactagctgcatgcatttctagcactcaatagccccatgtatgtaactagtgactattatactggacaaagcaaaaaattgtatttcgaaccgcagaaagttctgttggacagtactgatctagagcgtatgcttgctaagtcactacagtcatgtctgactctgcgaccctatgaactgtagcccaccaggctcctatgtccatgggattctccaggcaagaatactggtgtgggttggatgccctcctccaggagatcttcccgatacaggaatggaacccacatctcttatgtctcctg

SEQ ID NO: 62299 - DNA, 1286 bp, Bovine  19866881405211
  misc_feature (1)..(1): n is a, c, g, or t
naaacagctacagaattttcttttccaccgaaaggttgaagtgtctgcattcagaataactttacagaatggaatgaatggatcctgtatttgatttttcaaagagctagctttggcttccatcaggtcaagctttatgagtaatctggaaaagctcttaaaattcaatgaaggatggagaatattacttggcagagggaagcattactggctagtggtgggagctttggtgctgttggttctcacgcgattatacataaagctccggctatcatttactgagtcgttccctgctgtgtgacaagagtgcatctcattcttcacaggtacaattcttgctgtcttcattttacaaatgaggaaactaaagtgacttctaaaggggcatacctggagaaagcatgagaactaggacttgaactaggtctgtctgaatgggcaagccgtgctcataagtaccatcttgtgccaggacataccattgaacatttctgtgtatcagtttctgcctctaccacatggggacaataactagtccagggcatcctcaggaggttaatgtcagatgaaagtagggacagaagtaaaaaatcaaaggttatgtgcaaagggaacggtactgttgttaatcagaaaaatgctgctttgctaggtattattttaaaagtctgtgtgtgtataagacccttctctctggtgactgttccatgaggagtgcaaagaacacactgctgcatttattctctgctcaggcctcctgaatatatcctccctttggcaggtacaccctgaccctggttggagacagcccctgtgcacgggttggtcacagctgctcatatttaccccctgttggtgatgccgagagagggaaggtcttcattgttgggggagcagatccaaacagaagcttctcagatgtgcacaccatagatctgggtaagaccagcagtggaggggacttccctggcggtccagtggttgggactccaagtttccgctgtagggaacatgtatttgatccctggtgggggaacaaggataccttgccatgtggcatggttaaaaaaaaaaagaccagaagctacagagcaagtgccctttggctagagagcagggctttgtgctgctggccatgatcattcctaagattattagttcaaacatgtacattaccatatataaaataagtaaccagtgggaaattgctgtgtgtgagctcctggagcttactcaaactcatgtctatcaagttggtgatgccatccaaccatctcattctctgg

SEQ ID NO: 62300 - DNA, 1048 bp, Bovine  19866881406350
  misc_feature (1)..(1): n is a, c, g, or t
ntcctgagggtgatatttttttttcctcctcctacttttttgattgaaaatatattgcttttacaaatggaaacttgcacatttaaaaaatcctaagaacaatggaaaatattttttagaagaagaatgtatatatacatataactgaataactctgctgtacaacagtaattaacacaactttataactatacttcaaaaaaaaaaaaaaaatcctaagaacaaaacgatttgtgttattagctctctaaaattgaccagttcaactgaagggaaaaaaaatctcccagacattctctaaatgacttttaaattacttcttattagaaacataattctgggcacaaatctttctgtcatactagttaatcattaatgctaaagctcagtaccatctcttatgtctgtttcagaaatccattgtgtggcaacaaagagatacaacatctttaacctttcaccccagaatctttcaaatccgaagcaaagctagtagctggttagtcatatctacaaaataaccccaaaagaaatttttttaattattcaaactggagtcaagatacaagaacaacaaacaacatatgtttatttcaccacataaatgtaaaagacactccataaacaggattaagggtgaaaaattccaatttttttaatggattattttaattaggttcttcttaaaaagtttagaacaatattctgtgaggataaattccaactgtaatagcatacacagagtggagacagccctggaactgaggaaaagctatgattcttccagaatttatgagtccacagctttctgatcaaccttgcactgctgctgctctgtaatttcatatttctctgtgtccctttgaagggcttgccttcctgatacctgagcttacatagcttcgtcttcttgaagtaaacatcagtgagatgttctgggatttttcacaccattcaatttcggtggagatgacaatgacaaatttctggtgtgagggcccgagctcagccacaagtagcaagcttcaggaaaacgaccctcctgcct

SEQ ID NO: 62301 - DNA, 1289 bp, Bovine  19866881572486
  misc_feature (1)..(1): n is a, c, g, or t
ntttgctcctttatccacttcaggacagcgggttctgcacacaaattgtctactgggatatcaaaaaagccctgaatttgagaggcatgtaggtccatcgtgatgatatgatctgcgcctgccgttgacagcatatctgcaacaagtttggcggagatcggggctcggctctcacctctcttatcctgccgggcatacgggaagcacgggataactgccgtaacccggcctgctgaagcaatcttgcaggcattaatcatgatcaaaagctccatcaaattgtcattgatttcgccacagccactctgcactatgtagacatcctctccttgcacactctcgccaatttccacgcaggtctcctggttgcttaatttcttggtcaccaccttgcccagctccaggcccaatcggtcggcgattttctgggataagtcctggtgggagctgccgctgaagattttgatatttggctttttggtcaactgcagtaggctctttgcgtccattgatcacgccggcagctgagacaggaacaaaactcagacggcagactatgccaggcgccacatcgggcgccagatactgtagactctaactaacggcttctggttgttactctgtgcttccggtcccgtcaggcggtgcgcgattttaaactgctaccctagatattaaaaaaaaaaaaaaattcctgcttggaacggacctcacaaaagagaattaaacattttttcagttcgtgaacttttttcccccttctgttagtgcctgttttagtttccaagggcagcttaaatctgaataagtgaaaatataaaatttctgttaggcaaaaaatgtaacttcgaaaaagttctggactggaggaaatatctagaatgtgtcctgagttctttcaagcgaggaaaggtaagtaagaataaacatatgaaaaaaaaaaacactagaaatcaagaaaatgatacattttcacacaccagttgagccaaaattatgatagataattccttctattctaatgggatgtttaagtgagggattttgtgaaggaaatttcgcatataacctttgactcaatgtgtcttctaggaatctactccctagaaatattcttaaaatataatgataactatttctttctgtattaatccttttagtcaaaatttcctgaggtattatgtgtgtcaagtttttgagccttttacagagtacaagatggtgaatgacaaatagtaactctctagaattgtttataaaagcaaaataggaaaccaataaatgtctgt

SEQ ID NO: 62302 - DNA, 1155 bp, Bovine  19866881628280
  misc_feature (1)..(1): n is a, c, g, or t
nctggaatttgtcattaggcatctttcaggaatgccatatttcaattaggcataatgtcatcagcccaattgactctggacgttcaggtctagatgatttcaggagggtgagaatgcatcaggagactgattttattacatttcacttaaaatagattacgactacccagtcacactcttccctccaatttggtcattaattgttaaagatctggacatttctatagttccctgaaagaagaaaagtacttacaccatgattgttgttgtaagtggctccccattccctgccttcctctgcttcttattttgacatttataaaagtcaaaacgagcagagcaaaataaatgtgcatatctcttctgtggaataaactctgccccacattcctttctcagaaagggagggggaaaatcatcatcagagagacacggttttaaaattttgttctatggccctgcaactcctgaagccgtagtcagtcaatattgttaatgtagcttgttaatttgataggatttgtcaggtaactccactggaaaattatataaaactgttccagatgaaaagatgatagtgacatgaattaaagtgatagaacaatagtggaatataaaccagaaatgacacccaaagtggctgttgatttattgccgtactgagtttggttctgggctcccatgtatattagtgctacaaatctgggtccatttagcagagggatgcgcatacatacatcaccagctcctgctccaagccaaggtcactccccattgcatcaatcttttcaacagagcctacttcacaaagcaggacttttgtaaccatctcagatgtaacagactctcgtcctctttcatctttcttttatcatgtaaagtacactttaacttctattatttttatctgcaaattgttcctgtagagttcatccattatgggctgtatcttagcatcagtagcctaagctctgttccaccacgagaacactttcccaaacacacccttccctggggttattgtgtagtcaccattcaccagggggaacccccaagtctgcggtttggggatgaagatgtgggagttgaatgcattaggatcaagacaggcaggcaggtggaacaccacgaaacaagaggtatatttcagaacag

SEQ ID NO: 62303 - DNA, 684 bp, Bovine  19866881895449
  misc_feature (1)..(1): n is a, c, g, or t
ntatatatacacacacacatatatatacacactatgcagcatcagcatatattaggtagtgtgaagcttttagattttttttcctcctccccttggtatgattcaatccaattcttgtataactttttcattagaccccactgtggaacatcagaaataagagggaattgtgtaggccacttctatgtaacctttgactctatatctttgcatgcccaaagacaagaaaagtatgtcttattcattcactgtctgtatatatttctcttggtactgctattgtcactttggttttttagtaagggaaattggcttatttgaaatgtttgtcttaatcctctatggaaatatcagtttacaggaaggttaaggcagctcgtttaggttcctctcagagtctctgctgcaattgtcggaaaggaagccccagggaagcccccgagcacaggctttggaagagcagtggctgtgcagaagacacgctcgagatgcattatcaggtgctgtctggagagtagaaattacggtgtgaatgcggaaatgctgatgtctccactttcccaacttagcacaaacatcttctttatctttggtgaattttggttccataagaggtggctccaagaagccttaaatgcaagtgtgaaattgtttttagaatcctggcttgaaagcatggtgttg

SEQ ID NO: 62304 - DNA, 632 bp, Bovine  19866881974138
  misc_feature (1)..(1): n is a, c, g, or t
ncccctttccccccctctcccgcccctgcagctggctgacctgtctcacccactgctggcctatcgaacggccaggactgtctggttttggctcatgcctttgtccatgtctggcttagttcctctctgtctacgcttgcctctacccccaccgccccaggcggcacaagtgtttggccacacaaaactacagatagaaaaggtggtaaaaactacaaactttgctagattttccaacagtttattctttcgtttattcaatttctcccttctttaatacttcattttaagaaaacacatacgaaattaattatctaaaggcaaagaatgcaaagcaacctttgtgttccttataataactgacttcataactctctccagctgcgttatggggtgtgtataaaaagcttctgttctgagaacaaaggagcacgtgcagaaatgagactaaaaaatccactgacagtatttcaccacacaaattccttaaaagattttagtcaagactctcaacagattcaatgttaaaatggtttttagtttaaaaaaaaaaaaattgaaagtgcttacccagtaaaagaaccgaagtagtcctgaactgttacgtaagactttttacagttggatctttg

SEQ ID NO: 62305 - DNA, 1157 bp, Bovine  19866881986432
  misc_feature (1)..(1): n is a, c, g, or t
ncatatacaatgatgagacagtgacaacagtcgacatttactgaatacggactttgctcatttaatcctcccaggaaaggtgggtgctatcatcagtcccgttttataatggaggaaactgaggtccggcgagactgagacacgtgcctggagctgcacagctaacaagtggaggaaccagaacttgaacccaggtttgccagaccccaaagcctgtgtctgaaacctccctatggccaagggagtttggggaactcaggggaaagagagacttaagggaacatatcttccagattggaaccactgaccagtctatggtgaaggtcaacttccactgtaacaaattcagttttactgtaaatgtcccaactctcagactcagcatgtgacctacaagacccctttctgaaagcccctggagaaggtcctggtttcctgagccacagcctcagtttgtggaggtgggacgaggctgacaggagcagtgccccctcctccagccctgaccggttcataatcctgatgaagacgcaaccctttggttcccagcctgctttggtcccaattccatgcatgttcattctcgagcacttcaaggtagaaaatgaaaatatatgagcgggagaaagccttgtaataactgcagcatgcccgctttaaagcaagtccttcgggtatattactttatccataaagagagtttacgctagtgtgaatgccacattttggttccccttgcactgacaaaaatcttttttttaaagatcaaagtgtatggtgtgcatatgtgatgtttgacattggacaaagtactctttttcaaaacagacattttccaaaaacataactcactagactaatgggcagtgagaagccaaaatgactgcccctccgccttctccttgtgtgtctttgccagagtccttgggacttgccaaattcggtcatgcctgcttagcttgctcgactgattgtgccagaaaagaaaataagacacagatgtatttgagctctttgagatgccagtaagagagacagctaatggcttcatttcgaccctccccttccagctgggcacaggtgggggataatgaggtccctctccctaatcaaactcaattatttactactctatataaccgcaaagacattcacat

SEQ ID NO: 62306 - DNA, 688 bp, Bovine  19866881267361
  misc_feature (1)..(1): n is a, c, g, or t
ntggctcctgcctctgggaaagccgggccaggcgagagacgcttggaattcggggagacggggtgggggaagggaggaaaatgcggtcaagatttttcaaacagtactgtttctccagggttgcactacggccaggaactgttccatgcccctcgcctccggggcggtgtgagggcaggacgggcagaagcgggggcggggcggcccgaaaggatctggcacgccggagaaggaactgggatgtcgggattggcagggtgcgtggccaggacagagttaaccgtgcaagccacagtcgcgtcgctcagagttcgacttgggccgcttgtttttgttccattgtgaaccgaggccccgccgccgagtgcccggatgatgacgtcaccaccccccttttccgggattgtgggggggaggggtagcggacccagagaccgcgcgctgggcgatcgccctcacagtggttgtgggggggtggatcccagtggcacagctgaccctcgtcacgtgtttcgtgagccggccaagcccacggggcgggtaccttgcgggggccgtggtgcgaggtgccaagggccagccacctgctccttgccgatagggagaaggtgtggctatctcctgcggcggcaggggggagttgggagtgggggccctctcaccaatcttggaagcaggtgctctgaga

SEQ ID NO: 62307 - DNA, 1027 bp, Bovine  19866881363320
  misc_feature (1)..(1): n is a, c, g, or t
ncaatgaggcttcggaagagaacagctttccctgcaagcaggaaatacatagaaatcctcaggctttcccttcctctccttcctcacactgtctcccagtccactaaatgtagtacaaacttgtattactctctcttccagactagggtggggagtgtggagggtggttgtacaaacatctatagaacatactgtcttcccttgtgttgtctaagaagaagactcccttccacacacacaagtcaagaatttgagtgccagtttatttgggaggtaaacctagaaaatatcagtgtgggtatgtggaagtgacaggaaggggcaggaagtcaataaagggtatgctcttgccaagaagttatcagggtcatttattcatttatttaaaataataaatgcttcctggagaaattccagaaaaaaatatatagtgacaaaatgtgaagggtctgaggttctgccctacttgtacgctattaagttagcctgccacagattcatactcatggaagctggcagaagacagggctggaggcaaaggaatgtatcatttgtggcacagctggcagcccctgtatctcacaggacaagggagaatggcccaggtggatgctgcttatacagtatttatcaccaagtcccatcccccattggctggggctgttcctggggcattcattctgtggcatttccagcccactgatcatccaccatacttagttgccagagccagtcctgatcaaaatgtggagttggctttgattgacaacctccccttcctcaaactttccctaaggtgattctgtctccatcttccccaggagaagatgggtccacaccttcatgtatcctgatctcttcttttattcccagtgaaatctgcctttgtaaactcctcactggggcttcccaagtggcactagcagtaaaaaacccgcctgccaatgcaggagacgtcagagacgcaggttccatctctgggtcaggaagatcccctggtggagaaaatggcaacccactccagtat

SEQ ID NO: 62308 - DNA, 1555 bp, Bovine  19866881380466
  misc_feature (1)..(1): n is a, c, g, or t
ntgaaagaccccactcaaagtccaagatagattttaatgaaacaggttatgaaaagtacattgatgtggtttcagattccatatcgcaagtatccttgaagaaattaccatttcttcctaaaaagtacgcccacgattatctgtaaaggctattgaaatgctccagccttttctaaactacagattggtatgaggctgggtattcttccatcaaatatacttcaaccaaaccaacatatgacaacagattgaatataggagatatgagaatctcactttcttctagtaagccagacattaaagcaatttatacaaatatacagtgccatttttttcactgattatctttcttttggaaaaagaaaaaaaaatggttattttccataaaatattctatttatattatgcttactacttttatttttaaatgcactaatacaaacattctaaaatttctcagttttaatattgcacatggtaaatatcagaagctataacctacataaacaaaagctctttgggatccttaataactattaagaattctgagtctaaaatttgagaacttttgaattagaacatcattattttccacataataatagttaatgaagtaatggatctaggaattgatcattgatggccaccatatcacaaaaaaggagatattatgtacctcctgatagatatttacaacatcacctatgaaatattcttttcaaaaaatctgtctctgataaaactctagattccactgctgctgctaagtcgcttcagtcgtgtctgactctgtgtgaccccatagacggcagcccaccaggctcccccgtccttgggattctctaggcaagaacactggagtgggttgccatttccttctccaatgcatgaaagtgaaaagtgaaagggaagttgctcagttgtgtctgactcttagcgaccccatggactacagcccaacaggctcctccatgggattttccaggcaagagtactggagtggggtgccattgccttctctgagattccactaccagtttatataaaatatataaatttatatataaaatttatttattatatataaaatagaagggcaagatgaacctgttaaggacacactgggtatataaaaagcaaaacctagcataacaggtctttccataggtgacatgactccatttcttcaatgaataaattgcaaggaaaagaaagtggagaagcaacccatggactcctgttcctgtgtgtggaatgctttaccctgcatttccagttggtgagctcatatttatctttctttaaaaaatttttttcttccagttttattgagatagaattgacatacaacatcatgaaatgattactacagtaagtttagtgaacatccatcagtgcatatattcagttcagtcagttcagtcgctcagtcgtgtccgactctttgcgaccccatgaatcgcagcacgccaggcctccctgtctatcaccaactcccggagttcacccagactcacgtccatcgagtcagtatgccatccagccatctcatcct

SEQ ID NO: 62309 - DNA, 2066 bp, Bovine  19866881052695
  misc_feature (1)..(1): n is a, c, g, or t
natgttgacaaacttgcctatgtacttcacacagttataagcacagtacatagatcattttattctcagtatgcgacttaaaccagtgctctcaaccgttgtcgccattttcgctttcttgcttatatttgttcatgttaaaataaaaatcctatgaagtactatcatatatgttttaatacaagtaaaaactttctcaaatgtcaaaacttaaagtatccttttctctaacatgttggacatctaaacagaagtcactgtatcacaaagacccagatttttgaggcttaatatgttcaaaatgtgaaaaataagtgaaaatttttaatgagaagcattactcaaaatgatagcttggataaacacttataaggaggataatataaaaaaataaatgaggggagaaatgtaaacaggaagaacagaaaaagaatgagaagcaaatttaagattgtactaacaccagtgatttacagctttaaggaaatgctttataagagtaatctaggctatcatttctgacagctgtaatttttttccattatatgcactaaagaaatagtctatttccattacagatagaatgagacaggtatttttcaatgagaagatgatgcaggtaagtcacatagagcatcctttattcaattgcctccatacactagcaccattatcattttttagggaaaataataacaaataagcaactcatcatcactctagattttcatataatcaaaaataatttgccgaaaccttttccaggtgaaatttttaactatctctgccagttctatacgatgtttcatgaaggtttcagtgtgagccagtgacttagagatcattttacttacatgtgcccttcctttctgatttcttctaccacagctgagtctcttaggttaatttggttgctttgttgctttccaaaccatcccagtggggttttcagggtggttgtcaggtagttctctggaatcccttggttaaattaagtctgctgctgctgctgtcgcttcagtcgtgtctgactctgtgtgatcccatagacggcaacccaccaggctcccccgtccctgggattctccaggcaagaacactggagtggcttaccatttccttctccaatgcatgaaagtgaaaagtgaaagtgaagtcgctcagtcatgtctgaccctcagcaaccccacggactgtgacctcccaggctcctccatctgtgggattttccaggcaagagtactggagtgaggtgccattgccttctccaaaattaagtctacaggtggttaagttaatgggttctgatttaacaagttttgaccagtctcaagtccatggttaattactaaatggtctgtgggaagaatacaaacggagacccacataccacataagccaacacttaaacagtaaaatctatcaaactgttatataaaatgtttacccccatctttacaaagatatcttaataacaataaaatttgtacacactgtgtaaaacaagctcttatgtacctgaagagaacaagatttcaagaaaatgtgattttattattgttgtacaagttcgggtgatttgttgactgaggtgatgatgtttgagtaagtaatacaatggagatggtccataattatacatcattgtataattattccatacaagttatttctcatggctttatttcaggaagcaaaatgccaattaggttgttaaaatcaggattttcttataatttgtgttctattaacagtaatgtcaaactgagtcactgtaggtcctaaactacttttaattagtgtaaatttggagaaactacccagctgaaaaatagcaaaacagtttataaaatttgcaatacacatactggggaatgaaacaaaaattacaaaatttaaacattattaaagaaaattttcggagaaggcgatggcaccccacctccagtactcttgcctggaaaatcccatggatggaggaggctggtaggcctgcagtccatgggagtcgtgaagagtcagacacgactgagcgacttcactttcacttttcactttcatgcatt

SEQ ID NO: 62310 - DNA, 922 bp, Bovine  19866881414588
  misc_feature (1)..(1): n is a, c, g, or t
nacgttgctgaactattccacagagaagaatgtcacagagaaacaatactatcctaaagccttaggatgtatctatattcccaggttgaatttctagaaatgacaaggtgaaaattgctggctgggctaaaaactaactatgcccttgaagatgacagactccctgggttttttggacacgagtatatcaaccctagaactagtttgatattgctggcttcttgcccagactgcagttaatgtttgagtatttctagttctgtataggtacaatgttccttgccttaagttgttaaaaccaaagctaagagtcagcctaattaaaggaaaattcatttattaaatcaaaagcaaccagggacaaggatgaacatctttcaggctgtacaagatagttgattagctcttttcagactgctacaaaaaaaatctgatgagggatagatgaaaatgttccatataatattattaaaatacatgcagtccctctataaaaaaaatacttgggggtatatactgatctggagaaggcaatggcaacccactctagtactcttgcctggcaaatcccatggatggaggagcctggtggcctgcagtccatggggtccctaggagtcggacatgactgagtgacttcactttcacttttcactttaatgcattggagaaggaaatggcaacccactccagtgttctcacctggagaatcccagggacgggggaacctggtgggctggcatctctggggtcacacagagttggacatgactgaagcgacttagcagtagcagcatatactgatctaggttttaagaatgaacaaaacaatagctgtgtgcatgctcagtcgtgtccgactctgagactccacctactgtagcctgccagagtgctctgtccaagggacttcctcaggcaa

SEQ ID NO: 62311 - DNA, 1255 bp, Bovine  19866881008888
  misc_feature (1)..(1): n is a, c, g, or t
nttactgcctcttcgtaggcagagataccctgtaggggaaaatggttctcggagtgaggtttctggacctgcagcatcagcgtcacctggcagtctgttagacacgcaggttcaagggcccacccctatacctgctgagtcatgaccctgagagtggggctggcaggcggaatcaaacacgccctccagggtgatttccatggggctcaagtctgaaaacgcctgctatagagtcaagggagagttgactctgacttgacagagaaaaataattttagatctttcttctgttgtttttaagtcttgttagggttaaatgtaaaaattagcttcaaagtaacttttcccagaggctcctaatacgtagccttcactgcttctctttgctgatgtaaataataatcgtttttgctcagacttagtggaaacctatcttttatggtattcctagaaaaaaatggaatcttattatattcttagagtaagaagttattttattatagaaatacaggaaatatattcttaggaaacttgaaaacaataaatattattttccaatagtaagtcatttaaaagaggcaatgaaatgacttgactttagtcatgtaaaatttaaaaccattattggtgaagattcttgaagcccatacgtgctattaatgtggacttagcgaaacacatccttccctcagtttagaagtttggaagcatgtggctgtgaagtgagccattggtgctgcatttgaaatgacataattaaaagcactaacactttggttctgcaggtccaatctgactataaaatgtgatgtgtacatagagacccctgagaagggaggcgtgttcattgctggaagagtcaataaaggtggtattttgattagaagtgccagggggattttcttctggatttttgcaaatggaacctacagagtcacaggcgatctaggtaagtgcatttttctgtagcatgtgatttactatgtgatatgttgatgtgagtgtctgctttttacctatgggagtagtgaaatacctcaccatgtttgagcatctaattgggaagagattcaacatgtgtaagcaaacaccaaacgattccacattatagtgttaattaattagtacagaggcagctcagtgaaagaggaaattgtgcaaagtctctcgggtattgtagccttgagctaggctgttagagtagggtgtgggggtaaggagagaatactcaggaaattaaaaaaaaagcagaagt

SEQ ID NO: 62312 - DNA, 674 bp, Bovine  19866881038932
  misc_feature (1)..(1): n is a, c, g, or t
ncgtagtgcccactccatggctcctgagcagtcatcagtccacaacgcccatatggcaactgctgatagtaactggccaccaagttccaagcaatggtgctaaaagattgtttgataaaagagaaacaccaagcagcttgtaataaaagtgtaaatgtctagaagcctatagtataaaagaccttagcaaagtttacacaaatatatgcaagtggtaaaattaccacccaaaacaagaaaatttaagttgcctaagttcacccacattttgaaaaatcaaatgagggatgcaatatttttaatagtgaatcatataataaaaaatacaaatgtatatgaagtgcacaatttttactgcacaatggtataaccagaaaaagagtcacgacctaccagtaccacaaacgtgagtcaaatacagataaagactttatctatacctgctttctttttgacaatcagccttcttaatgccccagtttcatgacataatttcatgacctgactcagcggctgtaaagttttacaatgagaactcttaagagtccgactgccagggctcaagtgatggtgtaggcagacagggcaggggaagagaaccacacataactctcttgatacaagaggagccatttaaggcctaagccactttgtggtctaagcctgcccacaat

SEQ ID NO: 62313 - DNA, 1486 bp, Bovine  19866881089659
  misc_feature (1)..(1): n is a, c, g, or t
naaaagatgctcaacatcactcattatcagagaaatgcaaatcaaaacctcttatgaggtaccatttcatgccagtcagaattgctgcgatccaaaaagtctacaggcaataaatgctggagagggtgtggagaaaagtgaaccctcttaaactgttggtgggaatgcaaactagtacagccactatggagaacagtgtggaggttccttagaaaactggagatagaactgccttatgatccagcaatcccactgttgggcatacacattgagaaaatcagaattgaaagagacacgtgtaccccaatgttcattgcagcactgtttataatagtcaggccatggaagcaacctagatgtccatcaacagatgaatggataagaaagctgtggtacatatacacaatggagtattactcagtgattaaaaagaatatatttgagtcagttctaatgaggtagatgaaactggagcctattatacagagtgaagtaagccagaaagaaaaacaccaatacagtatacaaacgcatatacatagaatttagaaagatggtaacaataaccctgtataggagacagcagaagagacactgatgtctgatgatactggatgcttggggctggtgcactgggacgacccaaagggatggtatggggacggaggagggaggagggttcaggatggggaacacatgtatactttttttaaattaaaattgaaaaaaaaaaaaaagagagatagtctttaagaatttggaatacactctctgtcacctagtgagtgtgacttctgttagtctaggtgcagtaaatgactttttctttaaaatgtcctatgtctcatctgaataacttacatgattttttttctccttagagttataaacattccaagtgtatacgaccacttcttccctatttcaatgtgtcacatcagtttgctacgtttgatcttaagggttcttttgtaagtaaataagtagaacttttattttggttttgatttgagaatttatatattttatcatgagctaggagtttttaagtgaaatattataagctattaagagttttcatacacattgttcaatgacttggtgtcttctctttgctgattggttttagtcaggaagtacagaagccacgaggaggtaatgctctttgtggttttgaagaatcctaacaaaagtcacttacaagaaggttgttctttttggtagagcatcatttgtgtagttgaggaagctttccagcaatgctctttaaaacattcgatataaaaagacacaaaattcttgttatttctacctattgttagatttgaatacagaaatatatacagtgcactttctactaattgcataagcattggtttttaatgccagaaaattcttaaaaagctttttatataggtataataataatgagtatttttgaagcaaagatacaaatctttttttaacatttgccaaaaatctgcag

SEQ ID NO: 62314 - DNA, 2378 bp, Bovine  19866881110646
  misc_feature (1)..(1): n is a, c, g, or t
nctgaagaagatatggacaactgaatatccctttatctgtaaaggaagttgaaaaacttttagttgaaaaacttatagttaaaaaacttttccacaaagaaaactatagccccagatggctttactgggaaattcaagcctccctgggagcttggctcaaacaggaagtaagagctaaggcagagctgtaaatcgcccacctgggcattgaagcatgcccccattacatatacagagcctgtcagcaaaggctgggacacttgctagctccaaacatgaggaaagctgtaccatcatgatctgaccactaagaaaactgagcagagatttcagtggccatacatgataaagcttgcaaactacagaatctgttcaggaaagtcacaaagcaaattaacagcaacaaccatgacaaaaagcaacaacaaatgctagagaggagaaagaatctgatgtccagagtgtccaggttattttatgtaacgtgtctagctttcaacaaatgatatatatatgatatatgatacaacaaatgatatatgatatttgcaaagaaacaggaaagaatggcccatatacggatataaaagcagttgacagaaacgatgtctgagaaagcctagccattacctattagatattatacttcttagacaaaacacattaaaatatcaggtatttaaaaatgttcaaagaactgaaggaaaccatatctaacaagtaaagggagagatctgcttctagaatgtcagtgtgaggagctccataaatatactcccagcgaaactggtgaaaattatttaaataataataatgctaaagtctggaaatgatcctaagagcacactacaaatacagaagtattcaagaaaatctactaaaactcggtatgagcatcaagagtatatggcatttaaaccacaagccatccctccctgtccctctcaggctggactgacagaaactccaggccaagtaggtacagtcaagaacatggggctccctccctcccagttcccaggtgaaggcaacaatatctttgggagagaagcagaatatcagtatttctcatgctctttcccttcagctacttgaagaactggcagaatttctttaaaaccaaagctgcaagaaagattttcacgtaactgtgtagaatgggggaaaaaaggcataaagttgggtccttcacgcctgggatgaatctgaaaggaagagaaggtttgcacaggtggaccctcagcccagagagtgaccaggtcaagccacagactgatcatcccagtcctgggatcctacatggaaaagaaaagctccttttttttctttaaggtgttcagttacattttatgcttttttccccccaatactaacaaagtgaattaatccaataaaaatgacaaagaattaccatagtttcaatgatgacagtgaggttacctaagccatccgtcagagctacgtagcttcctcctctctctaaatggccaactgtcttcaggtaataccaacctggttgagtaaactgagtggtatgagctatagaaaagcagagaaagacccaaataacattaaagtggtgataataggattcttccagaaataaaaaactatctacttacttgaggctgaaagagaacagagtatgccaccccaaaatgtgccactttagcatgcatattattttgaactgctggcaatcaagacccagaagactaaagaaaaaatttctctctccttcaactgcctgaaagaatctagataggagacccggcccagaaagagagctattaccaacaataactttttatctgaaagacttatcttcatggcacagcaaatatctgttcttctcttccaatgaatggtcttcttcccctgtaaagctccaggttcctctctctttctataaatggccttcttcccctgtaaagctccaggtccctatctctttctatgaatggtcttcttcccgtgtaaagctccaggtccctatctcattcctttgcttaggatggcattataaagcctcaattgcctgactgcaaacttgagtcccatatttttatgtacaaaattaaatgggtttttttcctggtgatctgtcttttgtcaattattagattgaccaaagaactgagacggttacaaggaaaactttcccaagtatgactgagtctaacagctaatttctattttggaaaaaatatttgccagcctcatgtttcaacttttgagtaattagcctagttgaatggtataattaagggaatattcttagaatgactggtaagaaataaataaaccacactctgtcagttcaagactactgaaaaactactttattccaacagtaaataaagttatctcctcccagt

SEQ ID NO: 62315 - DNA, 875 bp, Bovine  19866881387693
  misc_feature (1)..(1): n is a, c, g, or t
ncacacttaaaattactggaaaatgttggagctggcaggcatcttagacacaatctgccccaatatcttcattttttcagaggaagaaaccgaagcacagagaggggcagtgacttaaataaaggtcataaggcatggtgaagacttcttgggaacaggaagttggttgtctcagcctgtgtttataccctcctaatccctggcatttcaagtttaatcaaagtcagaaagctatccagcccttcagcgctgcatttgcttctttccgtgaaacttaactgtacaaatacctgccacttgggagtcagcaagcccaagccaaaggctgcgaattcttgctgcaccacttgcagtacttatttttagcagcgaaaggatcattctcattcttagcatcgtgaaataataacagccggcatctgctgagaattagtttgtaagctccgtggaagcagggatcaagtttgattttccacatcaccacatccgtcgagcctagcccagcccgtgccgcacgctgcataacacgacaggtaaacagctgttgggtgagcggccatagtgttacgaggtggcaggcactgcgttaagcactttgcatgcttatctcattccatcttcatgaccatcccatgaggtaggtaatatttaaaactaaaaattgaaaaagtgcccaaggatgcaaacacagtctctctgactgcagggttaccatcgattatcgtttgaaatgtataaaactactcttaggttaagtgtgggggagttttaaaagtctgcctagctgacatgttatccagcactaaagttaagttactttagccttaaaaaaaaggaagaataaataggaaaagatgacctaccgggttagctaa

SEQ ID NO: 62316 - DNA, 1381 bp, Bovine  19866880082520
  misc_feature (1)..(1): n is a, c, g, or t
ngcagagtctcctcttcaccaaggaccccgaccgtttttgtgaaaaccttatataccctaagtgtacgtgcccaaacccacctccccaaattccctgaaactagtctgaacaaaggaaaagaaagatacagtcaaagataacccgtgattcatatgccttaaacctaggtagttaacagtggacaattatcaataggcctgtggtcataccccaataagcataatagaatttatgattccattcagttatgcagataattagggtatttttttaggtgatggagagactaggtatgagccctgaggctcttccagctggggggtctggtttttcagttggtatgtcatttccatagatactgggcatatagatcaaagtcgatagtccagcccaagatggagtcctgctttcaagatggagcctgttctgtttcttccttcagagtgactaacacatacacacaaaattttgcagttgctagtataaatgtttgtgcatagtccagcaaagggaataattaaaccaggtcactgaagactgaaaaatgtcttcatgatatctcaagatgcaggaaatatgctgatttttcagtttctggggaaaatgtggaccctgctgttggtacctattgctgaacatcacctgcctgcttgtgccctgtgatgtcaacagtatcggaatataagcagtgcccacctgggccccttgagggctctctcactgtgcccctgtgcctggcctcagggcagaaccttagcctggtggtggaagtccacgtccattctgtagccccctctgctcctcctcacttcccccataagccatgcttcgtggctcacaacttcccaagttcaaagacaaagccagcccatcccccagcagacattacccaccttactcactttttaaattcctaaacaaggcaccctgtggtcttagcttagcccagagtctggcataaggagcagactcaggaagtggcagattttattattttggcttctagtgccttctctcccaaagggcagggtaacgactgctgaattagacactgggaaccaaggagggtgatgagcacacccaggggcaaacctcagagcccacctggaggtctggggcacccagaatatctggatagcatagctctccttcatttaggcagcgcggctgcaggagaggcaagcgagggaggacgtctgagtgacaataagccctcagagcttcttgagaagggctaagtacagtaatttgttgtaatgactcaaatttaaaacaataacccagaggcataatagcatgagccaagaatacctactgcatgtgacgggctgttaatgggaaaaaaaagtttgatttggtggcagaaaaatcttcaaatga

SEQ ID NO: 62317 - DNA, 1090 bp, Bovine  19866880412782
  misc_feature (1)..(1): n is a, c, g, or t
ncaagccaggaatcgaacccgggtctcctgcattgcgggcagatgctttaccgtctgagccaccagggataggatatatctggttttccttgcttactttctatgcttgctaagtcgcttcagtcgtgtccgattctttgcgaccctatagacgacagcccaccagactcccctgtccctgggattctccaggcaagaacactggagtgggttgccatttccttctccaatgcatgaaactgaaaagtgaaaatgaagtcgctcagtcgtgtccgactcctagagaccccatggactgcagcctaccaggctcttccgcccatgggattttccaggcaagagtactggagtgggatgccatcaccttctctgctggttttccttaattaacaataatcttttaatactcagattacctgccccttactgtaaaacttctatgtagtgtgacttctccccccagtctctttggaaaacagttctcccagggtcacctgggatgcttgaggtcctcatagtttccaccaaataaatctaactctcaacttttaggccacgtatagtttttcagtggataccacaaatgtactacctccatattccttgtttgctgagtccctctgattctcattgttacagtatccaggtaccatttcatttgcaaagcctcagtcttgctgctcagtgtgtggccttgggaatgctaataattggtagcagaccctcagcagaacccctctcactgtcccagacccagagcacaggtcgctggttcttgggtacagcatccagccagcacagggaggacccaagcaagaagtacaatgggacctgccctcctcactgcctacccacaaatactacacatcttccctttgcaggtggtccacaaaaagactaacagtttccaatctatcatgatgtaataaatgacctgctatattacacaatctctggagggactcatcttcaaagagacaaatcctggcactaaatggtaattaaaaaggaatcacaagcattatttatgcctcttaaagaatagaaaagggatctaattcataagccaatgtaactctgttcaaagccc

SEQ ID NO: 62318 - DNA, 2301 bp, Bovine  19866880428640
  misc_feature (1)..(1): n is a, c, g, or t
nactgtagtccaccagggctcctctgtccatggaattttccaggcaagaatactggagtgggtagccagtcccttctctggggtatattcccaatccagggcttgaacccaggtctcctgcattcacaggaagattcttcattttaagaggtttcaaaacaaaaatttcacctctccccactctcaactttattcagatgcaagcttaaggtggcagaagcaggagatggctttcctcctgaattctgggccccagaataactgatcaaatgcaacacattttttgggactattgtgatgcttggagatttttatctgaatctaaatctagtcttttctctacttgtgccttagattcccttgaaacctcccctcttcatgaaggttttgggttgaagcaacagcatggcagttcttctcaagatgaaataaaaagttggattcaagttttgaagaggccctaccaagggtcactcatttgggggctgccccattgatgggacctcatgaggttttatgtaagctgtgccggtggcctgagccgagtatgtctagtgagggcaacagtgcatagtttatggaagcaattactgagccaagttcttaagtagccatgatgccttcagttatgggcaaaattgggaggggtttcaatagaatgagtgtttgtattttcagggccctgggaatccataaagatcactgtagtatattatttcactcctactctgccttcctagtcctctcatctgatttaaaacgttctcagcaccggggtataaaattaaacactcatgaccaagctggtgctagcacacagaataaaagggaaaaaagaaaaccttaaagatacaatgtaattgtgggaagcagggcccaccactctttcccatggatagaatttacaattctagctgtaggattcttttcagtatataatttttttctaatgttgaaatgatttcatatgtatagaaaatctgcaagtacagtaagttccctatgtagaaactttcaagtttcgaactttgagagatgcaagcatgcattccagcccctgtacgccaggtgctgactgtactactggacttttcaaggtactgtacagtgagattaaaatgtttcctgtattttttgtgtttgacttttatgtacgtattatttgtatgaaaagtattatgaacctattacagtaccagcactatatggttgattgtgttagttgcatagctagttagctgttggacttatgaacaaattggacttactgacatgctctcagaagggaacttgtttgtaagtagggaatttactgtacaattaaaataatttgctttagttgaaccatttaagagagttctatgagccatacattcagtactttggccacctgatgtgaagagatgattcattgggaaaaaccctgacgctgggaaagtttgagggcaggaggacaagggggaaacagaggatgacatggttggatgacatcaccaactcaatggacatgaatttgagcaaactccaggagatagtgaagggcagggaagtctgatgtgctgcagtccatggggtcacaaagaatcggacatgacgtagcgactgcacaacaacaatcttaagctgtcacggacagccatgaaaatcaggaaactgacattggtgcatgaggacaattttcccaggcttctcgagatataattcaccctataccattgtgcaagtacatttgtgctaggttgcttcagtcatgctgactttttgtgaccccatggactgtagcctgccaggctcctctgtccataggattctccaggcaagaaactggagtgggttgccatgccctcctccaggggatcttcccaacccagggactgaacccataactcttatatctcctgcatggccaggtgggttctttactactagtgtcacctgggaagcccaagtaagtttaagatgtacaatgtaatgatttgatatatatatatatgtgtatagtgaaatgattatacaatgttaggtaacacctctgtcagtccatataattagtttttttctgtgtgcagtgagaacatttaagatctaccctctttgcaactttcaaacatacaatccagtattgttaaccgcagttatcatactgtgtattagatccttgaaacttatttatcttaataacatgattatcatttagtcctcagaccccattcaagtttctgagctctcccattatgtcctccctggaaagaagctccagtccaccatcctttctcacctatatgttcctgggctttaata

SEQ ID NO: 62319 - DNA, 2488 bp, Bovine  19866880446866
  misc_feature (1)..(1): n is a, c, g, or t
naatgaaggtgcccatggaaaagtatgaaagcacctaggagtgtgggctgggctcttacttccatttatttacatgtacaatggcataaaatctctgcttcataggattacatgaagtcatgtatttgataatactttgcaaactgggatgttgttaccaatagtatcaatattactgtttctataatactgttccccattaagaggggaacagagaaaaagaccacaaaagtggcattaaattaaaaccttgccgactgcaccttttgccttgggcttggtctgacctgagttaactcaacctaaatattaccagagaaagttacatcaggcttagggatttacaggccctgacagcaactctataattatcttgtttttaaatcacaatttctgcattttctgatgatagtttccttaatttcttcatataaattgtatagggtctgaaggtattaatagtaagagatggtaagaaatgtgtgtgtgtttaagatgtcagcattacctgcaacagatgaaaatgaagatccaatgccttgaagagttcgggccacaaaaagcagagtataggtaccagaaaaggcaaacactgggcaaagagaatagcaagaattccccagttagcaaatggcctttgatggtctggccaccagtagatgggctcatgatattacagacatgagccattatgctcatgttttaatacagagggattactgctccttgttttcagagctgctcttctaatcctctcccttaattaggattgcattataattgacataaagactgagaaaccaaagaagcataaactgatgcaccacatggtggacagatggctgggtgcccacatttcctgctgaaagcccaacatcctgcccactggagtcagggctgaacatgtaacccaatgccctggactgagaactagtccctagaccctacttttggattctccatatgcaacgacctgatttgatctttgccatagctgggtcctattgggtcatctggagtgggaaacaaaagctatgtgtacttgaaggtccatgggtattgggtagacaagaatatcttgtgattcaatcggatccttcccctcatattggaaaatcttttagccaagtcagatcagtgagtatttattaagtaatactgaccatgcagctgtgctggactctgcagcaatgtgaaacagagaccgcccagttcatgcccttgaagagatgcagtctactagagactaacaagcacgcgtgaaactgagagccaaacaggagtatgttatcagagactaaattacagagtgttagaggtaaggttgatgagtccagacatgtctcatcccagattctaagacaacaccgcagaaagggagaagacttgcttccaaaatgtttgcatcagcaatgttgaacccctttgcccattcattacaatggctgtgcttataatcttcccccattacttcccccacatgatcacaccgtctcccaaacatgcaaatgattggcctcttcccggccacacttccaatgatctctcccaggctttctgatttcaatctgttcaaggtctgttacccctgtgtcctctgaaaatagttagaccaactcatccctgtttgcccaggaccttcatgattttattttatttttatttatttattttattggtgtatagttgctgctttacaatgttgcgctagtttctgctgtacaatgaagtcaatcagatatatataacacacacacacatgtatttcctccttcttggacctcctttgcatccacccattccacccatctaggtcaagaggcatgtgaaaagatgatcaacatcactcattattaaagaaatgaagatcaaaacttcaatgaggtatcacctcacactggttagaatggccatcatcaaaaaatctacaaacaataaaggctggagatggagtgaagaaaagggaatcctcttgcgttgtaggtgggaatgtaaattgttacagccaccatggagatcagtatggagattctttaaaaaaccgaaaataaaactactttatcttattttatttttttggccacatctcacaatatgtgggaccttagttccccaaccagggaattgaacctgtgccccttgcagtggcagcatggagtcctaaccactggaccaccagggaagcctctaggaccttttttttaggttttaaaatcaagtctcacatcctgggaagcccctcaatcccaggcaaactgggtggttggtcccccctgtttagaagaccaaagtaattttgtacccctaacacaggccaccatttaactcctaattacattgcttgttttccagctagggacccttagggagagtgatgggcatcagcaacctcatttagtatttaaaaaccctgaaggggacttccctggtgacacagtggataagaatctgcctgccaatgcagggaacatgagttcagtccctagtc

SEQ ID NO: 62320 - DNA, 1624 bp, Bovine  19866880505670
  misc_feature (1)..(1): n is a, c, g, or t
ngagcggaaccctactgtgtactacctatgccgggatctgggttgcttgctccttttaagaatctaatgcctgatgatctgaggtggagctgaggcagtgatgctagcgctggggagtggctgcaaatatagattatcattagtacagtaaatgtaatgttcttgaatcatcccgaaaccatcccccagctcgcccacccgcctgtctgtggagaaattgtcttctatgaaaccagtccctggtgccaaaaaggttggggatcactgctgtacattgttggctctgttggttaaaactcggttttgcatttctgaaataggcatgtgtctcatgatagatgtgcacatttattgtagtgcttgttttcttccccaaaagctcttattaaattgatgatacatcttaccaatgaatagtgtctaaagtgaaaaagttagtcattcagtcatgcctgactctttacaaccccaaggactgtagtccaccaggctcctctgtccatggaattcttcaggcaagaataccggagtggattgccattcccttctccaggggatcttcctgacccaggggtcgaacctatgtctcctgcattgcaggtagattctttaccgtctgaggcaccagggaaacctaagcttaatagtgtctaagaatcgaggaaatctgatccagtagttcagtcctaagcatgactgtgtagcactaaataatgtctagagagaaccttcagataccctccaggaggacagaagcaggtctccttcttatgaatctcttcaacagcatcagtagtaaaatatgctgatgtccagtcctttctctatgaagaagctgctgggaacaactgtgggatttggtttatttgcatttatttttcactttctcattgttctaggttggggacatcctggattcctttgacattcctcttcttcttcaacctcaatgacctgcatctctgaaacatactattccctgattcccaaatgacatcacagatggtgacatattcattttagtttgtgcatcgatcctggatctgacctatgagagtgaccaggatctggcctcttcccagggttcccaggccactcattctcttatgcaagctctggttggatttactttaggcggaggaagagcgcgctcaggcacttgaccagacggctcagttatcgtttactagctgcataatcttgggaaagccgctcctccctcctctggtgtcagtttctcatctgttgttgttgtttagtccccaagttgcgcctgcctctttgcgaccttatgaactatagcttaccaggctcctctacccatgggattctccagacaagaatactggagtgggttgccatttcctactccaggggatcttccagacccaggtattaaacccacgtctcctgcattggcaggcagattctttaacactgagacacctgggaagccctttctcatctgtacagtggtgctttttaaagggttttttttttctcatctctataactagcctgacctttttgcccctttattacaaatctctctaaagccatagcagaggggtggggtactgactacaatggagtcagtccatggcactgagggcttacagtattc

SEQ ID NO: 62321 - DNA, 1523 bp, Bovine  19866880505702
  misc_feature (1)..(1): n is a, c, g, or t
nataatcagggtattgcattcaaagtcacttaagtttgaataggcttttccagtgccctttgattacttaaatgtctcatacctgctatgttgtgcctttataaacgctcgctgctctagtataggttggcttagactcaaatgcaaagaggctcatgttctctgtagagagaatcttctcaaaaaaatctacagcagtctccatggggttttaaaccacccatcattaacctggtgaccagacttttccttcgatagccatctctacttctgaaccatcctaagccctagaactcctggggagtttctaagaataggagggatttattccatagcttactttaccttaggcaaacagtagctgtatatcctcatgatttccctttgcgtccaaagaagtgaaacccaactggtaactctcccaaatctgccttcctgggagggcagaccccactgaatgtgaccccatactagggcaagttctgagccattagcaagcttattgtcatgcttcttaccaagaaaaaagcacctgactgaggaggttaatggaaagagagactttttttcaataagagagagactctttaaagaaggaggatagcaaaaatcagttgaatcatgggtacaataggtccaagagccaggggcctttaaaactggctgaagcacccacagacagacagcacctgcataggcaactgcttcattgctgaagaatgctgcatgagtcagagcatctacctcacccacacttgctgcgggccctccctcatctcagatgttctcttggtcctaagcttacattcagccctgtgctgcctccttgctcttcctgagtcaatcatggggaggaaagagtatccctagaacccgatgcattagtttcctggggctgctgcaacaaacagacagggcctaccctggtggctcagtggtaaagaatccgcctgccaatgcaggaggcacagggttcaatccctgggccaagaagatcccatatgccttgcagcaattaaacccatgcaccacaaatactgagcctgtgctctagagcccaggagccacaactactgaacccacatgctgcaactactgaaacccttgggctctacagcccgtgctccacagcaagagaagccaccaaaatgaaaagcccttgcactgcaatgaagaatacccctgctcactgcaactagataaaaactcccacagcaatgaagactcagcaccaccaaaattaaatacaaatatttttaaaaagcagacatttattctctcagagttctgtaagctggaagtccaagatcaaggtgtcagcagggttggttctttctggaggctttgagggataaactgtcctgcctcccagcttcaggtggctgccagcagctcttcacattccttggttttgagatgcatcactccaatctctgcctctgttgtcatgtagctttattccctgtcttctctgcatccctgtgtctgaatcttcctctcctctttctcataaagataccagt

SEQ ID NO: 62322 - DNA, 1867 bp, Bovine  19866880700478
  misc_feature (1)..(1): n is a, c, g, or t
nagttctacatttctctgattaagtctatgaatgctcatggcaagaataatcattgaagttttcatagaaaaggtggggctgggacttccctggcagtccagtgggtaagactctacacatccgctgttggggggtgtgggtttgattcctggtcaaggaactgggatcccacatacctcatgttgtgaaccaaaataagaaaagaaagaggtagaagaggtggggcttgttcaggtctttgagtgagatggatttggaaagcagaggggagttgggaacatcataattaaggaaatagaaggaggcatgttgaattggatgtggaagaggacatcaaatagtaagtggtgggacatgcccgggaagatgggtctttgaatactaggcagaggaattcagacttcatacgagggaaaagcagcccaggaacaaatggcttttctttttaaactgtctgctttctccttgtgaaagtagaaaggtcatacaatgaaagtgagtcatcattctttcccactcacttagcattcagcataaatcaacatttgccctgggtgaacgggcaggtagttatttgcaaggctgaatcagatcatgcagctgatatgggtgctgcctgtctgcctcctctcctgatgctggtcaggcttcattcactggaaatgcattagcactggggaactggtggggatgtgttcttttttccattgaagtatagttgctgtacagtattatataagttacaactgtacaatacagtgattcacaatttttaaaggttatactccatttatagttattataaaatatgggctatattccccatgttgtaatatatcctttgcaccttattttatacataatagtttgtatttctcacccatatattgtccctctccctttccctcttcccactggtaaccgctagtttgttttctgtatctatgagtctgctttgttgttattttcaacagcttgttgtattttttaggttccacatacttccaactcccacatcttcttaaaccagggatggaatccaagtctcgtatgtctcctgtactggccggtgggttctttaccactagtgccatctgggaagcccagtgttagtccctcagtcatgttggactctttgcaaccctgtggactgtagtctgtgaggctcctctgtccacgcaattctctaggcaaagatactggagtgggtagttattcccttttccgggggatcttcccgacctggagattgaacctgggtcccccacattgcaggtagattctttattatctcagccaccagggaagcccttcacatataaggatatcatgcaatatttatctttctctgtctgacttctttcatttagcataatgtggtggggatgtgttgttgaagaaggatgaggatgggatccctcttctggtaagggatctcaccaaggagcttgttctaaaatcttggaggtaggaaagtgttctcagggtggatgggcatgtctggaattttaacttataccactgaacagatgattgtatcctagagcaagcagaagtgctttcttgggaattaataaaacaaggatacactgtcttcacctgacaaccctgctagaaatttggactttcaatctggggcatttaaaagcccattaaacatggtcactgggcccctactgattgcagcagccccaaatcctccactgtcagagatgccagactccattcttccccaacctggccaccaccgtgagcagtcagctgtttaagcagaaatgatcctttgtgaaaatctatatattatttaatgcctttgccctttgcctcagctctctttccccatagcttctcagccaagatttcaat

SEQ ID NO: 62323 - DNA, 733 bp, Bovine  19866880717099
  misc_feature (1)..(1): n is a, c, g, or t
ntggcattcctggaaggctggcactgcctcaatttatgcagcagctttttctcacaccctccctgactctttcagtctaatatcttttcagtttcaatttgcatcaaccccagagcctatctttgcccatctttactccattggccaggctttaaatgcataagatactaaaactattaacaaaccagggactttacataatcagacacagactgcacaataggctggaataggaaacaggaagggcctccttcccttcaaaggtgaacaatgggagccagagttgcatttgttagtaagaacttcatcgctgccagtgtggggcttaggcagtttgaaaaggattagaagcccaaatcagacccattttaaagcacacacacacacagacacacacagaaaggcaatgggttctgcaaagacctactttctggctttttctctcacccctcccaagcctcatgttaaaaacaagtgagtgaaagggtcagttttgccaaagagagccaagggtgaaagcaatttcatctcctgaggaaagaccaggggagccaattcctcaacccatattttctgcattttcatttgagaacaggggctgggaagggagaaagaaactgcacagtgaggttaggaaagcacgtggggctggaggcagaggacccagggtctctggtatctgaggatgcttggacgtgtgtatgggtgcagccttgcctgctctggtctctgt

SEQ ID NO: 62324 - DNA, 925 bp, Bovine  19866880737184
  misc_feature (1)..(1): n is a, c, g, or t
ncacagattcatccgtctagtctttaaatctcatttggtttgtctgttttccctaataagaagaatagaattagttatcttgctactcagcagggctccagtatggaatttacgtaaattatctccttaataaaattactaaatatagaatcaacatggttgcaaaggggaaaaaaaagtaatgttctcagattgtgtctttaaaaaatgaagcaatgttccaccaccaagggaaatgaaatttagcttcttaaccagtaggtacaatataagggagggggaagtgggaagatcagggagggtgggggacaagatggggagagagaaagggagaagtctctaagccagacacagagataaccatttaattaattgctctccagggatttgctgggtgtttggaatcaggtcaagaatataaacagttcttgccttcctgaaaagatattctgattaccttctctcgtgtcaaagagattgatccaataaaataaaaacactagatatgtgacaataggtcaaggtagggtgtgtgtgtgtgtggtgtgtgtgtgtgtgtgcacgcaaccaggccaacactgggcataggggctaagtagaaagcataatgttagaacctgggggcagaaactgaaactttgttttaggggcacatttttgtgctagctacaggagaaacacagaaaagaccccatgatgttctgagtcctcccttagttcttacatataagatgtcctctgtattctacctaccaagtctcttgttttcaagggtccccatcactccctttattcggttccttctctatttcaacactctccataatactctcctgtaactccatctctaacctctcatattccatctccatagggctgtcagaggcatcttcttaaagtatgcttagatcatgcattgtgctga

SEQ ID NO: 62325 - DNA, 888 bp, Bovine  19866880956127
  misc_feature (1)..(1): n is a, c, g, or t
ntgaatccaatcttcataaattcccagctgcagagatgtcattatccacacactgttgggtgaagaatagacctgacctttagttcagtcctgtcccagccctttctagctgtgtgacgttggatgacttacacaaccattctgtgctggggtttcctaagctgtttgacagaaataatgaaacctgcctcatgttgttggaatttaatacaacatggtaggtaggcatgtttttagcctagtcctggaatgtggttttgatccattcccttcacaatcctgggccccgctggctgtccccatttctgatcccctctccaaccttacttaaatatttaccaatcctctagcacatcgaaagctgctctgggtcctggatggcttttgctgtctatgttgggtgggtctcgtgtgtagtggatgctccgtaaacatttaccgtctgattgaatgattgatcttcctttctcctctatcactagtgcttgtctttttttccctccaaactggctgtctatgtcctggccctggaagcccagctggtatccaaggacaatgagatgaccccaaaatcacccacttgcttctactcttgtggctgagacctgagacaacagctcttccgtgaaccagctctgatttttacccttgaggtctcaggttctttctcaatcctgctttccatggattggcacctactgaggtcacctggcacttcctcctaggcgtgatggcactcactgcccttgtaatttctcctatctttttttctgtattgatagctgtgtgatgctgggttgccatgacaactaattgattagcatccaattcctggactgggaaacatgcagccataaagaattacaaatgatgcctgattgtctgctg

SEQ ID NO: 62326 - DNA, 3546 bp, Bovine  19866881021718
  misc_feature (1)..(1): n is a, c, g, or t
naatattgctagggtcatgtcacaaggattcagaggccagctttaaagggctcctagtggtcaaagatgggacaatctgagctcaaacatgaggataactacaatggattgaagctcataaaaatgtttacattgaaaagcttataatgattgtgtgtgcgcatttgtgtatataccctttggaaaatgataaggaagcaactcattatcttgaaaattggtgaataaagagaaggagtccaacattaaaaaaagaagaagaaaatgcagtatataaacacaatggaatatccaaccattaaaaagaatgaaataatgccatttgcagcaacatgaatggacctagtgagtgtcatactgagtaaagtcagtcagaggaaaacaaatgctgtatgatatttcttatatgtgaaatctaaaaaacagtgatacaaatgaacttatttacaaaacagacagagacaggcttagagaacaaactcgtggctacaagacgggaagggctgatgggggaggaatagttaaggagtttgggatagacatgtacacaatgctatacttaaaatggataaccaacaaggacctactgtgtagcacagggaactctatacaatattatataacaacttaaatgggaaaataatttgaaaaataggtacttgtatatgtataactgaaacactttgctgtacatctgaaatgatcacagtattgttgaagtgagggtggaagttggtcagtcgtgtccaactctttgtgaccccattgactatacagtccacggaattctctaggccagaatactggagtcggtagcctttcccttctccaggagatctccccaacaccagggatagaactaggtctcctgcattgcaggtggattatttaccagctgaaccacaaagggaagcccaagaatactagagcgggtagcctatcccttctccagcagatcttcccaacacaggaataaaactagggtctcctgcatttcagatggattctttaccaactgagctatcagggaagcccacagtatcaactataatataaaataatctttaaacaagaccccttaaaaccctccgctgccatgtctttcttcaatcttcaatgtcaaactgtggagtggggtatgctcttggttctctccaggcctttgtttctttcacagatgaatgtgcgaacggactagataatctccaagttttctttctgtcatggactgttatgcttcttagacaggtgtgaacagctgtggctggattctagcagaattgtgataaagcatcttggaccaattttcttcttacaaccatttaatataggttttcatagattgaaggtaattcctgcccctgccattcatgatagaggcaagtaaatctgacaagggacaatgaaggaaaaggggcaaagggacattaaaatatatctaacaccagggcctgaccctgtgccaggtgatgcccccaacataacatcatttggaggtacattaagtacacaggaacccaggctctgggttccggctgcctgtcatggaactctggctgtaatactaagtatctatttggccttgggtaagttatcccacacttctgcatctcagtcacctgatctataaaatggtactagaacacccttgttacaaatttcctgtcagaagaatatgacaggaatgtttgtacatgcaaaggacatagaaaagatactgacacatattaaatgtttgtacatgcaaaggacatagaaaagatactgacacatattaaatgctgaataagtgttagctattattactactattcaatctttttattatttatctatggctgcactgggtcttcattgctgcgtgcaggtggtgagtgggggctactctctggttgcaattcacgggcttctcatggtggtggcttctcctgttgcagagcatgggttctagtgtatgtgggctccagtagttggtgtgtgtaggtttagctgctctgtggcatgtgagatctacctggaccaagaattgaacttgtgtcccttgctttggcaggcagattcttaaccactgtaccaccagaaaagtccactactattcaatcttaatcacacatgccttttacgaatatgaaaactgagaatcagggaggttaagtagcttgcttgaactcacttagccactgagtggcagagttgggattcaaacccaagtttatctggcttcaaagcccataatctcttttctactctaaaagtcttaagagacaagaatctggaagaattatcttccctctcaattttggcttctaaagcatcaccataagaatgttttaaagaaaactgggactcactcttcatttcccacatagactctggtttaggaaagcaaccataatgtcgagaacttgatgcattgagcatgtaataaatctgggcccagtcaaaaactgaggctgcagcagaacctgtgccattggcttcagaagatccctttccactggctggtgggagagaggtctcctttggaatcagacatttgtaatggaaataggtaacttagtctctgaaagtcttgattttcacatctattataggaatgggggcatccgaggtggttcagagataaagaatctgcctgcaatgcaggaactgcaggttcaatccctgggtcaggaagatcccctggaggaaggcatggcaacccactccattatttttgccttcagaatcccatggacagaggaccttggcagttcaggtcatagggtagcaaagagtaggacatggctgaagtgacttaacatgcacacatagaaataggagtctgggccacctgcctcgcaggatagtggccagggtggcaagacaccacttccgccagttccctcgaacattacacaggacatcttagctcctctttattttctttctgctttcccctttctcctactgttccttgagcagataattcttcctaacaatcagaaattaagtatctaagatcttgcaaccattgctgtgtttttatatataaaaacaaaagcttattgaggactgtaattgctcagggatttccctccttgaaacgtctttgggtaaccagtgtctctggctcctctcatactgtttctgatgttaacattttaataacacattcagagtgtttttgttttatgaattttaatacagatggaagttctccccaagagatgtttttaaaacaggtgttttaaagtgaatatccacatgcctatttccgtgactaaaagccatttttccccactccagacgtcaaattgttctagttttcaggcagctccaaagtggtcacctgttttgtttagcatttctttacttttctctgaactgcaagctgaaagatccataagtgggtgcgtgcattgtacaagtatgtgtatgtatgcacatgtgtgtgttgaacattcagagaagtttgcccacagtttgatgttaaccttctttctcacaatggttcaagaaaatagctgtaacacctctgaaaatatctctgagagtgtcttcagt

SEQ ID NO: 62327 - DNA, 1405 bp, Bovine  19866881040947
  misc_feature (1)..(1): n is a, c, g, or t
nggacgaggaggggatcttggctgccctttgccattctctcccagtcaccagctccatcatgcctggagaagaccctgatgcttggaaagactgaaggtaggagaatgggggtaacaaaggatgagatggtcggatggcatcacagactccgtggacgtgagtttgagcaagctccgggagactgtgaaggaagggaaggctggtgtgttgcagttcatgggatttcaaagagtcagtgacgactgagtgactgagcaacaacgaccatgccgctgtgtctcagcctcacacagctctgagtctagcctgctctgccactcctggtcctgcctcctggagccctgaccgttcccacactgtacactctgcactcccaacaggctctgtctgacaggttgtaaatagcctgtttgaaaattaactgcatgtttggggctggtgcttgccatttgtaattgctcattctttccccagccacttcctcctcctatttcctaggttcgattcccaggaggcagaaccaagagcctctgggcaagtgactacaggagatgatgaggccccatgggccacacaattcagccagatttgctgaccaggaagcctctgtgcaccaaagatttgcttcaagccataggacagaaaagacagaatggactcactccttcctaaagaattctttgagcagcagtgctctggctacaaagatgcctatcatgacctagagcacatggaccgtcctttacttcagcatttggggcagcagaagccagccctccaatgatgtctatctactagttccctcctagcaccctgcttcccttaggtccctcagacaccaaatgatcagcattcatttactgaaaacctgctatgagcaaggctgccctaagaattctgtgtgatggatattccccctctgagttgaaaacagtgctatcagacaccaggcgttgcaatctccacatctcctcacctctattggcctggtcctgttcggagatagctgaccagtaatggagcaaaccctcctacaggtccatcatttccatatttgttgctgttcagttgctaagttgtgtctgattcttttgcaaccccatggactgtagcccaccaggctcctctgtccatgggattcaggcaagaacactggagtgagtttggggtcaattccaaccattggcacccaaactctttggctgctgaagttcactctagcttgaagtgtcagggaattgtcccactagggcagccctcaaccaatgactaagaggctaacagaggttgatagataaatagccctcctccctcacctctcaggctggataactttgagctgcacattccatactggcttctggatttaccagcaaaatcatccttcattttcctacagggaaa

SEQ ID NO: 62328 - DNA, 1384 bp, Bovine  19866881063124
  misc_feature (1)..(1): n is a, c, g, or t
ntcacccacctgcagccccagaccgtccaaattcaagacataaatcacccactgccagcatgttgctgccctagacaagaacccatgatggatctctattgctttttgaatccaaactactgcctggcattcatgatgcttcgccttcctctcctgttttcatattcagccaactgtgtctctgttctctactttgccaacacagttgtctctatgcttcctctgaaacccccacccttgaaaaatatcccggagccaagaaaactaccccaaatacatcaggctcatttgtatctcctttcatagaatcatgtcttgtgtttgtctctcaatcccaataatatccatctttggagtcaaatttcaaatcccacttcttagacaatctgaatccacactgacatctttttttttttgatggcctggagcacttttgtctgtagcagacatgttggcatgtaattctgttcaagatgctgatgttgagttgttttatactcatttatccaagtgttgagtaatcattcattgagtgcttgtgttccaggcgttgggctgattcgttaatctaggaatcatccctgcttttttttttctcaccttcatgaccaatcagtcaagtggcctgaggcatgtgaagggtgcttccaaaatgtgtgctggtttggccacatgtctacaccaccgcctaccccttgcccaccgttcttgtctgcactactgaaatggccttccgactggtcccccatagctatttttgcctcagtgcagtttgttctctacaaaatagaatgattttttaaaattttattttatattggagtagagttgatttacaatgctgtgttagtttcaggtgtaccacaaagtgattcagctatacatgtgtatatatgtatattttttttcttttgcagattcttttcccatttaagttattacagagtattgaatagagttccctgtgctcgacaataggtccttgttgattatctgttatatatgtatatgttaatcccatcctcctagagcagcagttcccaaccttttcggcaccagggaccagtttcatggaagacagtttttccacagatgaagggcagggggatggtttggggctgattcaagcactttacatttattatgccaccactgataggacaggaggtagaactcgggcagtaatgcaagctatggtgagctgctgtaaatacagatgaagcttctcttgcttttcggctgttcatgtcctgctgtgtggctcagtttctaacaggccaggaactggtaccagtccctggcctggaagttggagagccctgtcctagagtgtgttttaaaggagaaaattagatcatattggtttgtcaccattgttaaaacc

SEQ ID NO: 62329 - DNA, 3975 bp, Bovine  19866881067827
  misc_feature (1)..(1): n is a, c, g, or t
nggaagcccacccttttctgtgcccatggtaaatcacccccggtttactaagaggcttaaaaacagtgccattccatgtgctctggtaaagactctagaagggctgaatgggggaagtgaacctctgcttcatgagggttagctgggtcctggtcactcgcaggacaatagggcctctcttgctccagggggtctcccagcagacttgaagttttctcacatggcagcttgggggccccgagtatatgtaaaagtggaagctgccaagctaggccgaaactggtggagcgtcacttctgctgacttggattaatttaagtgagtcccagggtttgtctggactagaggggagagggctacacagggtcatcagtgcgggcatattcccatgggtgtcaccaatgcagcggcctgccagccttgggccaggtccaggagaaggggaggggtcacccaggcctgacatgacatgccccaatactggggttctggatttagatgtgggctcctgtccaggcttggccagctgcctgaccttctttgcactttgttagctcaccccctacaacccccccccccacacacacaccgaccccctgcccactggtgggacaggacatcacctttcttacttcaaatgcaggagctccagggagcttccaggacacagccaggggaaggagggtagcttgcttgggagggtgtgactgcctcccccgcgccgaccccctgcacatccccatcggcctcgttggcctcatgtgctccttgctggcctgtcacctatgcagacaggcagggagaccacagctatgggaaggccgccctggggtgcatttcttgtcttccctctcctctccacttctctaatgttccactcatgctaccaaagccccctccacccatcaccttcccggagaccctgatctttcccacccagaggcacttacatctacccaacacatgttccacaggctgcctcgtatttttaattccctctttacaagtcccttctgtctcctgccacctgagtagaaaagccctttgagtttcaaatctgggcccagagcggtagggattgcttgtcagtgaacaaggcaggctggcacggagaaggctggacagatggccattgtggtgactgcaccttcctagctgggaggcccgggggtggtgacaatagccaccctggtctccagccaatgaggccatatgtaataggccaaggagctggctggcgaggtgagaggctggagggaagaggcatggaggtctgaagttggggctgggggaagggggctctctttcggagaaccctctgcctttgcaggggaccacagcccttggtttcctttccacctcctcaggttctccccaagacctggtcacacagataaggtcacagggttggtgaggggcagggaccagctgaaggtctatctgatgccaaggcccctgctttcctaccagccaatacagccactatcaaagctgtccctacccctccaccccacccccaaacccctcccccaacccgctgcaaaccatccccaccactggtgggaagggacatcacctttcttactccaaatgcaggagctccagggagctgccatgccacagccaggggaaggagggtagcttgggagggcatgagaaatggcattctttattcataaataaaaacataaaattaccagaaatagtttacatggccaaaagggggcatcaaaaataaatcaaagctgtcaaaagcagagcaaaccaaacaagacacaaccaagagaaaaataactctgtacatagtcttccaaatgctagtccatccatagccagcctgggccggagttcccgcttagcctgcagaggaagcgcaagggggagcacagataaatgaggaaggcggagcatgaaagcacacaggtgcatacacaggtgcgtgtcctcctggcagggacagctgcagctctgaccacccagcctgcctgacccctaggatctctctcccaagaagtggcccaggctaggccgggagtcgagcaggggcagaggctcggtgggtgcttctcaggggagaggtaccccccaacgcagtccccatggaactcggtattcatggggaccgactgtgcccagcaggggttaatccaaatgcagagaccagaggataaatccagggtgggcgccacatgagagtctggtcactctaaagcccagaggcagagcccccctcggtgtggctgcctccttgctcacagcagagagcttcaccatcctttggctagcagagccgcagctctgatccagcgagcatgcgtcttagcagccactctcgggggaagaggcggcgagctcccgctggccctgggccaggccgcctgttccgaggcctgcgtggccgacttctccagtcctgctcagcctctgctgctcagaggctccttccggagagaggctgggtctggcaaggtccaggaatagcatggaggttttagcacagcgaagggaagggaaaccacaccgcggcgagatcgctatgttataggacactctcattctggtgcaactgggccaccctggagccttgggctggtggcaacccagggagggctccatgggttggcctggggcagagatggggacaggggtgcagggcactatcacactgaggtggagctgctgtgcccctgagcgccctcccctggggcttagcacccacctctttgcagcgaggtcttgagggcagagcaatgggcttttggctgccctttgggggggtggtctccagcccgaggagggggcagcagcctctttctatccatcaggacagcctctgggaggaaaggactcagacaaggcacaggctggtagagatgaagcaaccaggagacaaggggtgggaagtctttgacttggggagtgggggtgatctgcctgtgtcctgtggaggggactggcctccaggcagagagggagctctgggcctgtggattccgggtttaagtctagcctatgactaagagtaatggcttgaaattccagagaggctcctctgtcacgtgaaggcaggacaggcacagcctagcttggggaatggaaggcagagccagcatccgggaaggcggccctgctctcagtccaggctcaaggagggactgtggggggaccctggcaggatgggaggctggaggagaagcagctccccactaccacctggggcctggaggggtccacagtcggggacagaactggggagcaatggcctggggctgctgcatactcagacattcagttaacccccctcagcatgcgggcgtgagcccaggaatccagccggggctggctgtcccaggaacagcagctgcagctcgaggcaaaaatagaacatggaacagcctggctgcctgcgagatctggcttgtgtctgaaaagacaagaaaggaaaaagaagaagaaaattccctgaaccaagcaactgagaaacaatcttttctccgcacatctttgaaaaggaaaaccagccttctgcaggccaggagtccttgattatggggctcaggtggggctaatgcaagcagaggggggtgcagccgggggccccagggctgttcagaggctgtgtttgagcctcttactgtctttggacactggcactttggggcccctccctgacctgtaaaggctctgtctgtacttagccctggaggtgacaagggacatgaccggcagcaggatggagctgaaggtgaagggggaaggcctagcccagatgaccctgtgccatctcagtggacaaaggttattctgagttcaagcaaagacttggttcttaggaatcaaaaccaatgctgagcaacttgaacaggaggggaaatccctatctctggtctcatgatgaccccatcctgggggctcccctggggacagcttggagtcacacactcccctgcatcatctttcttcctcagcacccat

SEQ ID NO: 62330 - DNA, 1155 bp, Bovine  19866881122112
  misc_feature (1)..(1): n is a, c, g, or t
naactgactcattggaaaaaagcctgaagctgggaaagattgaaggcaggaggagaaggagactacagaggatgagatggttggatggcatcaccgattcaatggacatcagcttaagtaaactctgggagttggtgatggacccagaggcctggcatgctgcagtccatggggtctcaaagagtcggacacaactgagtgactgaactgaactgaaccaatgagccatactgtctctgtcaaaattattccactctgctgttaaagcacagaagaagccacggataatgtgtcagtaatgtgtgttctgataaaactgtgtggcactgaagtttgaatttcacatagatctcacgttatataattttatctcttcttttcattttataccccccagactattaatatattcaagaacaggctgcagggtgaatttggcctacagttgattggccccctctttcttcagccatgcagggagatggagggacagtttactcctcctaggccttctccatccctctgctcatcaattcctaaagctcaccatgacagtaaaaacctccctagaaaccctggccttgacctcccagtagctgtgctccattgcttggctctaacctgtttatcagcacaagacattcttttaatttagcaatctgcaaaggtctcggatgaaaagccttcacctgccctttttctcaaatctgacataattagctacatctcagccccaccttctattctctcttttaatgagcagctccagtcctgaatcgctttaaaggagcaagcagcctcttggtatcaattaaaagagaaacactttccaacgcataatctgtaacaagccacaaataggtacaaagagaaatctggagttctggcactactaacagaacaatgcactctgcagtgattgtctctcactcttttggaggaaaaaagaaaacagggccagcattctaggtaatacattactccaggtggacgtggctgaacgctggaatcctcaagccagagacaggagagctgtccaacaaccatgtgatgaaatctttcagcttgatgttcttgtgctttcggatgcagaagccctgcacagccccagagagctacgtccagagaagagatttaagacgagtgttttaactg

SEQ ID NO: 62331 - DNA, 1088 bp, Bovine  19866881125981
  misc_feature (1)..(1): n is a, c, g, or t
naaaagtagagacccacaccttgcagggggcaaggagagagaggttctagaaaaaggccaggccaatgattcctttactggacttttcactgaggttaggtttactttatgacataagaactgcaagacaggcggacctaggatctcaagaaacaggagattaaatcaaaatgtttaacatccaaaagctctaagtgtattactgaatcttgctcaaagtataaaagaaaatcaagttttatttccttgtgactagaaatttaaccaatgtgttcaagattatttcaagtctgcagatctcattttccagaccttgttaacagccccataatcccccaatttttcaaccagcatcctatttgtacagtggaactgccaatattccactcctttattcaaaaaacacacattaactataacttttcacttaggatggtaacatctttaattagaaaagtgacaaggttaatcaatatttattcagaagtgattaaagtgttaaccagaatcaagaatgtagcaatgtaagaaaaaaatgacaaatgctgttagctgttagcatacgtatggtatcatttgtgctttttagaataatccagacatagaaggaaaactccaaccaagtacaccaactccctactcctgttccatccacattaaggattcaaacactaaactgttagaataaggggtttaaatacaagctacacaacaattacaaaacagaatgccttttatgtgtgagcactggactaggcactgaggatacaaaaaggattcctgaaccacaaagtttcagttttaagcattgtgttgcaatcctgcatcttatcagggggaatctcatctcctgaagttcttcagccactgctaagcacacacagactgtccagaaatcatacctcccttaagagctcacaaccttactcatggagtactctttcaactacgtttcagttgatactctgaattgagactgagtgaataattatatggaaaaatgactactgcctcttctaatcttttcctagaagcaccactaatgtcttatctgttccacccaaagaacatcaaagcatacaaatgca

SEQ ID NO: 62332 - DNA, 1506 bp, Bovine  19866881150548
  misc_feature (1)..(1): n is a, c, g, or t
nctgcctgcttagacttttagataactgtccaaccctggaagagacagattccctaacaagtgatatagcccagaacctttcaaagcaaggatgctgaatgagaaataaccaaccacctcctattgaaaatggtgttgggatacgaggaatcaagtcagaatattttcttctcagtttttccataatctagtttaaccttgcatttacattgaagcttttgctaaacagttatcttgtgagttttggtggctggtggctggaaaaaacctcttcacactaaagctagttagtgccatttgagcaagctttgccggtggctccgcggtaaagaatcctgcaatgttagagctgtggatttgaaccctgggtcagtaagatcccctgtaggagggcatggcaacccactccagtattctttcttggagaatcctgtggacagaggagacttgcaggctacagtcatagggtaacaaaaagttggacacaactgaagcaacttaaaatgcatgatcaccatttgaaccctttgctttagctaaggtgactgctttactattctctgctcaggggaaggctgcctacctgtggtctccactgcccaaaccaaagcacatcaggcactggatcagtcacacggttgctgaggtaggcacaggagccatgccttagaccctggcatcccagtgaaactgggccaatttcttatcttgctctttgactcagttttcctttagatgaaagaatggggtggacatatttcctaaggtgacttgaacatcttactggagatgagtcatcccaggataggaattctgaggtcagcacgttctccccagggcctggaggtgtgtttgttccctccacaacttccctggtctcctgaatgggaatataggttaagaattcagagtaataatataataatgtcagataataatgtcaccgatgataatggtggtgataacaataatgctaaacaacttctggaagttgtgtagtactttctaggagaggagaaagactatttgcattttatctaacttgttttcttaacaggtagagaagtcaagggaagagatggccctctcaaagcacaggagtttagtgatatccagagataagagatgtaaggtgcccagagatgtacaagaaatgtaaattctggttctaagagcttcacatcctggagggagaccaggacattggttgggcatcttctaagatcaggaggcattggctttgcctgaaggaaaatcaacctacccccacttacctaggctagctggaagatagatggagtagtggaagcctgttgatctgttaaagcttttctcaatgctctgctgcatgctaactcacttcagtcttatccaactctttgcaacctcatggactgtagcctgccaggctcctctgtccatggaattctccaggcaagaatactggagtgggttgctatgcccttctactaggggatcttcccaacccagagatcgaacccatgt

SEQ ID NO: 62333 - DNA, 1014 bp, Bovine  19866881161980
  misc_feature (1)..(1): n is a, c, g, or t
ncattagagtgattctattttcaaaaaaagtacatacatccaataaagaacaaagacccttacatatataatgaaaacatgtacagaatcttccctagtagagagtagaaaatgtccaaacccaggaaatgattgctgatgatacttttttgggatcacaaagtgaaaaggataagtagcaaagcaaagaaatattttacaggcacaatttgaaagtgttttcatatattgctttgttcctatgaagttattgaacttttctaaagattttttttttctttacagtctcaaaacaaatgaagaagcacttagataaactatcagtagaaaaaacagtagtaatttgtcaggaagaatgagtataatttgaggggatggggcctccctgtatttccaatcacatggattgaccaataagaggcaacttctatgacccctgctcctcctcctctgcgccactttgttttaggaaagctctgtaggaaatagttggaaacagcggtaagcctgccataggctcccctctccaccaacatctgggcttctcattcaccttccccagagcgctgccctctccttgacctccatagctctgcaggctgattagcagcactgcacactgggaaatgagactctggggaactaactcaatccacccacacatgcggcgtggactgccccatgtacctacaccagagttcatgcaaggggacaggaaaaagcatcacaatgtcagaatctacactaggtcctctagttggggctctgcttaattttatacactggctaggaagaaggaagagaacggagtgcttctactttgcacacagtttgaaaatagagttgtatagatatgtacttaaatcacagatacacatatttctaatttgatccctgtctctaccatgtatttgtgctgtgctgtgctcagttgcttcaatcatgtctgactttctgtgaccctatggactgcagaccaccaggctcctctgtccatgggattctccatgcaaa

SEQ ID NO: 62334 - DNA, 1711 bp, Bovine  19866881171610
  misc_feature (1)..(1): n is a, c, g, or t
ncactcctcagcccggtcatagcaagacttgctgacttactggccaccatgatatcacctgcttcatgcttgatgctacatagaagagatggggtttgccttggaaagcttattttccttttccagaaaggaaaattcaaaccatgtcaaagacctatagtatcttattcacagagactataatcagtgtacatacacgcatgctcaattgctcagtcgtgtccaactctttgctaccacatgactgtagcattccaggatcctctgttcatggaatttcccaggcaagaatactggagtcggttaccatttcctcctccagtggaccttcccaacccagggatcaaaactgcatccccttgcatctcctgcattgcaggaggactctttacctctgagccacgggggaagcccctctgacaagtgtatgttctataaatttcagtctcggaactggagatgaaacgaggtcagggcggcctctctgatgggcaaggtgaatgatccggtagaaaggaagcataaccaggaggccgtgctagggcctagctctgccacctgccacccaagggaccttaaaatgtcaggtaacttctctcagctttaattccctcatttaaaaaatggccaaaatccaatggaacctattcatctcatcaggctgctatggagatggacagaataaataatacaagcaaataccctcaggatggtggaagttacctctgactgatggaatgcatgtcctttgccattggtgggtgatccacacacctggtctaggaagcccctctgcgaaaatagatgtgatccattgggcctcaattacctcattggtcaaaagcaaaggtagaactaaaatcctttttttctcgaaaatgcagggcagtgaaaaatgactcaaggtggggcaagagcagagcatgaagctacatttaatcggtgagaaatttatttcctttttaattatctttcaatccttcaagtctcagcttggctcgaattttcagttaacacctctctaatatctgctaatttgtctttccaaagaagagagagtaggcctccggcttagaaccttggcaagcagcagtgcctacctagaatttaatgacttagccgagttctccttgtatttcttttctgccttccacttatgggaagtaatattggtttttccatttacagtaatgatggtttcctttctggacatgtttacataaaaaggtgagtgctattaaaggaaactatcatatcaataatagtgcagagattatacagataatggcaaaaatcaaggcaggagtttgagaaatgctgggccagctgatccctaaaattctttccagttgtttctttctctgacactctccccccactttctgatgggggtgcaattcccaccatggcttgtctctactttggaaagagtcagaccttcggagaccctcatttagaacaagaacaacagtgaaaacaaaaggagggccttagaaagttcccacagtacattcatgtatgatctcccatttgatttccaccattgtacaaaagagaaaaaggagacgcctctgaatttacacgatttgcctaaaatcattctgtaaatgattaatcagggctctaacaacattcctccaaagccctgattctttccagaatttctcactgtttctatacccccatcataccaggctatgagataccaaga

SEQ ID NO: 62335 - DNA, 1269 bp, Bovine  19866881191714
  misc_feature (1)..(1): n is a, c, g, or t
nagtttgcttaaattcatgtccattgagtcagtaatgttatctaatcatctcatcttttgctgcccccttctccttttgccttcaatctttcccagcatcagggtatttattagatctccttctaacagctacctttccaaggttcttctccttcatacccaggggcagtaatgcccactttgagttgttaaacccaggaactgtgcttttccttaagccacacctacatctttgtaaaggtacctttattagattctccttaaatttgtaatgactgccactcatttgctgatgacccctgactgatgctggccctggcttctgagaactatccttgggtactgtgacagatatgaaaaaaaaaaaaaaagtataaaacaggatctctgcttacaacccagtgggaagaaatggtttgtgataaagtcactgagaagcagtggagcaacatctgagcctttttcagctgtgaaatgaagggaatgaacccaaaatatgctttcagggattccacaaaacaagaacatattttctgccaatgtttttttttgttttttatctcactaactatctttatcactgtctaactgatactttattaaaagtaaacaagattttcaaggtagtttctggatccaacacaataagactgctgacatcttaataaagtgctacattaaatgcaatgttcaggaatagccaaggagaggagtgagcagggctggcttgatattgtcaagggaaggtgtcaatgagaagatggacaaacaagctgagctttaaggatgggcagtttgggatacacttcacagtttggaaaagacttcactttcactttcatgcactggagaaggaaatggcaacccactccagtgttcttacctggagaatcccagggacggggaagtctggtgggctgctgtctatggggttgcacagagtcagacacgactgaagtgacttagcagttcattcctctcacaagggagtcagaggaatgaatgggcttcccaggtggtgctagtggcaaagaatctgcctgccaatcaagagatgcaagagacatggattcaatccctgggttggaaagattcccctggaggaggaaaatggtaacccacttcagtattcttgcccgaaaaactctctgaacaacaggagtgtggcagcgtaccttccacaagattgcaaagagtcagacaagactgaatgagcatacacagagggatgaaggcattctataatttaaacaagacctgcagggaagc

SEQ ID NO: 62336 - DNA, 1431 bp, Bovine  19866881297766
  misc_feature (1)..(1): n is a, c, g, or t
nttggaaatacccaagcagtgagctactctgttctaaggcaagggctagaggaaaaataccatccacactacagatccaagtgactgaggagtgcccatgtaaccaaattttcagatcagaaattaagaaataagcagaaaatgcctgcaaatcatttaagaaccttcatttctctgaatataaggaaaagctatttctaaatacaaattgacttaggatatataagaaatgcatacataagaaaataagaaagactaaaagaaaaacaatggaaaactaaaagatataaaatggaataaaataagtactctgagaacagaccaaaaatatataagtgatcaaaaccaaagggaacaacaaaccaaacaaaaccaggaatttgtcaacaaatcagtagtaaattttaaagtcataactctctattcagagacacaaattataaagaagaattaaatgtggccagagagagaaacatcttaccttagagttcacctggtatcaggtactcagtgaggtattgccagctgttaacagttcagcacggacttttctcataaagtgtgccttctggtggatttattgccacaggttatctgaggaggccacgtgtgccctttgtccacaaagatttaattggaaccttagctccctgcgtcacagggaggaaagcagcactgaagagcacaaagagcggggagaaatcatcctaaacaaagatgcactaggatacactgttttccatccacgcttatctatcatcaaacacgttaacttttgtctgggtctgaatacaaattggaagatacaacggaaccagggtacagatcttgtcccttgttacttagtcaaagagctccacatatccagttgctttctggaaataaacaaatattagaacacccacaggaccaattaaaaaaaagacaaaaaaaaaaaaaaaactgcaattctcaagtataaaaatccaactcccgtggcctctttggaggcatcgattgtgcacttccatttttatatcccaatgctagctcaatgcctagcacatagcagcctccagtaaatatttcttgtgttgatgactggatggatgggttacatgagagagtatggctcattatggaagcttggagtggccctatacttttatgacattgaagagtcatcattagggcaaagaacatgaatgctaagtcacttcagtcatgtccaactctattcaaccccacagattgtagcccgccagattcctctgtccatgggattctctaggcaagaatactagagtggattgccatttcttactccaggggatcttcctgacccagggatctaacttttgtgactcttgctttaacaggcaggttctttaccattagcaccacctgggaagctcatgcaaagaacataaataatttataaaagagcaaata

SEQ ID NO: 62337 - DNA, 1628 bp, Bovine  19866881321255
  misc_feature (1)..(1): n is a, c, g, or t
ntgttcttacctggagaatcccagggacgggggagcctggtgggctgccatctgtggggtcgcacagagtcagacatgactgaagcgacttagcagcagcagcagcatatatgcaataataaaccaagttatatacttatgtataaatatattgtatatatattttatatgtaattatatattgcatatttaattcaattacacaaatttatacatacttttgatataaatatgtatttgtatattatatttgcaatatatttcctgtatatataaaagtgaagatatagtcactgggtaaaattctcagttgatatgtgaatatatcacagacaatgtatataaaggactactgtctttctaaagaaacagcagtgaatcatacacagttataaaatataggcaataagaacacaaagtgctatataaaattatacaattggagactcatatacttctgtgagcctggtgggctatggtccatggcatcgcaaagagtcagacaccactgagcgactgagcacagcacagaacatacttctgtgacatagtacagcatatcattttgtgctaactctattactgagaatttttgagagaatagtaaatgtatgaatttcagacagggttagacttgagttcactttctcctgcttttagttcaatgtatacaaaacccatatgtacgtgttgatctaaaacatatttttctctccttttttatggccagtgaaatatttcaattcaaaagcataatttctcagccattctgttaattttactagcacagaccaatacactgtaatattcaaaggtagcatggtacagtggaaaaagtattgaattcaggcagccaagagtctaaattccaacccgattgcttgtgcgctgtatgaccttggacatgtaacttaaactttctgaactcaattttctcatctgtaaaatgagaccaataattctcatttcacaggatcacagaggctcaataaatgctgattcttcaaccttcctcaagctccaaatctacttgtcaaccaaaaaaacctagttcaattctctatgtatctgttgacttgcaacctctgaaaatatgactttatatcaaagccagggaatgatatcttggcttaaaaaaagaaggtaaaagagaaaaattagcattattgggagctttaaaagccacacttgaatgagccatagtgagcacaatgactcagaaacaaggacatttttctgcagatgctcttggagttctcaagtacttgggagtcaaatctggcagattcataagaagattaataaagtcttagaaagttgtgaagcatgtgaaggaagaagcgagagaagaaaaagtgatgctcccctgaatctatgcaacctggcagagtggtaggaacaggtgtcagggacagaccttcagggggtctgctctctgaaagtacccttttcctaccatttactaactgtgggactccaggcaaagtccttgacttttttgacctttagtctcttccactatgaaatgacctaataaaattcactttctaggattgctggaaataataaatcagatcaagcatataaaacaaagtttgaaaactagaaatctttaggtcaaatctggt

SEQ ID NO: 62338 - DNA, 994 bp, Bovine  19866881375715
  misc_feature (1)..(1): n is a, c, g, or t
ncctattgctctatcattcttttaaagcccgggccctaaccccttccctcctgtttcaaaagcaaaaatttgcatgctaccatgcaaactttctcaattaacagtattaatgagagggagcagaagaacctttgattcaaaagtaacaaaatgtatactggccaccttttccaccaaataaaagcttgagagggactttattggtccccttccttgatgtgtcacatggtaggcacagagtgaacattctttgagtggacaaatcctgaattaattcacaaaataaatcaagtagggctaatcagaattcaattatttgatatcgaatatgctgactaacattgcagttttaagatcttaaagacatgtgcatatttagtcagttcttgactattccttctgtagcctgtacatgcttctagatcatcacctagaatctctctttactgctcatttgttgctagttttttgcccaattggtttgcagtctataaccatgtctaagcagaaaccagttcaagccaggcaataatgtgagtcttcgctctagaatgagcttataccttgagaaagttagactgattgagcaaatggggttttgggtggtctatatcaggccatctatctgtttgccctggtcctcacagtcctgtaaaattgaagagtgagagccaaccccgacttcctcagaatcttccatgaattgagagcactggcaatctgtctggggccacagtaattgaaattaattggattttagagataataacacttatgctaatgtgggtattgagaagtgacaatagccctggagataataccttagagaggtggggtggggagaattttgctgtcccagctggagagattaggtatcctggtggggcgggtgggttgctgctggagtggggggttgtgagaatgaggtacatgaagttataaagaagatgggagacttcagagaagcaagagaggagtaaagtgggggcagggg

SEQ ID NO: 62339 - DNA, 933 bp, Bovine  19866881537094
  misc_feature (1)..(1): n is a, c, g, or t
nagggaaagaaatgaatgtgatatgtgtgtaggtgggagactgtgtgtgtgtgttgctttggctgaatgagtccaggcagtgataatttgcttcactcgtgtccgactctgtgagaccttgtggactgtagtcctccaggctcctctgtccataggattctccaggcaaggatactggagtgggttgccatgccttcctccagaggatcttccataagccagggaccgaaacccggtgtctcttacctctaacctgcattggcagggaggttctttaccaccagcgccacctgggtagccccaagcaggcagggggccacttaaatacccaggttcatcacccaccttctctatcgatctcagcccctgtgacctattccttcagtggaacattctaaacctccagctgcacccgtgtccccgccaccagtgcagacacacacagcccgtctccaaagttccagacagcaaagttcagtggcccggccgcggctgtcagaccctgcctgcacatctcccgcttcctcatttctggacttcagtgtcacccaacaactctgccctcgtagatcagactcgggaccgggagtagataaacccggtctgtaggagacaaagccggaaggacgggcgcaccctcctttcttccaggcggggaccagactcgccgcacgagcccgggcagaggggagaccctgacagttacatgcggagacaaagacacctggacagacgccggcacagacagacaaagacccactgacgcgctggcacgccgcggggagcgcagtttcccgggagcccggctccctccttgggaactgagcgagacccctgtccacctcaccttatctgtccctgctcctggggctgacttcaggtttttttcttttcttttcttttccagtgtgttggcgatgtgctcccgtctct

SEQ ID NO: 62340 - DNA, 731 bp, Bovine  19866881552925
  misc_feature (1)..(1): n is a, c, g, or t
naccccggccttaagccggtgctgccacggtcaggcgccatcctccactcatcccctgagagcgccggccaccagctgcatcctgcgcctctggacaagcccaaggagcaggagctgaagcccagcctgtgctccggggcactgtccgactccggccggaactccatgtccagcctgcccacccacagtaccagcagcagctaccagctggacccgctggtcactcctgtggggcccgccagccggtttgggggctcagcccacaacatcacacagggcattgtcctccaagacagcaacatgatgagcctaaaggccctgtctttctctgacgggggcagcaagctggcccacgcaagcaaagacaagggctctgtgcgctcccccatctccacggaccagtgcaccatccaggagctggagaagcagctgctggagagggagggcgagctgcagaggctgcaccgcagcttcgaggagaaggagctggccgccagccaaccttacgaggagcggccgcggcgctgcaaggacgagctggaggggctggaggccaagggcaagatgaaggtggccgcacagaagagccagcgcgctcagcaggtcctgcatctccaggtgctccagcttcagcaggagaaacggcagctccggcaggaactcgagagcctcatgaaggagcaggacctgctggagaccaaactcaggtcttacgagaaagagaagaccag

SEQ ID NO: 62341 - DNA, 1278 bp, Bovine  19866881622314
  misc_feature (1)..(1): n is a, c, g, or t
ntaaacaggcaaatttacctgtcagccaggacccaaatcctcttttccagaaaagataacctaagcagagtgcatatctttttgaaacatcaggaataatcccaaccatgaagtattaagaggccagcactctagactgcaataggcttgtcctatttccaccctttccccatttaaaccatgttccagggcactgaaataataccaatagaatacttctgttcactggttctcttcttggtactaaacagtcatgatgttacaaagaaaacctgaaactcgtggcattacgccaatattgcgttgtctttcccaaagagctgactgcctgggatgcagacaagtaatcacctttatcccttctaaccatctttatgatatcttagcccatcctcctatttctgagtccctgagtcccctatatggcactgcacccatcaagatacctgttggtaagaggtcccacgaaggggttgaccagaagttgcatcagagccttggaagcaaatagaaccccaacccataagttctcttccttcaggaattctgtggcttgaaagcagttgtttccatgtgctgggatggcttcagtgactggagggaagatggtgccagaaatgctgcttgtccttgctatgccactgggcacactttcttcaacagccacagtgttgttttcaaagaaggagaggatggtggaaaaggcgggagtgagggaaggctgggtagttgtggcagagccgaggtacagagaaccgttgatgtctttgaactctatggcatagaggtaggtgggcacaatgggcactgaaagtgaagtacaagtcatgagcactaaggccagattgtcttttgactgttagtcaattcagggacattaccacacaatccagattgatgctcatggagatgtctaagtgacatgatctgaagtctactcaaaggctgtgccaggacttccctggtggtccagtggttaaggacccacctttcaactgaggacacaggttcgatccctggtctgggaacttagatcccacatgttgtggggcaactaaacatgtgtgccacaactactgaggtccctgtgccctatagcctgtgctctgcaacaagagaacccactgcaataagaagttcatgtactgcaactatagggtagcctctagtcaccacaactagagaaagcccgggtgcatcaacaaagaacctgtgagccacaaaaagaacccagcacagccaaaaaaaaaaaaaaagactgtgcctgcccaaattatc

SEQ ID NO: 62342 - DNA, 1424 bp, Bovine  19866881688521
  misc_feature (1)..(1): n is a, c, g, or t
nagcaaataacgttattattcttagcttgctagtgaggtgactgaagatcagagaggttaggccacttgcttaaagtcacacagccagtgacagagataaatgagtgtgcttgcattctggccagtctataaataatgtagctgtaagcttttctacatgaagcatgggtaacccaggatacccaaattccaagtttgggggcttagggacttaactatagtgttatgtcatgtgttctcttaggctgggctccagtttggactggaaggttttgtttctgggtgaagtaattgggtggggaatagctctgcttagtgaccttggagtatgacacatcgagtccttgcttgagtttttttttgcctgtgataaggatgagaagcctcataccctgggtttgatatgtctagggaactcatatcccgccggtgttaatcctgcctgtgaaatctcattgtaattataaacacgtgggcaggcccagtgagcgctttgactagtagagcccttggaggagggctgatttggctgaaccagggtcctgattccactgcctggccctgggcactctgagtctccagaccgcctcaactcctacaccccagccccagtttccaatgtcaagacagcagagtactctggtcctgtggttggtttttccttttaaactccaggtttggccagactttcttcccaacctggagtcttaatcacagggagcaattacaccagaatagaacgacaaatcgggatcaatacagagaggcgactgtctactggaagaaacacaatttatggcttggctggattatgcttaccagctgaaaacagcggtaattctaagcaaccctactgaccgggatcaatcatggcattttattactttgctaaaccctgcttgctccctacccccaacctctgtctttttagaacccaatcctcaaggaaaatattgcacttgttatcaaattttagaaagagaatttatggcaaagggagattgatttaaagccttcttctaaaaggggagcggagggtggtgggaaggtaaattttgctgcgtcttttagattggttcttttgcttatctctccattttatgacataatctgttgtagcattacccagggtcctctgggctgacgcttcttgcccagcattagataagggggagatattgtcagggtgtaaagtttaaagcccgtggcaagggctcatttttctcatttcaggcaagggagaaaggatataaaatggaaagcaagcaatcaataaagaagaaagatagagatcttccccaaaaggggtggggcggggagaaaagaaatcctcacctcactgactgctcttctaactaagactttaacaggcggataatgagcccacacatctcggtcagggcagagactggagacccatctcc

SEQ ID NO: 62343 - DNA, 1824 bp, Bovine  19866880340825
  misc_feature (1)..(1): n is a, c, g, or t
naccgctggaaaaacgagagccttgactagacggacttttgttggcaaagtaatgtctgcttttgaatatgctatgtaggttggtcataactttccttccaaggagtaagcatcttttaatttcatggctgcagtcaccatctgcagtgattttggagcccagaaaaataaagtctgacactgtttccccatctatttcccatgaaatgatgggaccgcatgccatgatcttcattttctgaatgttgagctgtaagccaactttttcactctcctcttgcactttcatcaagaggcttttgagttcctcttcactttctgccataaggatggtatcatctgcatatctgaggttattgatatttctcttggcagtcttgattccagcttgtgcttcctccagcccagcgtttctcatgatgtactctgcatagaagttaaacaagcagggtgacaatatacagccttgacgtactccttttcctatttggaaccagtctgttgttccatgtccagttctaactgtcgcttcctgacctgcatataggtttctcaagaggcaggtcaggtggtctggtattcccatctctttcagaattttccacatatagtagggtttatatttcaatcaaccacaaatttcgtgaaggagatatatttccttgccaaaatgaaactacaaattttgaccctttgggatctaccttcccttcctctctaagtgtgcataatccaaattatttttgtattcttttcaagcaaggacttaaagtgctgtttcactttgtcttacacttacaataattatattcctaaaggaattatcatttaaaaaaactattgttaacgcatttggctaagttacatttgtatagccagctattgtaaaagtgtaattttcagtatagtctttaagagactctggaggataacattgaatctctctcaaatttgagttttagttttcatggatgctttagttttatatagtataatctttgctattcagagtattttattttaagcatgggaaagcttagctttattttggtgattaactaaataaagctatttatcattctggtaataaaacaaaaaacaccagtattgctttggtttttctttttcccctctctttccaaaagtaatgtataattctttatagaaaaattgacttttttccattgaaaactccttgttatatcaaatgtgaagtctaagacagagccttctgccttccagaagctcagcacccggtaactactgtactaatttgaaataccataagatcttttgggaggtttgagtggagcactatggaatcagtgatgaaggaagaaaaagtttgttgtgaaagtttcaattaaaggaggtaaaatgtctttggactctagagcaattgttgttgtcgttcagtcactcagttgcgtcctactctttgcaacgctatagactgcagcgtgcctggcttccctgtcctttcactatctctggagtttgctcagactcatgtacattgagtcaatgatgccatccaaccatctcacccccttctcctcctacccttaatctttccccccatcagggtcttttccaataagtcagctgttcacatcaaatggccaaagtattggagcttcagcttcagtatcagtccttccatgaatattcagggttgatttcctttaggattgactagtttgatctctttgctgtccaaaggactctcaagagtcttctccagcataacagttcaaaagcatcaattcttcagagctcagccttctttatggtccaactctcaaatccatacatgacagctag

SEQ ID NO: 62344 - DNA, 4156 bp, Bovine  19866880344433
  misc_feature (1)..(1): n is a, c, g, or t
naccaatccctatgtgcctaatctgacatttacattgtttggactatttccaaaccttcatgccgggtgcttttttcaactgcacacctctcctttgatgtggatattctagttaagattttacagtgtggtagaggagcctggtgggctacagtccatggggttggatgcgacttagcaactgaacaatgacaacagaggattactcccaatacattcctctaatttctaaccttttctttcttattacttctactcatttcctcatttttcatccaacagatcagtgagaaagatgcagaagaaaggacaccaggcaccattcacctattattcaaaaacatgtttctaggatgaggcatttaacaattatgctgcctttcatcaatggttgttctcttaactcaagaggcagtggttgctgttgttgtgtactaaaaaaagagtaaataaaacactgaaaaatggcttacacatttttgatcatttgcctaacttatgcattaattaactctcaagtttgctttttcatattgaatttatagacatttactgagtatgtttattctttaatcttatagaaaatcacaaaagctattgtttgaaaacttcagaacagaaaggtcatcgttcctttacacaaaacaattttctttccaatcatgtgtaagctacttttaaatatgcatatttgaattagaagttacacaaaataatccttctacctatattttgtctttatatctgttttgtgtttaattgaaatttctcattccaccctgactcaaacctttaccctagcttattttgaataatgagactatgagtagcttcaatttattgtttttgacttatctatgttttataatttttcaatagccatatattacttttgaaacaagaaaaagcataaataacaagcatttttaaaaatgtgtactttttaactgtcctaaaattctctagaagtgaatctttctcatttcacccacctggaagatgttcttagtatcatattatcatattaatccttcttatttcattatatgtaaaaatactgtcatttgtaaacagattttagttcctccactaggaaaagtgttggacacaaactcattttggaatttctcacaatactttagagagcggctcttaaaaaatagggtagtgtggagaagagtgaactagaattagaattaatggctctaatggctctaaaaacttcaaaattattcttcaatatattgtcctttagtcactgtgtccaactctttttgagacctcatggattgaagccaatcaggctcccctgtccctgggatttccaaggcaagaatactggagtggtttgccatttctttctccaggggatcttcccaacccagggattgaacccgtgtctcctgcactggcagctggattctttactgctgagccactaagagagcccttcaacatagttatcttttggctatttcttcaacctctcaacctccttaacttaattttttcttttgttaaattaacatctcacctgtcttttttctcgaatgttttgcaattttttgtccaagccttttcatagtttgaaacaatcaaagccaatttaaataggcttgtttatcccaggaaaataaaagtgcacaacctacttcccttagcaagggaagtgctgtagtccattataagtatgatgtagttaggttttattattttatcatcatattgacttaattaaaaaattttatcacaagtagccaaacaagcaccaaaatataaactcagtcaataaaaatttggggcaaaattaagaacagaaaggtctgttacttcccttcaaaaaataataaaacctaactgcacgatacttataatggactacagcactttcaaatttgcagaaaggagcatttagataaagtcaacacctgcagatcactttaacacctgaagcttaagcctattaaaaataccttggtaaaaaatgacaataccatgggaagatactggttatgtaatctatacattgatatcctaatactcttaatgaaaaatgataaacaacccattatctcccagatccaatttaccgtacagaaataatcctcagtttcttgattagattgtgcacttatatcttaaaagtacttaaaattaagatgtctctgctcctcaaatagttcattcattatttggctattggcaccaactaggctttcaatgtattttgtaattattatgagtctaatcacagtgtgacatttaataccagattctaagtctttctttcttaatatgaagatcagtaattcattagaaacttattatcaggataactatgttcctatcatttgtgtctttctgagaaatgcagtatctttgctatcaaggaaactaattaggattaggttttttttttttttttttttcccctccaaattatactgaagacctatactggtgtcttgagttaattctagtgaaaaatgacaattacttcattcctaagcactgacatttttgggtcccaaaggtccagcaactcagcatgtctgtgtgacacaataatgcactctcatattgtgggtgtggaaatggaatcattttccatgaatctaagaaagtcttgataacaggtttaaaacactttatagactcaaaatttaatttaaaggaatagcttaatcagaggaaaaatcaaaggttacctacttggactaaatagctgctacacaaatcttttatccaaattatcatatatctgcctatacgcccctgccttatcctgccccatgatagatgtacaaccttttgatacagtggacacagtcattattgcttgtagtagtttagaaatttcctttgtatttaacaaatattcttcttgagaatatacatgcaattaactggcttgaaaacaaaatatgtgtgggattatagggagaaagtgtcctgggatttctcaggtttatttaacacattgaaaaaagtctgttggggtgctggagagaggacagtatttcgaaaagaggtgaaagcccatttttccatggtaccacaaaaagaatgataacatattcaagaagataagaatacttggatgatgaaggaattcagaaactttgtcgtataagaaacactgaaagaagatctgattaatgtaaatatgggcttccctggtggctcagtggtaaagaatctgccagtgcaggagacacaggttcaatccttgggttgggaagatcccctggaggaggaaagggcaactcacttaagttttcttgcctgggaaaccccatggacagaggagcctggtgagctacagtcagcccatggaattacaaaagagtaggcaccccactccagtactcttgcctggaaaattccatggacgtaagagcctggtaggctgcagtcccatggggtcgctaggagtcgaacacgactgagcaacttcactttcacttttcatgcattggagaaggaaatggcaacccactccagtgttcttgcctggagaatcccagggacgggggagcctggtgggctgccgtctctggggtcgcacagaatcggacaggactgaagcaacttagcagcagcagcaggatacaacttagcgactaaacaataacaacaacataatgtacaaagaggaatggggaaaggtcgcaggagtgggggaaggggtaatgattcgcctggaaagctccaggcttactttgtctaaagccagtctaacactaggaatttcactttacagaatcatcactattagttcaatgtggagtaattcccaaagacagtgactatctcccttttcatttagagtgctgcctgtaactgacaatgtacaagctgaggcaaaatgatggatgaagaagagggagttttctaaaatctatttgaattttaaggagttcagtgctgctgcataattgatggacaatgggttaccgagcagagatacggtaatataatcttgagggtactgggtatatggaaaattaaatactaacatatgagtaccaaggggaagatgcatagtagacaaagggcattaaaaataatgtctccagggtatcttcattagttctaagtatacaataactcaaccatatgtgcctatggacaaattatctcaagcattctctca

SEQ ID NO: 62345 - DNA, 1299 bp, Bovine  19866880353966
  misc_feature (1)..(1): n is a, c, g, or t
natcactataaagctctttccatttgccataatttgttacagaatagaagagtttgtgataaaaaccagggtgagacacagcatggaagatgtgcaactctgtcattccaaaatgaaaataatttattgtcttagagtagtctattcaaataatagctgaagcccactgtccatccacattattatcaggctgcagccttccacacagaaacacgttagccaaattgttccccaccactaaaatgtgtgtttatggtttatgtgagctgaataaattactgttaaagaatcaccttctcaaacctatcgatgctaagttgaaactgaaattatttcatgctaatatgagtgaggatggttgtagagagatactattccttgaaatctaaagggacaagctaataaaacactttcatctacctttaattgagactgcttgtctgctgacaaaacctgttaaagtacagatttaatgaagatttagctcctaagtctgtctttcccccacacctaaacaatttctaagacatcaaaagtgtcctgtcatgtggcgtatgctcgggtaaattctttttattacattcaacagaaaaatagactattttaataaactccaggcaattggaatcatacacctgccttgttgacttcttttctgttagaagaaattgccaagtttataaatgagagcctagcgtgcagcactctctgtaaacactatgtgcctctgagattcaggtgagagctagttttggaaacagttccaattgcaacactcctttatacatataaactggatttgtctttgtacatctggaaaatacaggcaaataatctactttgtaggctcaagctgaataagcttgtttcctttaccctttcttcttggcacattgtttttgtttttggaaacttacaagtaaacagaacaggagggaagggctctttcttcatcatagaaatagaaaataatatcaatatgacactgcacctcagaggtggatttcatttccaagaacagttcagctttgctctgatacacggtgggtatctgaccaccccctgagttttcattgacaactccctgcattttaagtgaaattcctaccctctgcttgtacagtactgcactgactgtgcagtcaaatccttactgggctgagacatacaaagtacaacctgggctgcctccatgatagtatctgagaacatgaacgtgctccctggaatcatatggggcaatctgtgtgacatgtagtttgctgtctcacatgccaaaatacattttgagagacttta

SEQ ID NO: 62346 - DNA, 1402 bp, Bovine  19866880369558
  misc_feature (1)..(1): n is a, c, g, or t
ntatggatgtgagagttggactgtgaagaaggctgagagctgaataattgatgcttttgaactgtggtgttggagaggactcttgagagtcccttggactgcaaggagatccaaccagtccattctgaaggagatcagccctgggatttctttggaaggaatgatgctaaagctgaaactccagtactttgcccacctcatgagaagagttgactcattggaaaagactctgatgctgggagggattggtggcaggaggagaaggggatgacagaggatgagatggctggatggcatcactgactcaatggacgtgagtctgagtgaactccgggagttggtgatggacagggaggcctggcgtgctgcgattcacggggtcgcaaagagtcagacacgactgagcaactgaactgaactgaactgaagatgattaaatagagtgagacagtaatagagaccagacttatggacaagaggagcgaagagggaggaaagagagggtgggatgtatggagagagaaatatggaaacttacattactgtatgtaaaatagatagccaatgggaggttgcaatacgactcagggaactcaaacatgggctatgtaacaaactagaggtgtgggatggggtagaaggtgggagggggattctatggggaggggaccataatgtatgcctatggctgattgatgttgatgtttagcagaaacaacacaattctgtagagcaattatccttcaataaaaaaataatttaaaaaattaaaaaaaaattttaaagtttaaaactatttggaaatgcttatatagattcattgctaattttcatatctaaaagtatttaggttttccatcacacaaacatgagaaaatgtgaaatggatatgatttatctatgataaatatatttctataaataaagcttatttcctctgttctattttttctcctttccccaaagacctcacagtgtttcaatttttgaaatctttcctctaaccaggaaaaattaagcagctgctacagataaaatgagcattaccagcagatattaaaactgtcacctgatggaaaccggggctcaacattaggccttcaagcaataaccagcagtataattttgtaactcatatatcaattaactttatattactgtcacacatgacactaacagctaacaatattgcttcatgctgctatcttaattgcaaagtatgggtgctgaacgtgaatatcttaagatgaaaatatgtcctattaaaaagtatctaagctgtttggcaaaatttattggaaatctataaatctaatggtaggaagagttttatcttaatttttaaataatcttcagaattaatgcagactttatagtatataaagtgattttgtataatttg

SEQ ID NO: 62347 - DNA, 1735 bp, Bovine  19866880428732
  misc_feature (1)..(1): n is a, c, g, or t
ntaagcttacccataagtagaaagaaaaagaaataggaatctgcatattcccaaaaacactataatgagttccttataactcaggagttaatgactataagcacagtgtagcttatatttcctgatgcaatttcctgactcatagtcacatatactaattatatccacatatgctgattatgcttgattattactcaatctctgatcttcaactagttagtgttttctataaaatatcctaaccaacatttactttatttttaaagaatgtatagtttctgtaatgtccacatcttttttttttttttgaccatgccatgcagactttaagatcttagtgcccccaaccagggatcaaattggaccaacagggaagtctgttcacagtttcttaaatcatgttcatggcatcatttggaaaattcttttttctttactcacatccctcaaagaataatccatcatcagtgtactaaaacataaatagactttcatttagatttaggcttaaattctctgtaatctactgatgcaagctagctaagtgagcccaagaaaggataattgaattattatataaactccctttggaaaagttgagtaaaatgcagtgtctacgggatgtatattctgcatgagtgttgtagaaaacccacaacctagtaaattggaaaagcaatctagtggcttagttgtttaagtactaatgcagagataaaattgcttttaaaaagtatcacaccctcttccaagtgaacttttgtttatttcctattcaggttgccttggagaaaggagaatgaagttaatgttcctttgacataagtgcaccataatggtgaatacattaaatatcctaaagtagatggaatagttaggtagctaatttactatatcatgaatggttagggataattcatcttctactgtttctgttaaccatccttttgcctttttgcaggtctcaggtgtcaaagagtgaactaggacacaaggcagttaagaaggcacaatggtttagcagggagaactttgtctgagcccaaatttgccagtatgtttcaaggttttgaccttggaaaatcaatttaaatccccctgagctctgttttcttacttgttaaagagggaaattggactaaagtatcttgtttccaccttgatcttttcatgtattgataatgcactaactcatcaacaagacaatcattgataattgcatttttcagatgaagttgttattaaattcttagaaaacagccaaaaaacagctgtgccctaagttctgtttactttattatcctcaatgtcactaagagttaccattaatgatgcacctacagtgttcagtgcatttgtgctggcagtgataatgttacttcccattaggaacaaatttacattatgataccaaggcagtccatcctaacatcacaatgggtatctaccatccaaattaatgctgatttctgaccacaagaaaacattttaaaaataatgatatgactaattggacaaggtaatatttctgctagtggtatctggtagcaagaagaggcacaatataacctgatgtataatgatatctcattttatcagcttcattttcatttggcttgaatatgttctttaatttctgataatgggcatttggtcagtattgttacttaccaacaaactaaacaagaaaaatgttgttagatgcactgctaatggaaattaatgatagcctgta

SEQ ID NO: 62348 - DNA, 1876 bp, Bovine  19866880550270
  misc_feature (1)..(1): n is a, c, g, or t
nacatttcttatattctttttcttatattctataaactatggtttatcacaggatgttgaatgtacttccctgtactatacattaggaccttgttgtttatccattgtaaatgtaatggttttcatctaccaaccctggacactcatttcatccttttctcaacccctgctcttggcacctgcaagtctgttctctctgagtctgcttctgttttgtagatgggatcacttgagccatgtttttgacttcacatgtaagtgatatcatatatttatctttctctttctgacttacttaacttagtatgataatctctagttgcatccatgctgctgcaaatcgcaggatttcattctttctgtggttgagtaatagtccattgtgtatatatagcacatcttctttatccattcgtctgctgatagacatttaagttgcttccatgttttggtggtaactgctatgaacgtgggggtgcatgtatctttttgaattacagttttgtctgggatatttccaagactgaaactgctggatcatacaggaattctatttttagttttatgaggaacttccatactgttttctatagtggatgtaccaacttacattcctattaacatgtttcttaaataccctgaagtttgtctgcaatattcttgggctacatatttggtcaaaagcaaatggagaggaagagatattcctggttattaaggaaactatctatgtgtgtacatctgggggcacaaacgactccaccgtattctgcatgtggctctgatagactcgtgcaccacggctcgtggactcctccaggagggggaacctatctctgatgccccatcccccagcccatagttaatgtccagtgaatccctgctgaataaacagctctattaggtctggggaaccatcacgaggaatctgcctatgataggctcctgatcctgaacaagtaacttgacctctctctgctgcaaatttatttgtctgaaaaatgggaattatacataatagcacctatatcaaagagttttgtgaaaattaaattagttagtgtatggaaagcacttcaaatagtgcctggttatatcagtaccatgggcttccctggtggctcagtgataaagaatccacctgctgatgcagcagatgcaagagatacaggtttgatacctgggtctggaagatccgtctccagtattcttgcctgggaaatcccatggaccaagaaacctgtgggctacagtccatgggatctcaaagaatcaagcacaactgaatatgtgcttacacaggcttcataaacagccaaataggtagagaaaggttaaaaaaaaagtcaaaggcattgtttttggatatgtttgtggaaagacacaggagtgtttagggagggatggggatggtgatgaaggaaacttagaaaggactttggtactttgttatcattgagttggcgtccttgactcaggagttaggaaagtgcagccctgagctgtggctgtcatgtggcaatgattttaaatcagcctctgacatatctggtagcagcaggagggcaaaataaaatctttcctctgattgaaatggttaggggattcagggaagaggagcacaagtgcccgaattagaaggaacctgggatcatcagttgaaatccattctctttagggagaaaaaaaaatcctctgatgagtgcaagtaactggggtctttcttccctcttttatcactcatcttaaaaacgatacccttgcttgcctattaaaaaaaaaagaaagttcgaggcttaattcagaatgacatccccatttaggccataaatgtttgaagcttaaaatcaaactcgttttccgactctctgcaaca

SEQ ID NO: 62349 - DNA, 1788 bp, Bovine  19866880606999
  misc_feature (1)..(1): n is a, c, g, or t
nttttgacaacacagaaaacacacattctcctttgcaagtatctaatacttgacactgctgctgctgctgctgctgctgctgctaagtcgcttcagtcatgtctgactctgtgcgaccccatagacggcagcccaccagggctcctcctgccctgggattctccaggcaagaatactagagtgggttgccatttccttctccagtgcatgaaagtgaaaagtcaaagtgcaatcactcagtcgtgcctgactcttagcgaccccatggactgcagcccaccaggctcctctgtccatgggattttccaggcaagagtactggagtgggttgccattggcttctcactggcacctcttataggcacctttcactccaaagatacaatgattcacaattaaagactactactaatgaagcaaagaatattattagtggtactaccaaatactctgaagtttatttactttatgtacatgaagtcttgaaaaggttttcaggacttttttttttttttttttaatttgtgtgtgtgtgccacactggggacaaaacggcccagaatagcattatttgactttttaagcccatgttaaaattaatagagtaaatcaagacttcatttatgagaggaacagtacaagaaaacaccaggtttgtcatatttgttttaatcttttaaatattgatactcataacctatactttagttattttgtaaatatcacatcctgatgcaaagagctgactcactggaaaacaccctgacactgggaaagattgaggacaagaggagaagggggcgacagaggatgaggattgcatggcatcactgactcaatggacatgagtttgagcaaactccaggagatattgaaggacagggaaacctggcatgctgccattcacaaggtttcaaagagtcagacacgacttagtgactgaacaacaacaacaaatattacaataacaaaatggcctccataagtaaaacagaatcaagtttaacctcttcctccaaggagagttttatatattttaatttgatgcttataatttggtgttagtcctaattggagtatagcatcctataaagaacctctaatgatataggattgctcatagaacattagtagctctatggaatgttgcaatgatatttaacaatcaaaagagagtacaataaaaattaacaaatttcctaagttttactttgttcaaggtagaaaaaatatatactatctattttcaaataaggatgaagaacatttaaatattctcaatcaggtgaccttttgtttcactgcacgatatttgtccttgttaagccctagtgccaaaagattattgcattttaaagctatttcgaggctaaaaatattcagaatttctacttcataaaaatgtaaatttgcataaagtgatttacactcttagaacacaagaagcatgaaactagattctttttattacattaggacttgtgaatgtcaaatcagaagtgtatattttgattactatttttataggaatataatgaaaattcactagatagttcatacacttaagaaaagcaggccaatcctagacaattaaaccatctttctttgtttttcaacattagcaggaaaaaaataatgaataaaagggactctaaaatgagctctttaaaacacaaagttaaaacaacaacaacaataaagtacttttcaattaatggatagcataatcataatctctttagtgtttacagttaaaaacttaattatataaattttaaacacgtacat

SEQ ID NO: 62350 - DNA, 1793 bp, Bovine  19866880738890
  misc_feature (1)..(1): n is a, c, g, or t
nccaggagaaggcaatggcaccccactccagtactcttgcctggaaaatcccatggatggaggagcctggtaggctgccgtctatggggtcacacagagtcggacatgactgaagccacttagcagcagcagcagcagcagcttcaaatactaacgttgtataggcatgtttggttctgaggtactcaacttttccttttaagttgtgcaaccaaaatttcaagcatttagagatggactgtgtaaaagtcacaatatttaatagtaatatacactttgagtaattgtacattttgttgtactgtaataggttatttttcacttttagaagcatgtcttaaacattcaaaatgagtttaccttctaaatattaatttttaatctattttattttcatagaaatgaaaatttaagttaaatagtgtagcagtagaaaatttgtaactatgcattgctaactttaaaaacctccacagtgaccagctttttctttcttcagtggctcagagtttgtagtttgttcagtaaatttacactggcgcccaggcctaacagacacttactgaattcttcaagcggtttttgtagcagttcattcttagggaaaagtaaagagaagtttgatctaataggaatcaccctgcagtgtgtattcttctgttatctccttactttttcctcctggatcctcatctctgccctgacttcgcactaatatgtgagtaagaggaaaaacctgcacttctttaattagctattctaggatgaaactttaaactaggacaccaagtaaattcagatgacttctctctaacaacttaattaaaaattgaagaaagtgcagttgttatatgcagaagtagatgtgtaatcaggtagcaggacagagaaggtagttggtctaaataaattatttgaaatatttttggtgtcagttgcccagaaatctaaactagccatttcattttcccaggagtaagttttgcaaacttaaggaatgaaatggatacatatataaatatatattatatatgagagctataaataaaatggaagttggtcttctaacttagcatttcttaggtctcaagttctgactcacagctgttaaggttgctcatccttgactgatcatattcagtaaactgagaagagactaatacaattttaactgagctgtcagatttgacatcatatggtcaattcttcatttgtactttcatgttatcaattttcagtttctaaaaacaaacaacagaaaataggaactttttgcataacttcttcaattttatacctggtattttttgtagctcatgacctcttattttttgactatatgagattcccaagtaatgttgagaagaatttttttaaatcaggatgttaacacatatgctgtcccaggacaaaatcttgcataagaatttgctgcaggtcaggatttctaaaatgtgaatatattaatattggtaaagagttaaagataagatgtgtcttccctttcttaaatgatattttgttgaattgtagttgaaaaaacctaggtgctcaatttgtctaggctcgttttcagtgaacaagtttccaaaaaatgggcactgtactttaaagctatttttgggaggtgtttgagcattgctcctcagtgtactctgtgttgtagcagcaccttttggaaactcaaagaaatgcagaatttcagccctaaccaaggtctactgcatcaaaatttacactttaagaagatgcaaaagtgacttgcattggaagtttaggaagcattatcttag

SEQ ID NO: 62351 - DNA, 1757 bp, Bovine  19866880746595
  misc_feature (1)..(1): n is a, c, g, or t
natatagtaataattactttatgaggattaatttaaattctcatgacatgtgtcttctgtagagaagtacttaactatctgtgttacttatagtgatgtttatgacacccattgaacttttattcatatttcacaattatccaaataacacaagcccacctagctaagacatctgtcctctatcatattaactaataaagacactcttctcacttgatagtttggggtttagattttatatctacaaaatgataactattctatgaaaaccactatctcaccatcctttttgtttttctacttggaagactttcatactttttaaatgtttgtttgattgtgaaggtaaaatggaaggagctggaaaatttatttactccatgcctttggattctagataattctaggggagggaagttcttcacagtgtcataaaggatgtttgcctatggtgcttccaatctcctttgtgttaatattaaatattttcatcagcagtatactttcatgattgctcccatttccacaaatatctttcttttatctttaattcacaatgttgtaaataaatgatgaggaaagtttcacttcttccagggacagttgctacctgtatagatctgagactcaaacacacagaattttagttcacatccaacaggtgggaaagatttgagaagaaaacattgagacctgttttggaagtataaggttggagcagagtctcagtaacctaaagtaatatgaacaaaataactgcttatatgatttgcaagtaggtttctttagtccaacatctgtatcaaatgcgcatttatatgtggcatgtcttggtgagttgttaagatgactaaaggcactgctagcatttaatgcctagaggtcaatagtgataaatatactcccaataaaaaattattgttctcaaaatgccagggatccctaaattgaaaaacaaagcagttcctctagtggttatgagagcaggctttgtgtcagtagatgagtgtttttggtcttgactgtgcccactttctggttggatgatattagtcatttagctttccacatagcctcatatctgatatgcaagatgcaaacagtagattttccaagagtattaagagaaatacacaaagtttaatttagcatgtggcacatagtgcacattcagtaactattatcactgatagtattgttttattatcttccataaaagaagtgttttcaaaatctagcaacttaacacagtaagaagtcatactaaatggttgtgaaaagcatattaaaatgttgactatatttaaatcaaactgtaaacattcagtctattttctagactatttttgacacataaactaaactccagctctattagtcacttggtattatgttgatgttcagtatttccctatgtgatctttcctttgtttggaatgacattctccttcttggcagtttggtgatttcatattcatttattaaaatgattaaaaattaccttttctggaaaatttccctcgtatttgtatcagttctttctgaattgtagtggaattacccagtatgtgtgtgtgttagttgctcagtcatatccaactccttcacaaccctatggactgtaacccacccaggttcctctatccatgaaattctcctgggaagaatactgcagtgggttgtcattcccttctccaggggatcttcctgacccaaggattgaaccccaatctcctgtactgcaggcagattcttta

SEQ ID NO: 62352 - DNA, 1834 bp, Bovine  19866880787443
  misc_feature (1)..(1): n is a, c, g, or t
ntaatcttcttataaattaaaatcagtttcacaattcacatattaaattttcttttgctaaagtaatagcagttatatttaaaatgcatgccactcttttcatgggttaattgtgaagtttgtaaattttcacagaaccaacatatacataacaactaccttggcaaaatctttgatgcatctgttttaatcatgcatattcaaagtgctgaattcattaagtattatgtgcagtcatgtttccctaattaaaaaaaaaaaagattcctaacccattgtgatacttctattgtacgttctgcaatacaaataggcacaacttaggtgcgcagattttttttttaatacaaggacatatttatactgataaactgtgtttgctagcttggcacagacgttaggtcacacaggctactatacgtaactatgactgacccaggtggaaaaaggagacccattaacgctgataggcatcagagttttcctcttattcctttgttcgtgttcacaagtgtctgaagtgggggatgctcaaacacagcaacaaaaaccacagggctattttgaattctgtattcctacagaaaaacaattcacttccacattgctctctttcagaaagcctggctttccaagttcatctagcttagtggttttggccactcacatatcctccaggcaatattggggaatgaattacaaagaccaagcaccctgcacattgcgctgtttataagtctggttgagaactaaataaggatggggcacagctgcagacacacagcaggtagaggaatcacttagataatgaaaagtagcagaataacaagctttgaaggagagaaaaagttcagaactgagatcctggagtgacaacaaaaactggaagaggaaaaggatcacaatacttaaattctactgtgaaatccccaatctggaacaagcaagatttgtaggatataaattataattaaaagatagtgaacctctggtgcaggggaaatgacactacatttgtgagtgcagggatctgaattctggtcccagcccagtcactgacttacctgtaacttgaaggaaattatttaacctcttttggtcctatccttaaaatgacagtggcagattagaagtttcaattatacattttctacacttctaaaaattaaaaaaaaattttgtaaacatttttaaagatccctacagagtatatagggctgcactggtggctcagtggcaaagaaactgcctgctaatgcaagagatgcaggtttgatccctgggtcaggaaggtcctctagagaaggaaatggcaaccactcccatattcttgtctggaaaatcccatggagagagaagcctggcaggctacagttcatggggtctttaagagtcagactcgacgtagccactaaacaacaatgacaaaagagcatatcatgtattagataatatccacaagattagagcagaaacttgaactggccacataaatttcctgggcagcatccctggatgtaggtgttagcactctgattgttcagcaccagtgattctgcatctggtgggatcttaggtttaagtgatattcatccaatcatttttacccctggatccagtcccatcctcaaaataatataaaataagtaaatttcctcttaaagactaaaagcagcattttttatctctatgttttatcttctttaggctatgaacattcttgtttctatcagctgttgctcatttacatgatgtcaaaacttgagaagaaaaaagaactgctgactttataaaccagttcaagttgtcggaatctgttttaaatggtgatacc

SEQ ID NO: 62353 - DNA, 2270 bp, Bovine  19866880809965
  misc_feature (1)..(1): n is a, c, g, or t
nccttatccctgaaagatctctaggatgttctgtgtgaatgctcaataatgtctgactctttgagaacccatggactgtagcctgccaggctcctcttgccatgggtttctctagacaagaatactggagtgggttgccattccttctccaggggaatcttcccaactcagggattgaacctgcatctcttgtgtcttctgcattggcagtcagattctttaccactacagcacctgggaagcccttgagacttactattaaaggcaaattgcaaatctctttcttcccttcaaagaggcagtcttaacttaaagtatgagaattcaactacaaaaaataagtatgggtccagtaagaaaaaataaataaataaagttggcatttacaagtatattttcacaggctaaggtagtatcttggtagaagtgctcatctaattgttaaaatattgaagtttctaaatgtgtctcaatgatactctacatagatggtggtgccaaagagagtaaccaagggtacataagattgtagctgctcattaaaatttttggattcaagtcttttcaattgcacaaataaaatttttttctacttctgtcatatacatcttgactgtcattcaactaaaatgtaagtcaaaccattttaggggggaaaaggagggggaaatagaaaaataggcctaacatatttggctgccaagctaaatatcttagtctttcattttctttgaaaatgtgattggcattttaatagacaggaatcactcatagacatatgctatttaacagaaatattattcaataatttttggtcttggtttcaaaccaaactaaacttgttaagttactttttaaaaatcctcagcagagctttttatgtgcattttctagactagactttaaaacattttcctttgattccatggcatcagggtcagttcagctgctcagtcgtgtccaactctttgtgaacccatggactgcagcatgccaggcctccctgtccatcaccaactttcagagtttactcacacgtatgtccactgagtcggtgatgccatccaaccatctcatcctctgtcgttcccttttcttccaaccttcaatcttttccagcatctttccatggcaaaatgcataactgttttttgtctagtttgttttcatctatatcaaggagaataaattttcaaatggtaagacagaacaaacactcatgagataattgaagtaaaaaagagatgaggaaattatatgaaaacagagagttcctataaatgatttcaagcctcttcttcagaaaaaaacatttacctcccaggacatgcaaatgttatttcagaacactttattctttggagaatggtaacaaacagaagataaagaagaagattggaaatttttgtaaagtattttgtaaaatttttgtaaaattgtaaaatttttctgattgttaaaatatcaaaaatgatatacatgtagtattattgctaggcaagcatatagactattaagtagaaagtgaaagtgaagttgctcagttgtatccgactctttgcaaccccatgaactttagcctatcaggcttcttcgtccgtgggatttttcaggcaagagtgctggagtggattgccatttccttctccaggggatcttcccgacccaggaatcaaacccaggtctccctcattgcaggcagatgctttaccttctgagctaccagggaagccccctggtggctcagaatcctcttagtcattaagtagatagttgtgggattataagagaaagtctattattgaagaacaaattgcattcaccaaagtataaataaataacaatacattctaatccaatctcattttatttttttatactattaatctgggtagaagaatcatggttgtgaagatatggtgtatcaattttattattttcatatcagcaattaatataatggatcttaatagtccaaaaggggaaattatgaaagataaaattagctgcattttataactggttgaatagcaagtttcttgataagtgctgcttaattgattgatgaaaatctataggatccttctgtatcctctgctttagtcaagcattttcaaaaatcttagtgatgacttaaaagaaaagaaaaatgacatttctagattattataaagcaatgaggaatagtgaatatgataagtgacagaaggaagcaaagtcaaatgtaacatagctaaatttagatttataaaagcacattttcatatcat

SEQ ID NO: 62354 - DNA, 2320 bp, Bovine  19866880891275
  misc_feature (1)..(1): n is a, c, g, or t
ntgcaaggagatccaaccagtccattctgaaggagatcagccctgggatttctttggaaggaatgatgctaaagctgaaactccagtcctttggccacctcatgcgaagagttgactcactggaaaagactctgatgctgggagggattggggtcaggaggagaaggggatgccagaggatgagatggctgaatggcatcactgactcgatggacgtgagtctgggtgaactctgggagttggtgatggacagggaggcctggcatgctgcgattcatggggtcgcaaagagttggacacgactgagcaattgaactaactaactaactaagataaatgcaacctgaggtctatttttttatggagtataaactgataatgtttatttgtatgtttgtttttccattttcattattttacaaacaaatgaagacaaagaagaatatacaactgagctcacaaaagctcagtaaaacctaaaatattttctatatgatcctttacagaaaaagtctactggtccctgcagaaggacaggacagtgtaaagtcaatatgaaaattatcacaactatccagttttcaaatcttagcctcccataatgccatttttatattccctggttggtcaatgagtcaccaaatccacatcatgttctatagtagaacaactctaaatgattttctgaaggaagttagtggaggatgataaggaaaaaggaaaacgatcagaacaaatacacttctgacttaaaaggaagaatctagttttaagtatataaacatcagattgccagaaaagaacatacatctgctgaccactgattgttgaaaagtaagtatcgttaagcattcaacagaaaatcctacaaggaattacatattgaatgcctcagaataaaagcacttttcaggaagacttccctgccacaggtggtaccaagctttcattccacaaataacacttccactattcactttaattctcatcatacaaaatgctagactaacaactcgattgaaagccctaaggaaaaagatgatgattttcctgattttcaattctcacagcttcatagggcctgaaagatggttagctgtttagatacttggcaaattatttcaaataatgtagagaaaaaaggctttcacttctaatataaggctaaagaactatttctcatagtcaatggtaagggtataaattatgaaatttctctaatttcacattaaaaaaactcatcccaacatgaaatcagcttattgctaaatcagccccattcaagaaggttttctttgaccttatatggctgttagtgaaagcttacttctgcctcatgaatagtagaaaataccctttcaacctggacctacacaaacacagaagaggaagaaaatatgtgcctgttaaccttgcagatccccaaatatctcaatttcatttgattttcattgtttttctgtatgcatgtataccttctaaagcattttggtcatcagcttctcagaagacaagcttttcctcttcctctgtaacatccaattttttctctgttagaattttgtcattgcagagctttcacaatgtcataataaattatatgctatattggtcttcttatcattttaaagggtaaatggatttaggaaaaataaatcattgaatcagcgatttttacctagtattttgtagatacaacatactttgtcttcaaatcaaagataagatacttttgctcatacaccttgcacaaaattccccttcttaagaatcaatcgtcaaggtttgatttctagtatttatctttcacaatgaatgtatgtacagtcatataattataaaattatgcaaatattttatgtagatcagtgatgattgcatataaatgttataaaacaacacattacaaagcactatgattagggaaaatggtaattgtgaacatctggattgagaaatttaaatctgaaaaagtctgatatttttcataaagtcttttctcagtgtttgtccagatttcatttggtactgactgaaaccacttatctgagacaggctaattaaatgtagatccaaatatgttactcagatgaaacacccaggttttttaaaaagtatttttctctctttgttatgtaactactttggtataagaatttttttagtgttgctcttgagaatattcagcaattttgatatctgagagtacactaagaatggccaaaatgagaaaacatttaaagtcaaacacaaaatttcattgaggaaaacaactatatacctaaaattgcaaaaatatcttgagcaggtatgaatttca

SEQ ID NO: 62355 - DNA, 1545 bp, Bovine  19866880978120
  misc_feature (1)..(1): n is a, c, g, or t
ntggtgtatctgagattaaatttagatcattgtccttaaaagactattctgtgtccatttaatcacacagctacacaaaaacacaagttcattccattctgcatatttaggctgaaaacaatttatgtacattagttacaaacacatatatgatggatgtcctttgatgtggtcatattacttttgacatacatatctaccgcttgtttgtgatatatgtatataaggaaatttagagaaataaacaacataatgtgaaatggattaagatcttaaaaaagatgtacttaaaatcagacaggttatttccttcagttttattttgcaaatgattctaattaattctggaaatgtaatgtttttcaaaaactttagataatatattgtgatcaaatttgcttaatttagtacacctttaaaatttaagccagtttctccacctcataaatatctcttttacaacagaataaacacgagtcagctgacttacttttcaaccagctatgaaaatttattatgaaaatatcacccctgtctctagtataaaaagactgattgaaatgtaaattcaaataagatttctgacagctacaacaaacataaaatatggacatattaacagcattatctactcttgtaaacacttggaagactgtaattttaaaaaggctacaagtcttccataaggtaaacacagtaatgcaataggaaaaatggaatttctaccattattatttagttacattctttcctactttgtacatttgacttatgcttttacgagaatggctttatcaatgaatttcagtacatttgtttgaaggcaaaagtctgaattccaaaagtttcagtcattttcacctttcgaatatttagaacataaatttggctaaaatgattatcttgaattttacaaattttactttgaacaagcatgctgtttcttggtattctgattatgtccccttgaatattttagtctgtgctgtggtacaagtgtctcatatgttctagttaattgtatttttatgaggagaaatatgttaaatccagagaaatgataacatcatagttataaaatccataaattatggatataatcaaaagtttaaataaactggtcataggcattctacttttttccaacattagtttgtattttaactttactggtttgtatgtgagagaatgaggtaaaattggagtcaactaaaagaaattagaaatataatagtataaatttgggtgctgtgctgtgcctagtcactcattcatgttcgactcgttgccatccctggagtgcacctgcccaggctccctctgtccatggggattctccaggcaacaacacaagagagggttgccatgacctcctccagggattcttcccaagccaggtctcccaaattgccagtggattcttgaccatctgagccaacagggaagcccacagatttgaatagctgatatcaccatctagggactataccttcatactcacaaatctcatatatatatatatatatatattttttttttaactga

SEQ ID NO: 62356 - DNA, 2794 bp, Bovine  19866881032610
  misc_feature (1)..(1): n is a, c, g, or t
nccagagactgtcctcaggcaggatacatccttgtaaagaccaggtctactcccataatttacattttaagataacagaaggtttaatccagagactgtccttaatccagagactgtcctcaggcaggatacattattgttatataatcctaaggaatgtagagaaggaaaaaaagtttgtcctttcttcctccttgagaattccagacctctctctccttggggacccctagacttcttatcaacctgcctaggaaatgactctctcataatagacactggctttattaaacagttctaaaaatcatcaaatatccaggcttacttaaaacctgctttaacttccttccatctcatatatccaattatgtccagccaagatttctaagtctttcacattccttcttcaagtccaatttccttttctactaccactatcttcatcgaatatgatggtgttgtcatagcttcctaattagtcttattgtttatattgattatttctctaatgttttcagatggttttaggaaaaatatcccataatcctaatgatggaatttctttgcttatcgatgtgcagtacacaattcccagaattcccagttgtctacagaatggaccctaatctccttgccctgaattcaaggtactagaatctttgaagttcacttcccttatggcctaaatacttagcacttacctagcctagtctagaacttgaaaaaaggggcgatcatattcccttgtggaaggaccccagtgtactacccaaaatggatactgttgatctttgtttcagtcttattcagtaggacctgtggctttttatcagagtaactatcctatttggaaaaggaaataatcagaatactcctggactactagactattgcaattcaggagacccaaaatgccactgtggcccttcagtcagaaaagaaccttaaggagattaggtaatcaatggagttttagctcagatttgcctcacagtgggtccagtggggtccccaagcctgtcttgtggttatgtccccaatttcagagtacataattgcaatggttatactcagcaagtggcagaatctccaaaactttctgttgaacactcattatttattgactttcagccggtggttccacagtttcttctacctggaaggcccttgtagatgtccataaacatccaggtccacattttaaggtcagtcttgtcttgcccattatatgcagttacgttgggattatcagacagagtatctgggtatgcaaaagcaggcatcaggtttagtgaggaatctgccaaagaaccataaacatgcagctgaaagaaggtcagtcacagggaataacagaggtagttagagccatactgagggagtgagaaaacatagtccattagtctccttgagtttacttgtaaaagtgcacaagtattaaagatggaaaagaaagtcctgtttgtatcagttacaaaacctctctccaaatcacttgattattatctaagttggtttcttttttcttttttaaattagagtgtaattactttacaatgttatgttaatttctgccttacaatgatgtgactcagctatatgtatacatacatcgtctccctcttggacctccctcctacctccacctcatctcacccatctaggtcgtcacagagcaccaagttgagctccctctgctgtataataggttcccactagttaactgttttacacatggtttcttaaaagagagatacctcttagcctctcacattgttcattattcacaaaccctcccctgaaacttcttggtcagtttcctaacctccaaaatatgacatctcccctcttttatatgactgacagtaaatttgacccagttagaaatatttctgtaacatatttctttaattaaattataggttcctggagattgaaagctttgttttatttatctttatattgccaccttcactctatataatccttgttgcaaagtagacaagcatgaataaacatttataggtaagctgctaagtcgcttcagtcgtgtccaactctgtgcgaccccatagacggcagcccaccaggctcccctgtccctgggattctccagacaagaccactggagtgggttgccatttctatgaacagctaaagttgaaatttacagtgggtagattttcaagaatgtccttacactttttgcctaaataccttgacatgaataatgcatgtagtgtatattagaagggaatcattgttatactgtagaatgtagttattattgattcagttacagattagaaggagaaagcaagatttatgaaaggtgaggaaaattggtaatctgtgatttcagcttcagactaagctatgaaatgttcaaaaaaagattttcatttttttctgaaggagtttagtgtacatgtattctggggagtaaaaatggccagattattactaaaaaataagtgaaaatgatcatgaaaagaaagattaataaacagaatattcacagagaaacttgcttaaattgccaagattcacatctttgctatcttcctaccctgaggcataagttgtcctagtttgttatataaacttttaattttgaacacagataaacaatatattgagataaaattggcccagatctacctctataaatgttaatttttttgcaaaaatgtttggggtatttgggaagttggttctagttctggtaaacataattttaatgttagtagatattgtatcatatggaattccatttcaggaacataatgacaca

SEQ ID NO: 62357 - DNA, 1070 bp, Bovine  19866881074913
  misc_feature (1)..(1): n is a, c, g, or t
ntgagtacagcacatatccagtgacctaggcagagcatttacagaaaatagaaaaggtaaaagcatttgcttcaaagtagtcttggtttaaatacagtctgaattctgtgggactctatcatttatttttcacttaaaatatttctatattttgggaactcaatttttattcacatgtactctgcacctagaatagaaatacatgccaggataaatgagtcatccaaagtagtcataaaatcacattttaggtaaatatcctattttacatgtttttaggtgccataacactgatgggccctagaatggcaattagccagaattggggattacaagcaaaaataataaagaaattcaggcacaatatatgcaaaaatctaactttgtgttgaattaggcctgcatttccaaagccgtgattttaagagttataaagcacttgaagggcacagttaatttcttccactgattcatcatgaaaattgcaaaacacatttatcatcaaggaaaagacatttgtgtaaaaaatggacaaaggctttttgcagggatattgttagatcatccaccaagtcaaaacagttgtacattttgttaatatgttactggaatcaaaatgctacacagttagagctggattatgtggcctgctgccaaaatttgtagctctgattacaaggatcaagtttaagtagttcctcattgatttatgtctgatgcttcataattcactaactgatgggataagaaactaaatttgttaattggacagtaaaatacatttttttgtccttctgttttaatacttttgaacttttaggctaaagttgttaaaaaatacataatatagtaaaatctattacattaaaaaatcatggagatgtaaaatattggatatgggacctagtgtaattttttaaagagtttttagttttattttattttttggctgtactcaggctttgttgctgcactcaggctttctctagttgtgatgagcagggtttctcattgcagtggcttcttattggagagcacaggctctgggcgctggggcttcagtagctgta

SEQ ID NO: 62358 - DNA, 1234 bp, Bovine  19866881084242
  misc_feature (1)..(1): n is a, c, g, or t
nttagaagaaaaagaaaaacaaagcagtttgtcaacacacacatatgtgttgcaaggcattttgctagatactttgaggttcaccacagaatcataaggcatgacataggtcctaagaatcctatactttttaggaagtgacagcatatgcagtctattaatttctgtactactggtggcactagtagtaaagaacatgtctgccaatgcaggagacttaagagaagcaagtttgatccctgggtcaggaagatcccctgaaggagggcatggcaacccaatccagtattcctacctggagaatcccatggacagaggaagcctgggtgggtacagtccacagggtcacagagttggacatgattgaaatgactgagcatgcacatgatcttaactccaaatgcaccatggtatgtttcaaatgattagttcttaacagcatttgaaacttattctgttctatggaatgcctgcatatatgttttttattgtttccacatttttgtttttaggcaacctgtataactgttccactcatacaccatctctttctttcccaaactctttcttcaacatgaacgtcttccacactccagaaccttttatccttctacctctgaatctctccatgtgaacatcatacaaacaacttgaactcaacatttataacatagaaatcatcatctgcataagcccactttctgtcttgcagttgtggtcattatctctgactcccccttatttccttcagaaatcctggcaaccagcatgttgtctgaattctctatctcccttgtcagacctttggggttctagtcatcttcctttgcttaaattaatggaaataccatttaactaggtccccgatgatttttctacacagcaattaagagtaatttttctaaaacaggcatttgataaattcactctcccacttaagttcaatgacagtaatcttttcagaataaaatcatctgtgacttgcatagttatctatgatgtgtgctcttcttcatctcttcttacctttcactctaaaattacactaacctaacatggattcaccacgcttttgccgaacacagaacctttgcataaactattcactctgcttatatctcttttatcctattctctattccagttgacaaatttccattcatcactttagtgtgcacttgtgactgctcctggaagatgcttcttccatcaaatatttagcaaagggcactat

SEQ ID NO: 62359 - DNA, 2813 bp, Bovine  19866881085315
  misc_feature (1)..(1): n is a, c, g, or t
ntgattttatgaatattaatttagagatgtggtcctatcctttttaaaacccaatgtgagattaatgtattttgtctgtgatatgaagttaatagttctgagaaaagaggctatctgttgaggtaaaattttcccaattttatgccactggatttttgataatataattaatatggttatgatgaatttgaagtctaattgttaaagaaaaaattgccatgttgatagatcagcatttgttacttaatgtcctaagatatactacatttttagtcatgacacatgcagtatataattaattttaaaaagtttttttaagtttgttcctatttgtgatattttactaaagcataagaacatagtaattaagcaaagctggagaacatccttttggctaaggttaagtataattttagttcaattaatgttccctttcctttggtagaaacagttgggtaagtgctcagggtgttttgtggtgatttcactctgcaactgccattaaaataaacatgaagccacatggctaaattagagcatgtggctttgaaaatgaaccccactattctcaacatattaaactgtcagaacctgacaacactgggctcacattcttaatttgagaatatgtttataatgcatttataccctttcatccaacattggtatgaaatgtaaatggtagcatacataacatgcttatgaatgcatcagtattaatgaaaccaatgtatattttagaagtgttcctcaaaatgccaaggtttaatacatctgcaccggtgaacatagcaaaatgtgtccagtgaactttgctgtaattcaaggggaaaaaatggaacttatttcaccatttttgtctattttaacgtgcatggcaatgtatccttacttttctttgaatttgcgagggtgtttttgcagtcagttcattgagtatcctgctcactaatcaactgacaaataattactaagcagagactgaagcaaagcagtgtgctggccttctccctacactgcgtagaactctctatttgacactctgatactcagtaaatatttgctactttgcattttgcttctatgctgaagaacagacgtgctaacaagtagacaacaatcctaacgcacaatgaggatatcaaattgtgtttaggccaatgcgtctaccagagacaagttatgtagttaaatgtctggcctttggagccaaaccaaatttagctccagttctaattttctcacttaatttttggatcatcttggactagttgcttaacctatatgtatttcaatgtttttagtataaaaataggaataataatagaattactgtaaagtgggttttcaaatgattaaatgaattcatgtaaaagttgaaactgttcctggtgacaggtaaacataatgagccacagagacgttttgagatacagactctattttaattatgttctcccatatattagcttatggtattggtatttcacacattggagaaggaaatggcaacccactccagtatttttgcctggagaatcccagggacggggaagcctgttgggctgctgtctatgaggtcgcacagagttggacacgactgaagagatttagtagcagcagcagcagcagcaaacaatattaacttattttacttaagtgaaaatagatttggagaggttaagtgatattaggggatgcctgaaagacagtttatgtatgagattactacataaactgaccacaaacaagtgccagtgttgactcattcattcatgactatatcatgtatctacattcagattttagagatagaaagtaaagctgttttaaagtaatactcatttgcaacatcttaatggatctgaaaccattagtatcctttttctttcctcttttccagaaaactgaacctatttaaaaacccaagctttaagcattttttatgggtccccaaataaaatagtagtttctttttaatttcagttattttctacagaataagagcatcaaacatttcaaggctctatatttataaattctaaaaatttccttcaataaaagttcagagcccataggatatgatttcctctcctacaaaaatgaagctaatacttccttccagatagtaattttatgacaagaaaacaaagttaggggagaatttatatgtttattattttctctgactatggcaggtagaataatgacctccccaaaacgtctgtgttctaatcccaaaagcctgtgaatacatcaattaaaagataaagggacattaagattgcagatggaattcagtttgccaatcagctaactttacatacaagagggagattaccctagattttccaagtgggcccaaagtaatcattccctaaaatagaataaagacaggaaagtcaaagtcaggggagacgggactatttaatgaggtcagagtgatattaagtggggactcatctagttcttcatggctttaaagatagaagatggtggtcaggagagaacaagtgggcagcctgtacaagttgaaaaaggcaaggaagtggattttcccctaaaccctccagggcaactacccctgcaggcaccttgattttggccaaatgagacttctggcttgtggaactaaaagggaaaatatttgtgttgttttgagcctctatgttcatggcaattttttatagcagcaatagaaaactaattaaatataattattatataactatctcctatgcttctcctgggtttcccagatatacctagtggtaaagaacctgcctaccagtgcaggagatgtaagagatgag

SEQ ID NO: 62360 - DNA, 1921 bp, Bovine  19866881118596
  misc_feature (1)..(1): n is a, c, g, or t
ntctattttcgtcttaccctgtcagcaatgtgtgggtagaacctactgttgtcctcccatcattatgttctcagggtctcttttggtaaatggatattaattaaatcaataagtttaaagtcttttaaaatagagaacaagaatttttttattgaaaaatacatgtaaaagtcaaaatatggactttgagagagataaaattgtagtctttgaagagcccttaatagttaaaaaaaaaaaaaacaaaaaaaaaacacataaggaataggagatattgcatcatccccgaaagagccaaagcctaaccatctgcttcatatctcactaagcctagagatgagaaaaaatatgtgaattttggtaccccctgggagattggatgagaatcatacaggattcagagaatagaacttgcagggaaatgtcaataatttaggtgtttttttttttcttttgcaattatgaaggagaactgtcaaaactgtttcattccttaaaaatatagtacatgaaataactctgcagattcatttcagtaggcttttgagaaaaggaaggtaaaaaggaaacagagcatttctattgaaatttcagaaaagaactctgaactgcaaagtgttagtctaatgataataaaaacttgactcaaccatgttgaatgtaccagtttttttcaactgaaaaacatatcctatgcctcttgctaaataaagaacaaggtttttactctgggtactttttgctttttcttggtaaagaagcagttccaaatgagtctatactgaagtgctttacaattttccatatcactgcctgaaaaaaatgaggaggcaaccaatgttaaatgatcaaaaaaaaaaaaacctttctctttgaaaattaaatgtcaaatttaatttgaaatgtttacagagatacttcttattgttcattatgatcgaaatgataaatgagcaaagcttcttcctggggataatgtacttcttaaaattttcaattttgtcttgattttatataagatggccttgtaagtatgaattgccatttgcagcaccaaaagcacttggtgcttaataaggcatagaatgattactaatttagtagccaatagatagcatataaatatacaattaagtacaattttctcatactagaaggatattacatttttatactttctcatctaatgagaataaaaacctgtatgtacacccatgcacaccatgctccccagttcatatatttcccaatcaggtatatcatttatgtgagcatttatagtgatttttataaaatcttgtcatatacttctagtaattattactagccttagtcctgtgcagatttattttgactgtcatttgacattaagaaaaaaaatgtgttttatttaagtagtgttgaaactaacagaaagcacgttaggagaaacagcctttaaaataatggtaaaatagctggtggtttgtttgtttcatactaatttaaacaggtttacataagtaattggagaaggaaatggcaccccactccagtactcttgcctggaaagtcccatggatggaggagcctggtaggctgcagtccatggccgctgggagtcggacgtgacttagcgacttcactttcacttttcactttcatgcattagagaaggaaatggcaacccactccagtgttcttgcctggagaatcccagggatgggggagcctggtgggctgccgtctctggggtcgcacagagtcagacacgactgaagcgacttagcagtagcagcagcaacataactaatatctggaccatgaggtgaactggggtctgatactagtttcctattgctgttgtaacagattgccacaaaacttaatggctttacaacaacacaagtttattatcttacatttcttaagtcaaagctct

SEQ ID NO: 62361 - DNA, 1217 bp, Bovine  19866881166909
  misc_feature (1)..(1): n is a, c, g, or t
ntcttgataagtttttagttaattaattattatggaggaagcattctcctatgaagtacattacctcagtttgattgtttctgttgctggataaaagtcaactgatggaatgatgaccatgatcgaccataagtagttttcagtgaaagcaaatggcagccattcattaaataaggagcaacaaattaatttatcttcatttctgaactggaaaatcacctaattaaaatatgacttaatccaaatttatgaaataaggaaggtaaattctctttaaatcttatactgaaaatgccacctttttcagtatatggataatgaaactctaagttgagtatgtcagtttgttgaaggataaagagatacattattagaaaataagagaagtttcaaacataaaaatatctgcctaggaaatctataccatttagatccaagtattcttactaagcaataattttgaaaacaaaacagatctacatgacaagccattgaaagataaattgcatgtaaagaatatttaatgactttttaaaacatagaaacctctgaaacatgtcactgacacaatgcacacactcttaatttgagtttccttataccccgtggacatttattttgacattcattggactgtttacaacttcaatggagtaagcatctcaaggagatcaaaaagttttattgtccccaagtccttctctcccactgtttcctgattggtgggttattgtctttttttgattttgtgaacagaataaccagccatgcaaatgatttctgaatatgtgccaattgggacctaccagaagtttaacaaattagcttcttttcattcaatagaaattgccatggaagagaaaactaaggcatgttttcacccagatctctgtttagtattcttgtccctgtgggttgaacttgaagtaaaggaaataggtaaactatgttttctcagttctctggctcccacgggccatgggtttactttcaggtttattggtccattcattgaactcacattttgtacagactgctctcagaatcttacagtccagctgtttattttatatttagtaaccctagagaaagaatgagtgacagaagaaatgtataagattaagcgcaggacagaaagtatagcaatagaaaatgaaaattctattcatcgagtctgtagagtctataagtcttaagagaatataaaaaatgtgaaa

SEQ ID NO: 62362 - DNA, 868 bp, Bovine  19866881193107
  misc_feature (1)..(1): n is a, c, g, or t
ntcttcataacaattattttaaaaagacattattttgcttaaaaagattcagaagttctacttatagaaagcacatttaggatttaaatccatgtctgtccccaaagcaggtgctttttcagctgtattatgctgtcttttgacattcattgttaattgtcttatgtggtagactattgactagcatagtttaaattattcagtatctcttagtctgctagtttcagggaaagaagttagatgacacttaggtaatttttgctaataagacaaaagtcatcatatgtttcctttgctgtatagtttaaactctttgcatatttgctgtttattacacatttctctttctttccagtgtacaaacatttgaggttgtgttgcagaatgagttcttatacatgctgtttttgcatatagtttttgcatgcagtttgcctaacacaaccatttcctctccctttctttaacacatatctaaaatttgtcaatggcatttgagcatgtgtgtttggggagtgtgaatataaatatcatcgtatagataaaattttcaatcatttcatttgttctagtgtgcactaaactgtgatttaatgggaagtaaaactgctttcttatggtttagccataatatgctttagatttatttcaaggcacagcttgtgctagaccaaagctatctttagaccaatggagtccagtctttcattttattttcataatcccttcatatttctacaaaataagaaaacttagtattattataagggaaaattgaatatttcagtaataccaagggtgatggtaaaaaatatccaaaagtgttggcagtactggttttgaaggcttttaatctttattctggatg

SEQ ID NO: 62363 - DNA, 850 bp, Bovine  19866881260504
  misc_feature (1)..(1): n is a, c, g, or t
nttttagtgcttttactaggtgacttttttttacatattgattgaaaaggacttttctggacctagtatatacagataaggtaagccttgccaggactgaagaaacattgcccaatttctgttcttgctagtcaatagacactcatatcaaaaaaggcataatatagagccacttaagactgtcaaggtcaaatggtatatagacataaatagagaatcattggatatattacgactttaagacaatataacttctgcactcacttacgtttatttcaggtcattctacttagaatattcagaaagaaattatttaaactttctgtcctaattagctcagcctttgccaatgaacacaaacattttagaggtcattattactcctatctacatttttacagtacactgacctatatgctacttaaattctggagttttaatttcatcatcattattgcagttttccaaatgacaccagatatagattactgccaagtaagacttgttatcagcctactggggttatgatgtactacagacagtagtattctgttaaggccaaagtcatttatttcatgtggctagtttacagaacacataatgcaaaagaaaacctgaatattgacaataatacagaaaaaatgcacaagtattctttttagcatttactttgcagttacatctccacatttaacacttttcagtttattttaccataatgaaaaaagtaaccatcatttctcctataatgaggagtattataattgtgtagactaattttaatgtagattcatgatcttcatatgtttaaaatatgtgtaatatgcacattttaaatttataaattgta

SEQ ID NO: 62364 - DNA, 760 bp, Bovine  19866881272357
  misc_feature (1)..(1): n is a, c, g, or t
naataaggtgaaatagcagtcatccatgaaaacaactgacatttagtttcacatgtaaggtaaatctgaatggcaagagaacctttcctactcacaggtatctaaagattcgtctgaatcatcagggcagtcagggtctccatcacacagccagctctgggagacacaagtcacgtgatcgtggcaaagaaattcaccaggatcacaggactgctgatctgaaaatgaaagtgtttcaaaataaaatatgaatgatctgaacatgaacacgagaacagtacaaagatgaaatgtgagaaagcaatgcataaaaggtacatgaatgggatccgcactttctattcagctgcaaagctagaccaattatttttcttaatttaacccactcagctcaagcactcaaattcgaaagacggaattttttggagtctcacacaacctatcctaaaaatagttaagaattctgtttgtttggggggctacaaatctttctcatgtcagttaaggcatatatatattccagcaagaaggttaatagaagatgttgatccaaagcagaagttcttaagcagaatcttttagtttcctactctggcccaagaaaaggaagaatcagccaaaaaagtgaaaccttgtacataaataccatctcttagtattcagttcttaaccgttcaccccgatgctggaacttcatgcctctctatctattagataccccatctcatcttattttctcttctctttttcactgaaactt

SEQ ID NO: 62365 - DNA, 1676 bp, Bovine  19866881283039
  misc_feature (1)..(1): n is a, c, g, or t
ntgtagcagtctccgcattcctaccaaaatgtagtctttactgcctgaggactttttattcatttagctataacataaatgccaatttacttcaccatctgggaaaaagggttgtaagttagtttctcagaaaatttacctaattgaacatagcttattaactagagtttctttgggatggaaaaattatgtatgtgtatttgtattctaacatatttcatcagaaatgatgatttggaaaatacccagggtgttatttatcacacagcttcattctctcagtaatgtaactttcatgacatcacctggcaggcctggtcacaggaactaccctttgaaacaatgaatgtgatatggagtttttcttttcagtgtctcagtatggttctgcatataagctgagagaaaaatggtacaacttgatggaagtgcaggcataaaactcatatcttaacagatgtgttatttaagtttaaaatggaagtaaaaatgtaaatcaacttctaccaaagtttgcacagctgtcgctatgttttaaaggtgccagtggcttgacagttccaagaaataggcaaaaataaagcatgagggtatctttgaacagggttttggaatgttgatcttttttatcttttaacatgttccatgggccaaataactatcagatctagttaatgtctcctttgcatctcttctcacctttgtgagagctgggcttactgggttcactctacatagaaatgtaggcaatggatagtgaaaatttatgaaagatgccaggcaataaattgagtctatttgtctgtgttatgaatattattctatatctactttagccatccactcaaaaaaatgaagcatgtttctcatcatagtataaagtgtcatggtttttttctgtttagatattattggaaattaattaaccaatcaactcatcactatatttgttacacacactatatgaaagtcattcctctgagaggagggtgttggtcttctttaaggaatttaacttaagtcacagtaaagctaccaagtaacacatgacctacctatagtaacccctgtttggtaaaacctccctaagtcctctgggaggagttaatgcccagctcttcttgctgtcacagcatttgtactgcactctttaatcagttattaccacgtatactattgttcaaagcttaggttctagtatcatgctacctggattcaaagtactatggctcagttaaatattgtgtctcctcatttctaactagaaatgatgtatgtacttgccttatagagttgatatactgatggttaggaccatgatcctgaagcattgttttggtaagtacatcctgcagaaaactgtggtgcaaaggttagctaataaacagtttcttgaaaaagattacaaaattgaccaaaaatgattatagtaaagtcagatagaaaaaattatgtggaagtagaaattacatgctggctgaataactgggtaggggatgtgtttgggattggaggcttgagaataggtcatgactgacgggataataatggttcccagtaatagaaataagaaatttattttaggaaaaaatgtttacgattagaagcatatcaagaaacatccattttcctgctttttcttcctcatgaaaattactacttagcattatatttaa

SEQ ID NO: 62366 - DNA, 1118 bp, Bovine  19866881320972
  misc_feature (1)..(1): n is a, c, g, or t
ntccctttgttcccagaagaggagtgactgtccccataggcatgaccttacccctccacttgagtctgacttgaatcaagagcctccactagctcttagtaaaaagatgaggctgcttaaattacgttttttctcttcttttaccttctgttttaggcaagtagaaacccagggctgtgaagaacaataatatccaagttaagagaattgttcttattgcctcaaagttaagaaaactgtagaatgagtcactctggcagaaaaatcagagatccacgaatacattattgaaatgtgacttctgcatccatcttcagaagcaaattggacagtagcaatgcaacaccaagtgaagcaaatttaacacttctgatgccctactagtaccgtgattaaatgtccatttttgaaatattgaagatacatcattcatttttacttcactttgatctggaaagactcttgattccataggctcttacaaagtagcttccttgcttagctatatgctctcacatgcaaggcttggcttaatacatgtttttcttccatctattcctttaaagcatcagctctcccccatctcctttctgtttgaatttgctgggtggcaggggtgccaggagtgttgtatctgccaacaggtagccagccactagactggtgtctctaaatcagcaagtccccatctgtcagcgagagtctctccaaattcattctgctgattagagcagctgagcctctagctgggttctttgtgggcttcaggcagatgcttaataaggtgagccaaagggagtctggccattagatgtgttaagacctcagatacgatctattttttatgtttttcaagtgcatgtctacagctctcctagtaactttaccacataatgttattggggcatcaaccacccatgaagtttgatactgcagacaaaaatgcttctgtcatagtatttaagcttaatcattaatttttgagtttaaaaatgtttagcaattagcaccctggcttaagcattgttagttttgaaggaaagttttagtagagcgactttacagataatcacatcttaccaggaaaagccaagttcagtctaaaggggatctgtaat

SEQ ID NO: 62367 - DNA, 1420 bp, Bovine  19866881345751
  misc_feature (1)..(1): n is a, c, g, or t
ntctattttcttctgttacattaacttatcccttgtttactaacctacagaaatgtagtgctggttaacagaaatccattaacctgaatgacatatctttatcaacaatgatttcttccaaccgataccgttcttcattagataccatagaacaaatggtcatatctttgctttatcatgagctttcaattcttcccttgacatagattggtcctaaatttcatctagataaaaataccaaacttccctggtggtgcagtggataggaatccgcctgccaatgcagaggacatgcatttgatccctgatctgggaagacttcacatgccatggagcagttaaggccactgctccaaaacttgagactgtgctctagcacttatgagccaaacctactgaagccccctcacctagagcctgtggtctgcaacagggaagccaccacaaggagaagcctgtgcactgcaacaaagagaagccccgctccctgcaactagagaaaagcccatgcagcaacgaagatccagtgcaactcaaaataaataaataccaatggtttgagaaaataaaagagatgatcataattttctcctgttaggttttcaaatttaatctcaaattaaaagtcacccactgtgcctctatatactcaattcttcataaatctatcacctagctacaatgatgcctgatgattcacagagagggaactcctataggtacttgtcatccttcattgaaaataatcctaccaaaactattaaaacatcaccaaatgaccggtccctccattggctcttcctttcatagtactttctttgaaaaagtataccatcagtagcttacagacagaaagcaagaaacttccaccatttttttctgtctttacattctctgtcttcatgtatatactactccccttatttaaaaaaattttaattttagctccacacaatctattagccataccagtagcaatttaacactgataatccatctctggtaagagtaaatgcctgtcatcattctttatgattcttctttgtcatgtccattatctcctctctattcatactctattagaaatttcactaaaatgaaaatgaagcaggctgctatttattgtctatttaaaaatgatattttgtatacttcataaaattatgtttcataaacagataataatttgaatatttaatatgaaaccttcatgtcagttcataatcatatagcaatttgaatatttaatatgaaatcttcatattaaccctgggttggtaatgagttatctactgctgcataatacattgaccttgtaaaatttatcaattgcttcccctatgccaatcaatcaatacagatttattttcagttaaatattattttctgatgaatcactcttcagctgattgcatattta

SEQ ID NO: 62368 - DNA, 1183 bp, Bovine  19866881479234
  misc_feature (1)..(1): n is a, c, g, or t
ncatgataatgcttatgcaagctctgtcttagaataaaaatggtgactcatgcaactctgcttaatactatagctcattaaattttgcttgtctagctttcttcacagagaaggcaatggcaccccactccagtaatcttgcctagaaaatcccatggacagaggagcctggtaggctgccgtccatggggtcgctaagagtcagacatgactgagcgacttcagtttcacttttcactttcatgcactggagaaggaagtggcaacccactccagtgttcttgcctggagaatcccagggacgggggagcctggtgggctgccatctctggggtcgcacagagttggatacgactgaagcgacttagcagcagcagcagcagctttcttcaaagtctagccacattttagaagatgaaggcatgaatcctccagaaagttgtgattaattctctttgagcctaaaagctgatgttcttctgtttgttgtttatgtttgtgtgcgcaaaccacttttgttctatcaaggattttttgtcttaaagctttattatttctatagttaatctatagtggaatttctattttttcccctaaagtccagctcagaataataaaaactattctgttttctccttttgtgtgagacttgtgtaaagaggtaaataattagtcaaaccatatttgaggggtttgttttcttgtactctctctcaggttcaaacagctgcgataggttcagaagaaggatcagacatagcatgtgtgtgaggcttcctgttgccatggtagttgctaatgtggtttacaaaatagtaagagagggataatgactttctactattggggaaaaaaaaagagacagagagatagaaagatgtaaaggacattcacacagagctaaaggattttcgctgccatgattgaagcccccttgtaagcatcaaagcaggtctttgtaaaggcacttttttctgtcctcttgtgcattagtgcattagttttggtttgcttctcttcattttctgatggagagaggcatctctgttcttgaggactcttgaggagaaactgaaagacttccatcattcttgcttgggagatgagttttaaatgaagtcctctagaaagctagttcctggtttctgctccggttcttctgagctaaccgctttacacaact

SEQ ID NO: 62369 - DNA, 981 bp, Bovine  19866881526370
  misc_feature (1)..(1): n is a, c, g, or t
nttactgtgtattttaattaaattccagatcttgcagacaactaggtatacatctataagacatatcctatctagaaagtgatgtgatatgaagaattcaggcatttatcatgatattgaatgctccaaatataaataataattcagcaattattcaactctgtatttgaattaatctgtatggacatggacacatttttgaaatggatgatagtctaattcatgcagactttgcaacttaaaaaagatgagtattttgtatcagtattggtgtgtttttttcatattaaattagatgaagttaaacaaaaccagaaagctgcatcaaatgtggactggaggttttttttttttttttttgagaatcaatctaaagataaaaatatagaatataaaatatacaatataaaagttataaaatgcaaagaactacagaaaaattctactacaataaattattttttattattttgaataactttgtattctgtaaagaatgtttctgcaaatagattaactgcaattcacattgccaccataagttattaagttgagtccaagtgtctttatcctaatatggctgacttttgggtgttcatttccacctgaaaggtgatatttatttagaaaatagcatggtcatttccagaaaaggagacatgatttaaatatcaactgtaacttaagaagaatgatcaagataataatattataggcacatttaatcaggaaaaatgacaatttgttgtaaaattcataaatactagttgataactcattccagccacataaagggccttaaaattttcacaccaaggcagagaaaattttttgcatagcaagtaattatttagactacaaatgatagaccattgaaatacaagaccttgctatcattattcatgctttgaaggtaaaataaaataatgataaacccaccaatattaggacatgcaagaaataaatgagcacaaatagaat

SEQ ID NO: 62370 - DNA, 1401 bp, Bovine  19866881531759
  misc_feature (1)..(1): n is a, c, g, or t
ntactctctacctcactgtactgaggatacaaaaaggtaacacaattttaggagaagcaagatgcaatttttttcatatttttatatatattttttgtatttgttttaactcctcagtaattgcatacatatcaattagccaagtgaaaacttggccagtcttttgtttatttgatcagtttaacagtcaaattctttaattcagtcatctgaattcattttgagcctaataaatacagtcataacgtagacacaatatcattcatctctaatagaatttctcacactggagctaagactaatggtgaaaaataacatttataatagctaatgatgagtctggcattgttctaagggagctgcaactcatttaatctcctccaaaactaatgaactaattaagactattatcctgatttttacaagtgaaaaatagaaaaagaggggttaaataattacccaggctcacaagtaataagtggtagactagcgctttgaaccattataccatgctgtcacagcaactttctttcatgcatctcaaaaacaaatactgaaagagatgacttgtgttttcaggaagatcagctataattgaactgttgctagttttcaggtttggccaaagtgatcagcacagtttttgagaagtatatttgaaaggagctcatttttccaatccacccttatatgcatatttgtaatgtaaaagttatgttgctttaaaaaggactggtatgcattcctatatataaatgcccataacccttgcaaggcaaagcaaacaactcagtttttgtgtctccatttatagttgaactccaaggattggaatatatgttagaaataaacagatttattaatgtactccctggagaaggaaatggcaacccactccagtattcttgcttggagaatcccatggacagcataaccttgcagactatagtccattaaggtcgcacagaattgaacatgactgaagtaacagcattaatatactaaattgctgagaaatatttaataaggatatttataaactttagaaaggaaaacctaaagaacaaatcatccatccgaccatactgttatttagtcttacctctgataggtgttgactcttgaaataattctctagaaaataatcagaaaatattaataataggtgactgtatttgcagtgctccttcctgtatgattagatatttcttacttacatgtgaggataagtgtaaaggagccaacatctgctttaacaattattgtggtaaaatatccataacaaaatttactatttaaattgcttttaagtgactattcggtggtattaagtgcatccacgttgtgcaactgttatctctatccatcttcagatttcggccatcaacattttctttcaaa

SEQ ID NO: 62371 - DNA, 1917 bp, Bovine  19866881609553
  misc_feature (1)..(1): n is a, c, g, or t
naagaacgtggcatagagctctgtgagtacccactacatatggtgccaaactcaggcaaggtggtattctctgcaagagctgggttttcttctatttttgcatatccccttatgtgttagtgttgcacttgagcacagggaacagaagaaagagctcagacaaaagagagtttacttttagaaactcatagaaagaaaaaaagtgccaaagtggacaatccaggattgatatggctgctccagaatgacagcaggtttcctctgccattcttagcatggagctgtcagtctttcagccacagtaggacttttccaccttccctagcagatgaatccatttctgccagagagatgggaagaaaacagggaaacagcaagtgccagctgagtctttctgtttctcagaggatgataacttttacagaaagcaaactcagtaggtttctgcttagatcttgtttgccggaactgatcacctaaggcatgaggcactgtgtattcttcagggtttcccaaaataaaatatacggtcctgctagtcaagaataacaggagactagatattggccaggcagaggacccaagtaacctgagccacagtgctctcttcactctcttttcctctcttcatctgtggcaggggtgggggcagtcacaaggtatggtctgaatcccagctgcttgacaccaaagccagttcctccaaatgaacatctttgctcttgtgcaacaaagtactcattccaggtctctagtaccttgtctgtacaatggacatgatagtacccgtcccacagtaaagtgcttgaaatactgtcttttccataagatcttctttccacccaacacccctcccctatattctatctctccagagctttgaccaagcaccttaacctcagggtcttttgatagagcaccctaattgctgcctctcccgttcttactgaaaatcagttttattctgtaaggttgtggctaggggtagcaataatttaccatatacactaattcgagtaaagttgctaacaatttttagcacttaggcgtattacactcaaaattaagacaagtagatatagagattattggaggacaggtgacttttcctaggaactcttccaacacatcatgttgcagaattgattaaagttaagatatatggttaaaaaaacagtttagttcataatggtttattgcttaattgacatggcagtcctgaaatgtggatgttttctcattttaagagatgaggaaattgtttacaatctttctctgccttctgatttgactgttattggtaaaagtggagtttgcatttctttcaactcactgttgtttttatatagactcaggtaaggaagaattcaactcctaaaaggaatccttaggccacctaatttaaaaatacagtgtcatttgaaaaacagacactatcccagcagagttatctcactctgactttggagatgatcagttctgattgaaaaatgcagtaaacacaccatgtctcctgagtaataggaacagaagcatttgtgaaaaatgaaaatggctctaagttattagggttagatgtgtcgctgcatgaactgaccattgctttgattgtatttccattgttgtggagtttgagctttatttggatgggaggatattaacgaacttcttatattcataggctgacctttcccctaggatgaaaggtagaaatccttttacagtttccttctatctttctttaacagaggtcagggaaataaaataaaattcatgtgggaggttattagcaaacagatactgccctttaaaaataaatagcaggatagggcactgaaaggagactctaggaacaataaaatgaatggaagtagggtccttgtttctgagtaataggatttagaggtcatttggaat

SEQ ID NO: 62372 - DNA, 1572 bp, Bovine  19866881755482
  misc_feature (1)..(1): n is a, c, g, or t
ntgtgtatgtagattcatttcatcactgggaattgaaaatctctcatttgcaaagagagtaggatgtgatggcagcagttttcagagttacaattcctttgagaagaactaaaagacatagaatttaagaactgaaaaagaccttagggatcatctcttccaatccttcatgttacagatgcagaaatctcatctgcaaagatgaagttacttacccaaggtcacccaaatagccagtgacaaaataataggctttaatatgaattaatgtatttcagtattacagttacaaagaaatcaattcaagttgaaatctgatttcctgatgtacttttttttacacagccaatttctgtaaacatgttttagaatgataatattatggctacagtttagaaacagataacagcaatagtatgacagagtagagttgctatttcagttaagccagataaaaggattcaccatttcaggactataaaataatataaagaattgtgtttattctgctgtacaatactctatctgatgaatttcaccacacacacacacacacaaaaaggaattaaaaacttcactgggtaaagtttgtaaaaagcatttaaaaaccctagtggtaactagaacaatgtttgtcatgagtgggtatggacactcttgtttgatggtacctttgccaatccaaatgcagacctagccagggagctcaggttaccgtggacacaacagtcaatcggctgtaagagatgcttagagcagaagctcctgcgataggaaagcttgaatcttgaacctattcacgtattccctggaagagtgaggataagctgagttctaaagaagaaagtgcactcactgggttagggcacagtaggaagaagcattccaggtccaggtataaggaagtgtaactagagctcatgtaacttgagagaaaatggaataatatgaagctggtgcaaaaaactaggagataaaccatgaagagacttttgataatgttggtttttatcttaacagcaagaggaagacattcatgtgtcttacacaatgagattctctgtcaaatatatgtttaaaatattactatttctgcagacttgaaaaaagttacttgcatctctctctcttttttaacctataaaaaagtgacaataagtagtattcaaagtagagaataatgcctaatgcttacccaataagtattaatatctttctggaatattatacaattttaatttctgaacaagagttataaagacaactgaagcacagtatttatttacctgcccatctttacctatcacctggcccagtaacctgtttctggtaagcattccaaggacattgctaattgtctattaggcaaacaaccagttcatctgagtttaaactcttcaatcaatatatataggcaggtgtgtttttgccttgcagcactaccctcacatgcatctttcttttcttttttctttttaaacaggattggcatgttattcaggcaatgttctattcagttaagtaaatagtgatatgagcaattctttgaaatgcatgtgaaggacagtagca

SEQ ID NO: 62373 - DNA, 920 bp, Bovine  19866881800176
  misc_feature (1)..(1): n is a, c, g, or t
nactctgataaaatctcctggcttaagggatgaggtacagtaaacaaatggtcttgcaaggctctctagggaccaggcttaaggctgagcaaggagccttctcagaactgatacaatccatcatttatccacaactaatctagcagttggggttgggatgaaggcttcttacctttcatgggtgagtaaatttcttcccagaggatgttttattctttatagtcagtgtataaaattttcatttgactttcactcagaaacacttttgaaatgacatattttgctaaatgaagcactgaaggatgttttgttctaagaacttatttaatggcagtggcttttttctctctcccttccctcatattttccattatccttccctgaaagcaggatataaaatcctactataatatgcctatggaattcttagggcaaaagtataatccttctactaattgctgcattggcccttttcaggatcaggcagaataattgattttcggttgactattttaaattaaaatctctgtagcattagcttttttgatttgggggtaggagaacttgctcacaaagagtaaagttcatgagaagatgagttaaaaacagggcttaggtgacagtacacaaattcagtaaaggtagcttatagcaatctactcatcttgaatgatttgttttactttccttttttttataacttttctgaaaaatcatagagggcagggtgtgattaaattttactttgcttgatcaaggatcagataagaaaggggagaatctctcagcttgcacagatctttctgggtactaaacagcaagatagaaaaacaaaaaagtaaatgcttctcaacaactttgatgagttaacaaaagataagtaattattaattaaaaaattcttgtcttggactgtagca

SEQ ID NO: 62374 - DNA, 1048 bp, Bovine  19866881909734
  misc_feature (1)..(1): n is a, c, g, or t
ntcacttcagttgtgtctgactctgtgcaaccccgtggtcagcagcccaccaggctcctctgcccatgggttctccaggcaagaatactggagtgggctgccatttccttctccagaccccattctgtggggtgatttaaagtgagagatatgtaatcaactgacatgagggcaagccacaggcaagcctcaagatcagtcattaaatatatttcaggtttaaaaaagtctaatacagttctatagacagattgtggaccttctagatcatttaaaatgtgtgctttaagcaaacacttggggctaagagctgaacacactaaaaatgcatttatttgtttttaagtgatatatatatgtgattgtgaataaaagataactagtacttgaattcagaaaactattaattttgccttatatatatatatatatttttattttttttcctcataactgtagtcctgggtcactttctagcttccagtaatgtaatcagtacttgtagataaacaacttgatttctgttgacttactattttcagggatagagtcatattagcttttaccacaattctaacttaatcctgacaaccaagacatttctggacttcttaaatagactctgttgaataaaagttaatccaatcttgataactcaggtctatgagctaattctcttcatagttatatgtaatgtatataatgtatgtctcctgagtatattcatctttggtcagtgcgaaaagttcagaggtctagatgaggtctacaaggctattggtcccttttctaaaatagacatacacttttgatatctatgctactggcctccagcatttgattctcttccttttagtcatcactttttactgctcacagccctagattactctagttagccttttcttttctgacttctttctgggccactttgacttagagccaataaatctacctgtgttaattttgggtgtaaactgagattaagcaggtataaatgacaatctatgtgcttctcctataacgtgttagtagattttctaaatat

SEQ ID NO: 62375 - DNA, 775 bp, Bovine  19866882270520
  misc_feature (1)..(1): n is a, c, g, or t
nttggcataatgataaaaataaatctatagggctgaataagatcactagggagagaagtcaggaataataccaataaattcaaacactttgaggtcaagtagtgttagaaaactggcaaaagagtctgacaaatatcagccatagtggaagatgtaaaactaatatacaatgatgtcatgaaagtcgagaacaaatagtatacctgacataaaggtgggattcaaaggctatttttaagatgaatgaatgaaactactcatctgcattgaatgctgccaacaagtcaattaagatgggagctgaaaagcgtctatcaaatttaacaatatgaaaatcaatgatgaccctataagagtcattttggtaatggaggttggggaaatgggtgggaaaggatatcaaattaaagcaggctgaagagtaaattggctccagttcgtgagcttcaccaaaatgagtattcagaatgtacacataatatctacatattaagagaaaagcaaacatataactagattgaaaaataagaaaagtagaaacagttcacaaaatagaaaacaatgtccaaaagcatatgaaaaagtatccaactaatattcaggaaaatggcaacatgaaatactggtgataggcaggctctaagatgcccttcaaggacatttgttgcttcctggtgctcatgcccttgtctaatcctctccccttaagtgtgatctggacctagggacttgctcctaatttttaaaacatgcaaaagggatgagatgtctattt

SEQ ID NO: 62376 - DNA, 1307 bp, Bovine  19866880430281
  misc_feature (1)..(1): n is a, c, g, or t
nggcatggcgacccactccagtatttttgtctggagaatcccatggtcagaggagactggcaggctacagtccatggggttgcagggtgatatacaactgaatgactaagcacagcacagcaaggggttgtatagagacaactactgaacatgttgtgtatttgtatgtttacattttgtgtaggagagttacatattagaactcaccttcaaggcattttggacattaatttaaatgagagagagagatgcaattgagaagggacaattaaggcgatgtctccagttgcttaatagtctgtagccactttttttcaaatctattgaacaatgtgttaatttcattggacattttatctgatgtgtaggctcctgtctgatttagtgaaggtcacataaatcctgatttactgtgaggcaacaacctataaggtccttcatagcccaggcaggtggttggtgacaggatgctgagtgatttgaagcctagaattgtaactggttgctgattgtgcatgcaaggctcaagttctggattttatatttcctgtttgggaatgattgtacaaaaatgagaaatatcagaaaactccatagtacttttgagcaattctttttcttttacttgagtgcatgtgtatggtggtatgccctaaattaaacatcaacagctcttattattttgttgaaaaacagtactgacaactatccactgaaatgtaataacagctcagctgtctcagtggaagcaaaactgttcacaagtggcaaaatgtaaatagagatgaaggagggtgtaggggaagacaggagagctaagagaggattaaaaatatttttaagacttaaaaaccaggaccttgcctatcacaaaaatagcagctttatatttaatttataaaataaaaagaattaatagttttggcacaggggcaaaaatggattgaataacaaaatggaaagacatagtaaatgattattctctagataatgtattatccaggctttaactttctcttctcccttttcctagtcttttgggcattcaccacataactgcaaaaatttagacaaaatttttaaaaaatgattgaagttcaaactggtttcatttatctgcttgctggaatctttcttagaaagtgaagtgagagatatctcaaagcagttgacttaattgaagaattatctatagatctgtaatatagatctgtaattttgctattcacagtcctacttaccataagtgtagttttaaaaaaacacctgtggcggattcatgttgatgtaggcaaaaccaatacaat

SEQ ID NO: 62377 - DNA, 2650 bp, Bovine  19866880511925
  misc_feature (1)..(1): n is a, c, g, or t
ngttgggaagatccctggagaaggaaatggcaacccactccagtatgcttgcctggagaatcccatggatggaggagcctggtgggctagagtcaacggggtcgcaaaagagcagacacgactgaagcaactttaatacaaacaaacaaacattaaaacttaattaacttgctaccttcatcaattttgaacacttattgggtgccaagacatcatgttatatgctttatctatgttacttatgtttattctatcattaacccttggaagaagaagagaatgacaagatgttttggtaaacatcttttatttaaaagggataaaattttttctttgtttgcttttaagtcagtgcttctcaaactttaacataatagaaatcccttgatcttgctaaaatgcaggatctgatttggtaattccagagtagggaattacctgagtcactctgctcttgggtgatgaaactgctgattcactttgtatcacaactttatctatactaatagcagatcacgttcaaatacatcttatccttttcagtgcatttttcattagtcctaaaaacatttggtcctatacatttggtattaatatgttattagaactgtatttgcaggaaaacattatcaaaaaactaaaattttgtagaacattgtaggttactgggaataaaccaacaacaaaaacttctgtcatgatgcgtaactttttccattctgttaagcaatttatttaattttaattcacactaattctactaattgattgcttttcttttgctttgattttgtatatttgttacttcttatccattcacattattaaagtaattataattattactttaattctcaattagtctgccttttttgtcgtttcaagactatctcattagaattcattagaatatttattaaaggaaagctataataaaagtgaattaatttcttcttctgttatgattatgatgcttaaaaagaaaagaaatgcctcacagaattttattttgtaaaaataggcttttgacagagtttgtagtcatatatatgaaagatatataaatttgtacatttctgggatataatttggaaatttgtttttccaatatatgtctcatatatgcactttctttagttatttcacttatagtaaaatagttcatcaaataaaataattatatatatacatacaggaaagctatatgatgttataaaatagtttgtaatgtaaatttagaaataaccaggggattggcaagtcagctttagtaaagccatgcattggagtacagataagaaattatgttgtataataatatttttaaaaaacatgcttgtattttaagcaaacaaaaaaggttacaaaatattaatttaaaaagtcttattttgaatgtatacatgcacatttacctagacatgtatatttataaaacaaatagaaagaaatgcactaaaataggagtaatcttgcctttcgtgagtaatttttattttcttatatagtttctaaatattctctgacaaaatttctctgtacttttaaagaaaggaggaagaaaggaaagcctaatttaagtatagcccgtagtccttgatagctgtttaatcagaattccctaaaggtgagggagtggaacagagatcagaaggctaataacactgagatctgattcttccctgacacctgggtgatgtttttcctctaagcagaggtaaagtataaaagacaagaataggcatggcttatttctgagccagattatgggaagccaactgggtagctgccaaccaagccaccttataaaaagtactaaaacatcacttcagtaaatctcagatttgttgccagttaactcagatgtctctacccaagaacaactagtgaaatataaaatgattgacttctttctttacaatagaaagtaacaaacaacaaaatatgccttagcctgtgtcttttaagccttttaaataaatgttgaacatatgcacaaagaaaacctttgaatgtaaactaaattcttagtctgtttagggcccatgtattttggaaggttcagctttatttcaatactcttgttatttcttatttcaatagtcttgttttcaaatctggtaacttggctacacagactagaagatgcttaaacacaattgtttcaactagtatactggttctgacttaataagaaaagtttaaatagatctagatgttttaaaataagaattacatactagccacctcagagtaaaattgaacagcctgaaaatggaaagaaagaagagtattcaggggcccctcaaaaatgatacaaaacagactttaaatttgtagctaagaatgatttcatacatacctttaattttatttatctggccttcttttaagattttaattttaaaaagaacacctacatctgcaattgctatatgcatatattctttaagtcttagagaacattcaaaacagaagccttgtcttttttgtctttggaatcacatagcttaacatagtacattatgcagaatcaatacagaatgcatattaaccatatgtatgaataagtggatagatggatggaaagatggataaatacatgaacctatttttaaagacttgggattttagctcttacctactcagt

SEQ ID NO: 62378 - DNA, 1849 bp, Bovine  19866880534798
  misc_feature (1)..(1): n is a, c, g, or t
nttcctgtgtatacagtgagtaaatggcatatcaaacattccagcctatcccatgcttatccttgcacaactttgattaaatgtacttttaatataatccagactggacttctctgttggctcagtgataaagaaccacctgtcaatgcagaagatggggtttcatccctggatcaggaagatcccttggaaaaggaaatggtaaccaactctagtattcttgcctgggaaatcccaaggacagaggagtctggcaggctacagtacattgggttgcaaaagagctggacacagcttggtggctaaacaacaacttttaataaaatccagaatacattttactatattcattttcttttttgataaattttgcctattgtttcatcctatcatttttaaccttaattcactttttgtgtcggccttttctctgtttctcttaataatcaaataatgagcatattacctttcctcatccaaagcattcatggacttgatacgcagaatggtcaaggatggaatacaattgtatatgctatgagcctttttttccaagtgatattgattcatgtggctatacctttagatcaagacatttacttattttaatataatctagaattaattagtatccagttatatttttccatcttatccaggattttataatagtctatttctaatacttgtctatgctcgtttataccaactgtttctattctaatggtttacaagaagccctatcaaatatttgagtaaaattatgtacactcgaatatttcccaagtagtttcaataggataatttttcaaggtaattgatacttcaatgattttgaattatgtaaaatagttttctacaattagagatttttcatcgattccttaaatatagatataagtatatagttaaagattagtgtgcctgtgtatgtatacatgtgtagatgtgtttatttataaaatttttagatgtatacacttaagccaactttataaaattttaatttcacaaaaagaaatttgactgtttatagtattaattatagttataatcctagaaaatttcagagttcaagtagtgaaagcagcttaagtggtgaagaaaagtatttctgtcactcttttgccttctagaatcatccaagttctaattttatatcatagtgaatacacaaaccttttgactttgagagaatcttgggtagcaaggtggtgtgttgaatttctaaatcaaagcatagcctgttttaattttctgcattcacctctcagtttctttccaaatggactgttagaaaatagaattaaaaattatgcatattgcagaaatactgagtccctggctttctgtaggggtatttggaaaactcattgtcagttaggtattaaactttgcctgagtattttattaaatgctgggccatgacaagtactcagtgagaaatgcttgaacaaatggtgccaggttgatgtccactggcaatggcatgaattgtccaacttccttatctctgtttttgcagcttcattcgcttatcaaagagagagagaagcccaaccattttacaaacagaagatggtcagagggtaaaacaaaattagcatgtacatcagtaattgctcaataatctccccctgcaaaatcattgcaaatgactctttttctttgtaggaataattgtgcacctgcttttcacaacacaaaagctggttttgcctttgtgcataaaatgtgatttggagagtttggagatcatgcaaccacatatttacataatcaaatgacaaactgcaatttattttaagctcatggattctttgttattccttacccaacaatcatgtaa

SEQ ID NO: 62379 - DNA, 1555 bp, Bovine  19866880990535
  misc_feature (1)..(1): n is a, c, g, or t
ntgtcaaaccacctcttatttcagatacacttgttggaggcttcacctctgtcatttaccaaaagagctgtacaagaagctcaaggctgcaacaactctcctattcagggctagagagaatcactctaaatcctatttaggggataaagaataactgcactgtgccttcagtggaaccaaaactcatagtaaccaccccaaagctctctcaatgatgggataacaaaatccttggtattatttttcatcaatcaactaaattgtaatctttcatatttcctttgctatcataaatgaatttctgtgcacctcagcacttaaagaattattaacagacaacagtgtcatgatggcatctacgccattctgcaagttaggattaattttcaactctctttcaatgaaccttcccagatgccacccagtggcccctacataaaggggtcaacaacatttatcttactctgacttgccaggtgatcattttcttttccatcctagcttataatcttctcattagggagcttggtctgaatttgaagctgctattaccagaaaagcgaagtggctaattgtttttttttatcaaaatgccagagggacgcaataaggttaacaaaatcagagcattttatcatttctcaatcatgggaaggatcaataaacaactgtgggtgaccactcttccgaaagcactttgcctgaaaaaaacaataaccattgggaaccaattgaaaggcatatattttcttctgtctttggagataatgagaacacttgattgaatcttctgttgccacagtctagacattctggtcatataacccattttgagaaaggttttagtgggagagtaagtgtttacagttctagctatgcctttgtaaaccatcacatctatcttgtcagaatctaaagcaacccaatatccatgctgtggaaacgtaggaggccctgaacacttctgtttcaccttgactcccatggtcttcattccaactactataatctgtcacctgtatatagctctgcccctcagcaagtctcttatcatttattctgcagttaaatgaagaatgcatagaggaccaatctgaagctgccacttttcaactctgaacccttcattggctccccattgccctcaacagaaagtccaaactctatggaagcccttcatgaacttgcacctgcttacccagcctcatctctcaaactctccctatacctcagtgagtgaattcactgaggtataggaattcactagcttggaattcattagctaccctgggctgtcacttgcctcctccagaacctttgtgcatttacttcccaggatgaaatactccttctacatgctcccaccccagccctctagttccttgcttaagtctattaaattttccattcttaacctatccctagaaaactttccctgtcacccaaccctcagatggctcgatggctcccttctttctctcatgacatcctctttttacgttattacaatatcttggtctccaaaccataaaatccaacaggacaagaatcaagt

SEQ ID NO: 62380 - DNA, 1241 bp, Bovine  19866881100737
  misc_feature (1)..(1): n is a, c, g, or t
naaaaattgtataaaaatgtgaaaagtgaatttattgggagaaagacaaaagatctattctatgtagcaatcccctatataaacctaaaaatttctccacagtctcagggagataagatgttcagaaataggagaaagttatgctcatagtacaagtgtctggtatctggttgtcttctcagtcccagagcctttctgattctcagtctgtgctctcactatgaggccttgactaatctttgcaactcaggctctctttatgtcctttggctgtagtcaccacttctttacattacgtgtctcaattcaaaaccatccacacacaggatctggatgaccacattagtcaccattactctttttgccagagcttttccaccagaccactatatatagaactggccaacctatggcttggatagactgcctgtggttcaaaagcaaacccagaccagtcagctgtggctgtgtatgtcctccaattccagtccagctactgattgagacatatctcttatctcatatctcgagaagctctgaaagtggcaagcacactgaggctggggttgccaagagtaatctgtatcctatattaaagtatttgggtttatgtctcatcttcctactgtatattatgtgcaaatgggaagagtgaaagggctgacttgttatatcctcttgacttctaacaagttattttgaaggtatcataacatattatataggtttaaaatgaattatatttaaattataaatcctatagcatgtgaacaaataaaacacttttttatggtttaagttgtcattttttgtggaagttaagctgatttgcaatattatgatgtgttagtttcagttcagttcagtcacttagctgtgtccgactctttgcaatcccatggactacagtacaacaggcctccctgtccatcaccaactcccggaccctactcaaattcacgtccattgagttggtgatgccattcaaccatctcatcctctgtcgtcaccttctcctcccaccttcaatctttcccagcatcagggtcttttccaaggagtcagttcttcacattaggtggcccaagtattagagtttcagcctcagcatcactccttccaatgaatattcaggaccgatttcctttacaattgaatggttggatcccctagcaatccaagggactctcaagagtcttctcctacaccacagttcaaaagcatcaattcatcagcgctca

SEQ ID NO: 62381 - DNA, 705 bp, Bovine  19866881174601
  misc_feature (1)..(1): n is a, c, g, or t
ncaaagaaagtgtgatagagtcctaattttctgcactagctcatcggtcattagataattgaactctctcttttgattcattgcaaatgagaaaaagtatcttcactttacaaagggaaatccatagcaaggggaaactcctcaataacaaggggtgtgagataaagtataagacagcttctcaagatgtacacgcaaactaaacatctcaccttctatgactatccctcaactgcttacccagtaaggaatggaaatcaattgtgtaatgtccaaaaagaaaagaacaaagagggactatgacatgtgtattttagccaaaatgtctagcccccgtctcttactccctttgctatcattaatctacacttgaagactaaaacttatttctaccttgtgttcccttgcttggctaaaagaaaaaaaaataagacctgtttaatagatagtttatcaatttttggatttcaatgacaatttttaaaaatcggtgccattcatgggaatatttgactcaagttaatgactggttctttctgggagatggaacttgtaactttcatttttgacttgctgttgttttgtgttgatattgtctcacaatgtgtacaagtttgtaagaataaagaaaaattcaaaagcaaaataaattcctgtcattaaggctatgtgtaactgaattttgtatagtctgtaagtggcatt

SEQ ID NO: 62382 - DNA, 1231 bp, Bovine  19866881451998
  misc_feature (1)..(1): n is a, c, g, or t
ntaaaaaattttctgacctctgcctttgtgtgattcacagttgatatgcattgctagtcacattcgtctgtctgacagagcctttcaagttagaaaagcagcataatgaagacagcccaaatgaaaatgaagacttctgaatgattccaggactgcatgttaaaccgtattagtgacctggagcctagtggtaaagaaccagcttgccaaagaaggagatgtaagatgtgggttcactccctgggtcaggaagaccccctggagtaggaaatggtgacccacttgcattcttgcccagagaatcccatggacagaggagcctggtgggctacagtccatagggtcacaaagagtttaacatgactgaagtgacttagcacccacagatgcaaagtggcgtggagcacagcatctcctttgagacagagccactaaagttggctgcaattgtttgagttgttggcataatcagaagcctggaactgtccttccagtcctttttatcaagcacttaaatgccctttctagatgcagactgtgctgttgcataatcactaagggaaacataaaaggctgcagagggcagcccattcatattcacaaatgaaaatttcttctactctgtgaatacatagatctttccctgtgacctcagcagagtcctgaacataatacctttatcatgtcatttactacatcatgttgtctttcaggacatcaaagcacaacaagagggtcagcttctgggatgtcagagtaaacagtcgccattactgtagcttgagggctgaagtccaccactctcatcccctcaacctctcatcccctaaacatttcagcctgctctggtgcctacaatttcagcttgaatagtcatttatttcagtgtaagtactttcgcttcttgggaagtgaatataccagtattgtgaatgtgtaagttgtcaacatcttaggatttctcacctgagagctttgttcagaccattctctgggcacatagttttatgaatacttcagaagatattcatgaaaatttcatgaataattcagaactcagctcaaaaagaaacttctccatgaagtcatccttaattttttgaggaaaaaaaccaaattgtctagcctctcaacaatcacagctcctaaactgtgccttttggatcaaaagcatgttatgtgtacactataattatgtatataattatatcatttgtataatttttcagcc

SEQ ID NO: 62383 - DNA, 1495 bp, Bovine  19866880346389
  misc_feature (1)..(1): n is a, c, g, or t
natgggattctgggaaggcaggcaaggcaaaggaggcagtaagagctaagtctgactgcagagtgcagggaaaagcaaccaaccaaggtgatttgcgcctcattctgactcacctggcacaaaagccattaccgatttgttaccttgttaacaggaaccataagaaacttggaatagtggcccacttaccctttggattacttttctataactgagggtactgtaagtaaatggattaaagaaccatttgatcttcaaaaagaggtttatggtgctttgatgattaagtacccaggggacgcagtggattatcatggataatggattaggaaaagtgggatattaaaactgaactctcctccctggctgtgcgtggatggtgctgagaggttgaatggggactaggctaaccctgtcacttgctcgaatgaacagtctaggtaaggggagggaacatacttttctcacttctgggagaacaattgagaatcttgttaatgcaactttgaagggtaaccccattatctcaagataaattcttgggaaattcacaagtacattcacaagtatgagttcagagctgaaaaagcactctgagaaaaaaggccttagtttaccaggggctcacctctgcccagcaagtctctctcacaaaacatcagcccctggagaagagctcccacagggaagactcctagggcgggctcccccgtctccgctcgtctttttcctagtgctggctttccctacacacttgggttctggagtgcgcaggctcagtagtcgccgctctcaggctcaggggccccttgacacgtgggctctaatccaccgaccaggggttgaacctgtgtcctttgtgttgcaaagcagattctcaaccactgggccaccagaaaagtccctccactctagtctttcatctgttctgagaccacacttactctgctttccctgttgggagaaatagttggcgatgatgaagtgtcatgaaataaggagatttgggggtgaggagaataaatataaacacagtagcttagtaaatacatacgagcatggatgattaacacattctgtgccctgtaagtaccctatgaaagccaactaataaaccaaaggtattgttgatgccaacatgtatcaccactcaatctaatgcagaagtggaatctcagtaggctaccagagccagtatagtaacaaacaaggaaatcaggccaagcataagtgcatgcacattcactggccttggtggagactgtggttaactagaaagcttgcctctcgtaagggatggacccaatatgcctgctatgtcacttcagtagcctctgactcttcgtgaccccatggactacaggctcttctgtccccacaggctcttctgtccatgggatgctccaggcaagaatactggagagggttgccatgccctcctccaggggatcttcctgacccagggatcgaaccctcatctttaacgcctcctgca

SEQ ID NO: 62384 - DNA, 1376 bp, Bovine  19866880352147
  misc_feature (1)..(1): n is a, c, g, or t
ntattgcctggaaaatctcatagacagaggagcctggtgggctacagtctgtggggtcacaagagttggacagatgtagcagctaagccctgagagcacactcctgttttcttacgtcttttttttagtgtgctggctgtggcccgccacagtagcgtttcgtgtgtgcagagcatttagtgcactgcctgccatatagcaatcttttgataaattttaggttttattggacttaattcatctcttttgctttatttattttattatatgtattttgtgagaaaagtaatagaacatttttcagttacgatttaaaaaaatattttttaattattctaagaatttatttgtccatatgtcttatctctattgcttcccttgtaagtctgttttgttttataagaataacctgagctttgttagggctaatattaaaccagtgtttattatttacagggaatcattcctgtggatatgcttaatacctctgatctcttcaaagcagagagcatgtttacaaatgcagtacagattcttgagcagttcaaggtaaaacaagagcacacacaaatatggacatgattccaattttaaaactgaatacatcttgtgaaaatatttgattttgcattttaagaaatgattttcattatttattatctttaaattgtttgtatttgactagtgtcctgaagtttcacatttctgagatgcacttttcatgaatcagtttgagggtgtagaattagctctgaggagcatcccgaattggtagatatcacatatgcttataaagactacaaaccaagtctctgtcaatggaatctgccttgtagaagtagttttagagattgcagcatttcatgtcgttctgcatatattattatttgcattaacaacttaaagaaatgaccattttactgaaacttgctgttattcataatactgttaatgcagcatggcttattttgtttcctaagagttaaaaagtatagcttaattatatgacattttgcaggcttgatatacttcatcctcagcatgttgtaatggtactatatagcattaacattttctttaaatatttatgaagtaggatactaacacaaaattccatttatttctattgctgaagaaccattttaatggatatttgtatttcgaaatgaaattagttcatttttttctcttatctaatataaaatattttcacgcttggttcccaggtaaaaatgactcagaaaaaagaagctactttatcgtttttgtttacaccatttaagtaagtctcttatgttttttattaacttgtaggaaagaattttccattgagtttgaatgcttgacacaatagattaggttcttagaaaatttgt

SEQ ID NO: 62385 - DNA, 2634 bp, Bovine  19866880381118
  misc_feature (1)..(1): n is a, c, g, or t
ncttttcacgtggagacatggtggaacttgtctactgaactggaggcaagcacacggatctgctttttgggaatcaggatactgttgccgccagtgaggacgttgttcctttctccctctgatggtaacttacttacttggacagcaaaccccaaaccttgaccttgttagcttcgtattctaaggagctgggaaaacagaaccagggagttgctttaaaagggacgtctcttacctaggaaattccagcaacttttaatctacatgtagatcattttcaaaatggcactttgttcagaattgttatccttttgcacaaggctattcagtttgaatcactagaatcacaataaggaaaagaaagaggagaaaattgtttctaaaaattttaagcagaaaattctggaagctttattttttgccagctactactatctaaataatggcatttccttcaactaaaatatttgtaaagcttctcagtttcttctatttctttgcagagcagatggtctgaatggcctgagtctgtcccaagatggtttgatttattcttccagagttgctgaaaccttagaaggataacagctcaggacaatgccgtcagggactccctctgctatactgggtctctgctgtcacactgacaaggagagacccccaggaggccccctagataaaggctgcaacaccttccagctgttggacattcttatcatcacagggttgtcatcattaagggcaaggggaaggagttggaagcgaatgtgtcagccatccagtggaatctctctgtggatgaagaatgtgggaccattactgcacacagtctctgtgcctgatgcacagtgaggccaaagtacagaaatgtgtgagtttggagcaaagaaaggtttgtttccgggccaggcaaggagacatgcttaaaaaaaaaaacaaaacccaactccttgaaagctttcagcaaagcccttgcactgggaaggtgagggagtggtgtggttagttgtcacaaacttcttggtgtgggattctttgttcttgcaggtgtccacgtaggtcaggccatggtcatgttcgtataaacctccatcaaaacaagtgttattctctgttctgacaagaaagggaaagggaggcattaaattgtgtctccaagcctctgtgctgcttttaacacttagaccccatagtaagaaaagcggcttcatcacccctccttttgcttgttcaaggtcccgagcttgacgttcgccctctgagatctggcccggccgagaggagggtccctatgcgggcagtcacgctcccgggagctctcctgcaggcccctgggccctctcacattccgggacccgtcgcggcagcagacctcggccggcactgcccctgagccaggcccccgcaccctaccggccgtcttcactgttagacaaaggtgcctggggcccaggcggcccgcaggctcctctggccaccccgacagggcaggtcctggggactgtgacctaaggtgaccgccacggcggcacccctgtgatgccagtcatgccagagcgccattgggagcagcctcgagctaacggtcacgggctcacggtcacgcactaacagccacctgctaacagacgccggctaagtcacgtgctaacggacacacactaactgccgagtgctaacagtcacactcagacggtctcgcgctgacggttaagggctgaccgccaggcaccggctatgtgtccgccccaccccgtcacagtgccagcaacagcctggctgcaggagggcacagattaagtgatgaaactggaatgtaatacttgctgcagggaaaaaatacctgctgctttctctattgcctggaaaatcccatggatgggaggagccttggtgggctgcaatccatggggtcgctgggagtcggacacgactgagcgacttcactttcacttttcactttcctgcattggagaaggcaatggcaacccactccagtgttcttgcctggagaatcccagggacgggggggagccttggtgggcttgccgtctatggggtcgcacagagttggacacgactgaagcgacttagcagcagcagcagctttctccatttaaatggaaagcagtatttagcatcttactgtttttttgaagctagtgccacagggctctgctcatttgcaatggttacggttccacgtgggtctgtgagggtgagagtgtctcctccgtcctacatctctggccacttccaatgtatctgtccagtctccccagcaagttcatggaggattgcccgtcttttgacaggaccagagccatgaaggctgttgggattttctgtaggaagaaagcattttgagtacattttgaagtattaagggacatcaaacgatataactgttaacacaagacattttaaaagtagattattctccagcgggagacctgggttctttccctgggttgggaagatccctggggaaaggcatgacaacccgctccagtattcttgcctggagaaccccatggccctgaatgaacaacctaagcacacacatattctccagcttgtaaggtctggcttttcaagagggctgctgttatctttgcttttgtgtccctattg

SEQ ID NO: 62386 - DNA, 2238 bp, Bovine  19866880399588
  misc_feature (1)..(1): n is a, c, g, or t
nctggaatcaagattgccaggagaaatatcaataacttcagatatgcagatatcaccacccttatggcagaaaggaaagaactaaagagcctcttgatgaaggtgaaagaggagagtgaaaaagttggcttaaaactcaccattcagaaaacgaagatcatggcatctggtcccatcacttcatggcgaatagatggagaaacagtggaaacagtgtcagactttattttttggggctccaaaatcactgcagatggtgactgcagccatgacattaaaagacgcttgctccttggaagaaaagttatgaccaacctagatagtgtattgaaaagcagagatattactttgccagcaaaggtccatctagttaaggctatggtttttccagtggtcatgtatggatgtgagagttggactgtgaagaaagctgagtgctgaagaattgatgcttttgaactgtggtgttgaagaagactcttgagagtcccttggacttcaaggagatccaacatggtccatcctaaaggaaatcagtcctgggtgttcattggaaggactgatgctgaagctgaaactcgaatactttggccacctgatgtgaagaactgactcatttgaaaagaccctgatttggggaaagattgaaggcaggaggagaaggggacgacagaggatgagctggttggatggcatcactgacgtgatggacatgagtttgagtaaactccgggagttggtgatgaacagggaggcctggcgtgctgcgtgtggttcatggggtcccaaagagtcagagatgactgagtgactgaactgaactgaaatgtgaaataaaattaaagccccaaatttttatctacaatttccaaattctgaaagttctgaacacccataattttatcataagcttgcagaaaactgattggaaaaaaatcagctctgaacacacataaagttattctttgtctttattttttatacttatgtgcatttatatttgatacatattcaatgctagaatacttaaatatgagttcagtttcatatagcttgatggtgttaatatctggtatatgcactctattaccttcctgagacctgaaaattttgaattctgaaacatatcacactccaaggatttccagtaagacattctgaacctgtagtatataaatcacttggtaacttttagtccctttccttctcccaacacctgtttttgaattttatttaataaaggattgtgagtatttaggatcagcctcccatttttatataatcaggtaaagaatatgattctctcgctatagactgaatgggaaccagaaactcatgggttttccttgcacaggccaagcctggatggggctctctgacttccttctcggtaagataacttcaggggcaaagagttccagtgagaagcttagcaaacttagattagtatttgtgtgtgtgtgtgtgtgtgtgtgtttaaaattttgcctgcgctgggtcacggtggagctcgggctctttagttggggtgcgtgggcttagctgccctgaagcatgtgggatcttagtttccagaccagaaattaaatctgagtccccatcatgggcttccctggtggctcagatggtaaagaatctgcctataatgcctgccggggagacctgggttgggaagatcccctggaggagggaacagcaacccactgcagtgttcttgcctggagaatcccatggacagaggagcctggggggctatggcccatggggtcacgaagttggacatgactgagaagctaagcacggcccctgcactggaaggcggattcttaactgctggaccacctgagtccctagattagtgttttgagattttaggtataactatgaagcagatacattttaaagaaaatcgtggctagagtgatttaacagaattctggcactttgctgaccccttttgtgttagagtatcatagaattggggttggaaagaccaccaccgtcctgccttatcctcagcagatacatttcaagacctcccacccaaggatgcctggaaccatggatagtgccaaaccctgtgtacaccatgtttttcctgtacatacgtgcgtacctacctatgataaagtttaatttataaattaggcacagtaagaagttaagcacaataacaaataataaaatagagcagttataagtatatattggagaaggcaatggcaccccactccagta

SEQ ID NO: 62387 - DNA, 1820 bp, Bovine  19866880418700
  misc_feature (1)..(1): n is a, c, g, or t
ntaactgtgtttatctcttgaattatcagccttacaaaataaaaatttgctcctatgttgaggtttatttcatttaaaacttccacttatgaatactttggggggaaaagaatattctgcgatgcgtttttactttggctctttccaccttcgtgtctctctaggagttgatccccctcatcttgtgcacagcctgcctgcaccctgagcccaaggagagggaccagcttctccacatactcttcaatctgatcaagaggcccgacgatgagcagaggtgactatggctgcttctctgggaaataaatataatgtggacttgctctttattgctttgacatcatgattgcctttctaatctaaatgccgtctctcctttctaaggtctcttaataaagcaaacactgcccctgttcacagtgccctacagcgctctccttgtcattccagctgctcacgtcgcactgccacacttttgtgttaggtatcttttgggctgctaattatgccattaagtctttgcttttatctttcacatttgatttccaagaactcctaaatatttcccttttccccccacagatgagctagatacagcatggcctcttaatagttatggtttaccagaaataaaatatttaacataggaatgtctgcatcaccgatcagtttctgtatggctagagggatacagtgttttggttagtcctgattcaaacgcccacaatcaaggatgcctgagtggagaaatgagttgtacttgggagtggtgaggggcatgagagtgttgggggcagggggacaagacacatacccaggagacttctggaagaaaggggaatgggttttttgctcaggcagccgtgatagatgtctccccagaaagcagacttttaaatactaggagaagctgtgcaagtgtgaacgtgaacagaatatcctagtggagggtaagcagaccaagcaccagttggacaagactgagctgttgggatgtttccacactgtaattttctgtcttaataagcagataatttttgcttatactttcgcaaaacaatagagttatacattaagattaggtaacttgatataattttagttcttgttttattgactattacagtttttacctcttctgagaatgttggaaaatcataaagtgaaccatacgacaaatcaagcccaaaatttaaaacacaaggaatctctccaccatgagaataaaaagtcatgtagacttttaaactctgtgaacatgtatctctttcctacccttattaaaatatacctgagcaagcagacatgttttttttcaggatccagtcaagattaatctacatgctagctgaacagaagtaagggaaattcaatcaggttccattcattgcaaaccgaaaattttcttaggacaatttgatggttctgtctgtgggatcgcacagtcggacacaactgaagcgacttagcagcagcagcatataggaaaattaatattttatcttctccttgaaaatattattccctatcttggaaacttaattaataaatactacttattacattgtcatttttagaatgcaaggcaaaaatctctcaatttacatagcctgtttttacagactctgctgtaaagctaacagctgccatctggtggccaaaagtacctgtcagcctgacttcaggtcaagatacgtcaggatttaaacacgcatgttcacagctgatcttccacttttcagaaataaagttatttatttaaataagctaaactgttaactacatttgatatgaataaaaaataaagcaaaatttttaaa

SEQ ID NO: 62388 - DNA, 1512 bp, Bovine  19866880454797
  misc_feature (1)..(1): n is a, c, g, or t
ntctgcacgtctctgtggcggaaacggtgtcggagaagtagcctgaggggcagggctcacacaccgtgtccttgttgagctgcactgtcagaaaaaccaacggacaagagaacacgggacagacgaggacacttagagatcggccaggaggggcccccaggctccacccccgccccagccgcccccgcggctgctggcggaggcccccccggcttcagggggcccgagaccccgaagtacgagacagaagcatgtccaggggcaggacgcggaggccaggcctgactccagcccggctctcagtccacggcctctgccgtcagagctgctgtcccaggcgcccatcctttgtttcccggccagggagctgctgcctgtctcctttcaaccaagtccattctctcctgtctcccttgccaggcgtcagtacagagaacggtagcccattaaccactctgaaaggaaatttcttgccctgacaccttctgatcagtaatcttaccagtctaagtatcagagtattgacaaagttcaaaaacaaaacccacgctacaccatgggtgtccttctcttaaaccaagggctggcagtaacggctgttttctataaagggcctatgataattatcgtaagcttttgaggctctctggtctacgcaaattacttgcagcatgaaagctgtcatagacaagtataaagacacacggctgtgttccaataaaaccctatttagaaaggcacgagttgggggtggactttggaccccgccttaggccgcagcactcaaggcaggagttaatcctggttggtaagctgtcgtcgcctctctcatattcctcataaaccatattatcaaactaggaaacgtctcagatttcctctgtctgttccttttactgcaactggcacacgatgaccctttggtaattccaataaagaaggacattggctaccatgtgctgtcataataaacaattgtcttgtgccaaaaccacaaattactcttgaaattagtagcacttctgcggtttatcttcatgaataaaatgcaaaaataaggaattacattttctctgtccaaagtcaagtgggaagtacactcttggtttttgcagttgctcagtacacagcaggtgtgcgtgcgtgccaagtcatttcagtcgtctctgactttgagaccccatggactgtggcccgccaggctcctctgtccgtgggattctctaggcaagagtagtggagtgggttgccaagccctcctccaggggatcttcgcgacccagggatcaaacctggatctcctgcgttgcaggcagattctcaccgtgtgagcccccggggaagccccaataagtagcggactcattccttactctagcaataaggtttgccttgaaacgatatcagcaaaggtacagttaactactagtcactcagatgaattcaaacagcttttaaaatgataatcacactctagaagagtaacccttaaaaacaaaatgacttctaagg

SEQ ID NO: 62389 - DNA, 1171 bp, Bovine  19866880501607
  misc_feature (1)..(1): n is a, c, g, or t
ntttatgcttcatgcattttggagctctgtttttaggtgcatacatattatcattgttttaccttcttaatgaaacgatcctttttaccattataaaatgccctttttgtcctagtaacagttcttatttttaagttcattttgtctgacaatagtaacaggtactccagctctttttagttactgttagcatttgtcttctgggacaaagtcgtgtataggaagaggaggaaactaatgtttataaagcttctaaaacttcctgaactatgcaagaaaattcccatataagcagtattctttaactgatgatgataatgctttccaagaatggatactttctggcttgcctccatgttgttgctatataataaagtccaaagttttgatagagaaggtatagagtatttgaaaactagaaaaatctcattctatgacatgaaaattagtaaaaatcattcaattgcataactacttaaataccgatgggccatgattatgtttgtagttcaacataatagaccaggtacagccttgaggaacacatgatttggaatatgactgatgtagaaaatgtgtacacactttcactcatatccctcaataaataattgatgtaggtatgaccctgacttacaattaacttatgattttcaactttatgatggcatgaaaatgatatgcatttcaaaccatactttgaatcttgcattttcatcttttccctggttagtgacatacatttgatcttctcttgaaatgctgggcagtggcacgctgcggcttccagtcagccttgcaatcacaagagtaaacaatcagtacacttataagtattctgtatccatacaaccattctgttttttactttcagcatagtattcaacaattacttgagacattcaacactttcttataaaattggctttgtgttagatgattttcccaactgcaggttaatgttagtgttctgagcatgtttaaggtaggctgggctatgacgttcaggaggtttggcgtattaagtgtatttttgacttaatcatattttcaacccatgatggatttactgggttgtaacccagaatcccagggacaggggagcctggtgggctgccgtctgtggggttgcacagagtcagacacaaccgaagtgacttagcagcaacag

SEQ ID NO: 62390 - DNA, 1732 bp, Bovine  19866880554440
  misc_feature (1)..(1): n is a, c, g, or t
naaaacacctgcaaacatttttctccacatcctgattgtttttctagtgctgttgagtcgttagaactacttgcaaaaccagtgctgagagctgatggatatttatggggctgcctggtgatttccttcaagttcagccagtgcactgattccggatgtgatcagcactgccccctcaagagcaagttacacaggaagctgtacagtgggggctggagattgctatggctgctctgaaacatcgtgagaagagtttccaaccagagggaaaaatgaaaatggagaatgccttacaaggcttttccacaggtgtaaccaccatttcacacacgccaaacctcaagaaaatggaagctcttttattccagataacctgtaaattcagaattccacatgtaatttccttatacatgcagaatgtgttacacgttgatttccatcttcttaatgaatccttgacaagactttagttgaaaaggagaacgagaaacagcccctggatgctgaaagatggctttggcaactttatatgacgtggcttttgggtctgccacacagactgagtttccttgtcgtgagcatctgagctaggcagttgagaaacaccataaagatggtcatggacatgacaatcacgtagtggctgatgctgcaggagaaaaagaaacatgttacaggcggacagaacactcaagaggaagagcataagactccgctaacatttctaaacgtacaggtgatccttgaacaactcagggattaggggtgccaagcttctgagcagttgaaaatcgatctacaactttatagttggccctgagcatcctaggttcctaagtatctgtggtttggtctctttgccctcagccaaccacagatcattagtactgcagcatttactatctaaaaaaaaatccacatataagcggacccatgcagttcaaatccatgttgttcaaaggccaactgcatatacaaaatacataaattacaaaggatatgaatgctttttaaatagaatcaaaatgttaaaaagaatgaatttgttgcagaagtagtagtgaaagtaagtaacattttgagacagctccgacaactataacctgacgtgaagctggtattagcagtgcccgtgtctctgtcaccatcagaaactgagtttaaacatctagcttctacaaaataaatgtaactttccccttataattctcatatcctctgaatcacagccacagactccccaagatgtccccagattcagtaatatggtattttggagcacggcattccatactttgacaaaaatacaggccacagagaaagaaagaaagatgttactcaaactcaaagtcagtgaagtgaaagttttagtcaaagagtctaaacaaaacaaaaaggacacatctctctgctaatctgagtcaaaccactgcgtgccagacttctggaaaaagaacactgttagaattactcaatcccagctcccatctatcagcaatagtaaatgttcagtttttctttttaagcaccatactacattgtccacggcttgatcatcaatttgcaaacatggaaagaaattgaggacatagatctgacaaacgtgcaatagagcagaggtctcccacagtgaatgccaagctgagcttcggatgacactggcaagttacttatgtactaggcctatcagagttacacgaaggatctaacttcatagtaaacttatatccgg

SEQ ID NO: 62391 - DNA, 1551 bp, Bovine  19866880565578
  misc_feature (1)..(1): n is a, c, g, or t
nttatgggctcatgtctgtagtttactttgaaatatataaaaaaattgaagaatgcatagaggaatggttaggtggatagatatgtgataaggcaggcagagtaaaacattaatagtacaagctaggtgatgagtatttactaaaattccttcaattttactgtgtgtttgaaattcttcatagtacaatgttggaaaaaatgaggattgtggtgataaagacagaaataaagaaaataatgtttctagacgtaaattgattagcaagacaagcccaggaaagacattgtcactcaaattttcctggagaaacatctttgtgtggactttaagattgcacctgaagactctgaagttgttgctacatccttatggctatgggtacacttggttgcctttttgtgacacttgcccttcaaacctaaaattaagacaagattcagctcaaaactaaatgttcccaaaccatggcctgggcgcttaacaaggaggaaatgctgtggattcttattgccgtagcagaaggtcagattcctgataggctgatcagagatgtgttttgaattgtccactttatcatcatataatatctaacttcgtagtttcacttggcaagttctgatgagtagagcatggtgctaatgagatccagggagtgtcggccaaacggcctttaacctaagtggtataattctgacttgatatcagaattacgggtccagtcatcacccagatcagttgcttcatatgaaccattatccagtggccaaaaatacagccctgaccctggagctgtcatttgcagccgtgtcctttgtgacaaaggagagctgagagcacgtctacataaaacatgcttatcaccactttaggaaaaagcagttcacttacggccataggagatattcaatagcattaacctcccaggtttatatgagctcatctgagtggtaaacattcttttttaatggagaatattttaataaaatgttgcaaaagttggcagtatttttttcctctctaaactttttattttgtattggggtatagccgattaacaaacaatgctgtgacagttttgggtgaacagagaaggagcacagccatacatgtatacgtacagtccacggaattctccaggcaagaatactggggtattcccgggtagccattcccttctccaggggattttctctacccagggactgaaaccaggccttctgcgttccaggcagattctttaccatctgagccaccaaggaaacccatatatgcatcttcttcccctagtctcccccgcatccaggctgccacacaacgttgagcagaattccctgtacagtaggggacacagaaggccctttttggttatccattttaaatacagcagtgtgtacctgtccatcccaaactccctaactagctcttctcccgatccatccccccagcaaccataaacttgttttccaatctgggagtctctttctgttttgtaagttcacttgagacagtatattgaaagacatcagaagtatttccagaggaaagact

SEQ ID NO: 62392 - DNA, 1561 bp, Bovine  19866880566432
  misc_feature (1)..(1): n is a, c, g, or t
natataaaaatagaagactcaaagttgtcttttaaaattaggggatggctagaatgaagagtggggcaggtcaactcaaatttttaaacttctactctacttatttaagctgaaaaaaaacattctacttctcaatctttgacaactgaggttcacagcaaaactgatccttaaatatagataacataataaagcaaggatacaacaacaggaaagtgcgctgtaggcttcaaagagatgggtagcgatatccagtcgtttagagtccacaatttgtaagttgttcaccaaggctaacttatgcagatgcggtataacaactgaaaagaggaaaagaaattattaattttaacctaaaatgtcctttatccatttgaaaaataatatttcattttataaaattttattttaattttggatgatttcgaaagatcacccacatcctatacttgctttttcttactagggaagaaagcatgttttttcagaataaagagtgatccagaatttgggagaaagagatcacagcgtgccatcatgacctaattgtgaggatgcacacaggtcatttagcttcactgcaactcagtttcccaatctgaaaaatgaaaaccaaataaataaatgtaaacaacctacctcttgtgttattattataaagtttatacaaatcaggtattaatgttgctattaaaagataaaaagtatacttattctctttcaatatcaaatgatttcactacttcatgaaaatattactggctttagtctctcaagttcatagcaaagaccaatgtcaaacagcacaggtggctgagttttcaagtcactcaagggctcagtatgtgatatctcaatgaacagcgtaaaatttcaaaaatacagataacacgctactaaaataaaagagatggcccaagaaacaataaccacttcagtaacgctgagcacccctactgcctaagatcatgagctctaaataccatttcccactaaaaccagggttccttggagaaatggctccagggtaagtgattatcaagctgttgatcacagggtccctttctagcccctgcttggttgggggactcagagcatggctcatcagggcgtcttctgacagtcgaggtgacttctttcatgtttacactgaatttgcatatgttaaagccacaatctccttatcaaaaaatctttctcaatagatcagcactataattacaatctttaagcttaccttagtaaatgtaaaaaaaaaaaacaaacctacaaaaacttaggacaactatggccatttttaggggactttttgacttgtcaaaattagtaacaacatacttaagaggtgttctaaaaacataagacaaaaacttcaactattcattgaattcctaatcaatttactgaaactttgattcattaactggcatgctgaggcctcaacaaaatggtggctctgagacagtctctcaaagagtctttatttcatttctgcccaaatttaccttccttgcacttgtttatctataaaagcgtggcctctctattcattctgctcatt

SEQ ID NO: 62393 - DNA, 1733 bp, Bovine  19866880623672
  misc_feature (1)..(1): n is a, c, g, or t
naaacgaactctgcgggtcgacagtaaaggggtttgaagatggagaggtgaggcaggagatgaagtttctcttgcttagtccccagggaacccctcgagttctgcaggcaccagtttgaaaaccgtagttcttttcctgagtgagcagaggttgggagtggaaagggctagggttttacttagaaggtctaaaagactgtggtgaccacaggcatagcaaaccccagtgaggttatctgggccagccaggaggcctgaggagcccctgctgtgagacatgacctctgtctttgggggacatcctgggaccatgttcatgtaaagggtttggtagattggtgcttttgtttttttccttggctacactctaagacttgcaggatcttagttccccgaccaagtatcgaacctgggtgctcggcagtgaaaatgcagagtcctaaccactgggctgccagggaactcccagattgactcatttttattgatttattgggaggaagcagttttgattggcgcatgttcccccttctaatttaaggaacatacatgtcttccaaatgcaccactacgtctgagagcgtctgtctgccctgtggcttggacgagtacctggacacctggaatgaagaagataaatgcttgctgcacaaagtctgcgacccaggtgagtcagcctgtcggggcagtgtgggtgaatgacattgttggatatggtgatgctctgactttgggggcaaggaagacgtctgcccacagacccccgagggtgtgccttagagcccaggagcactgggttacggcttttcgtatagaacttctgtcctggaatatatctgttttgttttgtttttactgaaagtgaaagtgaagttgctcagtcgtgtctgactctttgtgaccctgtggcctgtagcccaccaggctcctcggtccctgggattctccaggcaagagtactggagtggggttgccatttccttccccagtttttattgaagtacagttgctttagtgttgcgtttgtttcaggggtgtgtgtgtgttctttttcagattcttttcccttataggttattacaaagcgttgagtgcagtgtcctgtgctgagagttgatccttgctggctctctgttttacatacagcagtgtgtatatgttaatcccagactcctgatttatctcccctcctacatttcctctttgctaactaggtttgtttcctatgtctgtgggtctcattctgttttctaaataagttcatttgtatcattgttttagatgccacatataagtgataatatatgatatttgtgtgttcagtcctggaaggtatcttacacttgacagaaggtctccacggcacttccacatgttgttacttaattctcacaaaacaaccctgtgagaaagctacgcttaccccatcgtaaaaatgaagaaacttacaattatcccattgtaaaaacgaagaaactaagaggcagtgagtgatttctccaaggttacaaatgagaagcaggactcaaaaccagatcttctaactcccaggtctttttcctaaaccatccacgtcttcctacctccatagtctgatctacttaccattactgctatagggcttttgcctcagagcttttaaaaattaaagcttatttataagaataggatcaaaatatgtctcctgtcctctttgctaactaggtttgtttcctatgtctgtgggtctcatt

SEQ ID NO: 62394 - DNA, 3967 bp, Bovine  19866880630992
  misc_feature (1)..(1): n is a, c, g, or t
ntttgaatgtgttatatgctgcttggctatcaaatttatcttctgcattttaattaccaaaaatgaggttcatattcctaagaataaaatacatattaaatcatccaaaaactaacacatcacccaggttaaaaatgctatggataaaaaggtcactgactttttaaaaagattatcaggactttttaaaaatttatttttaattgaaggataattgctttacagaattttgttggtttctgccaaacttcaacattaatcagccataggcatacatatgacattatcaggccttttataatctcatttctagaaagtttatggtgtgttcaggcatataagcttgttatcatttactaataaaacccaaaatcaagtctccagatttagttatatatacgtgaaagatatgtctggatcacctgaatttttaataaatgcttgaggaatctctagcaagcaggaaccattcagcaactgaaacaggctctgccggtatggaaacagccggccctctgtgctttcctggagtgtgtatgtggattttggaatcctgtccatgaaactctactttcaaatcgctcctaaatccagagaatgtcctcagccaagtaaacgagcagggagctcgttcgcccaaggcagtgttgtgtggatatgacacgcctgttaggcccacagcaggtgagagtattctagctggagaaaggaaagccacctgcataattcaccagtgtctcccgatttcctcattttccatctgtatctacacctttaaatttgttctcctggctcctgaaaattggcccagtgtcccgctcagagtaaagaatgctctcactgcctcaggcccactcggcctgtgcagcctctcggggcagcgcacggaggctcagcgcagcatcggcaggcggcaggcggtccgccaggcgtcctgtcagttggttggttccatccctccgtctcccccgcctctgtgacactcgctgcggcatcctcgcaggctccctcccgcctcgctggtccgccagccgctgggcgagctgccatcagggctccggctctgtgggctgaatggctggcttttctcatgttggggggggctgaaagaaaagactgtcaggagccaaccaatgcttttttttttttctaagataaattcaaatcttcaaagagccagaaaaagaaaaaaaaaatgctccaattaattttaaatgaacttggtaggcatgtttattctttattaaatagtcaattgttggccatcatggctccatctatcttcaaaaagagggaaggctttgtttccctaagccatcctccagctttcatacgcctaggtttgattctcagccgtgcaaccctagacaaacgtcttaatctttccatgcttcggcttctcacttgtgaaacagggataataatacctacctcacaaggtttttgagattacatgagacaatatatgtaagatgctgagagcagggccaggctacagtaacagggtcagaggcaaagaaaagcatcatgtatttaaatttcccaacacttggaaagtttcaactgaaatgattccaacttctccagcctttagtggtcaccttacctgtccatggggattttccaggcaagactactggagtggggtgccattgccttctctgattttctttctacagtaatcataacccaacatattgatttcagtttgaaaaacaaggcactaaacaaattgcttaccgccatcaaaaaggtagtatttcccagtttcaacaactttaagatacagattgcaatttttggcaactttttttgggggctgtgcacttggcttgtgattgaactcagagcctgcagtccttaaccaaccactggactgccagggaattctgctgacaacttttttaaaattaatttttattggattatagttgatccacaatgttatattactttctgcagtacagcaaactgaatcagttatacatatactcagtctcctagattctgttctcatatgggccattgcggaatactgagcagagttccctgtgctaaacgcaggtccttatcagttacctattttaaatgtagcaatgtgcacatgtcaacctcagcctcccaatttatccctccccaccttcccccttggtaaccacagtttgttttctacatttgtgactatctctgttttgtaaataggttcgtttgcacccgctggcaacttcaaatggaattttgaacgcaatatattacaatagcttatatatatatttgtgtgttgtgtagtgttaagccgctcagtcgtgtccgactctttgtggccccatggactacagcccaccaagctcctctgtccatggaattctccaagcaagaatattggagtgggttgccattcccttctccagtgtttatatataatttacagtctataatatatgtaatggtttatatataaacatgtatatttcagatcttactactacctgaaaattactagctgtgtgactgtgaaagtgacaagtcctctcagtctttgttttcttttctcttggttggtatatttacatatacatatgtttatatttatgtataaatttacatatacacatgtttatatttatatataaatttatatatacatgtatttatattatatataaatttatatatacaggtatttatatttatatataaatgtatacatacatgtatcctagagatgctgtagaattaaaaagcagctataaaatgcctggtattcaacagatggcagcaatcataactactgcccattaccaaggactacataagattctcaagaatggttctcaatcatggctacacaccaaaatcccttagaaggcttttaaacatagatgcctaagcttccctccacacctagtgaatctcctgagatgggcaccaggtaagacaacttaggtaagaaaacacaaagggtcaggtatccaactcagattcaacaggaattatggatcttacccagtgtcaaggtgaataaggactccaaggaaataaacaacagcaaaacatgagctcagcacgctttcctcaggcttccctggtgtctcagtggtaaacaacctgcttgcaaggatagaatcgggttctatccctgggtcaggaagatgccctggaggaggaaacggcaacccactccagtattcttgcctgggaaatcccatggacagaggagcctggtgggctctagtccatggggtcgcaaaacctcggacacgactgtcactaacactttcaatttttctcttcccttagcgaggtctggaaccattaggtgtaggcacctgcaaatacccttctattttctgtacaaggtgcgtgttggtccacacggaatatgaaaggtgtgagcaatgaatgaagggcattgcctgaaagctgctttagttatgtaacatctgctttttatactccattaactacactactcacatgacattttcaagcaagctgtgccccataaattccaggctatttacaataaacaacctagacagaccccggtccatcttgctaaaacgttccctagataaggacacccatctagcaaataacataactgtgtctgtcaacaagtcactagtaggtttacaaaggacctgattcaaaactttccttctcaacaggtgataccacttacaggagccggaaccgcacaactcgacctttcccggttccgattcatcatttctgggcttatttgaatcaaagtcgttttgaacaaagacgtgcaggggttgatagtcagagtgtccctaaagtcttagaacagttgtaagctttaaaaaagctgagactgatctttagaaagcgtaaaactgccctaaggctttgacactccactttatttcactttctgaatgaggaaattgaagcagtaacaattctttgtcgttgtgttgtgtttggggatttgtttttt

SEQ ID NO: 62395 - DNA, 2221 bp, Bovine  19866880646546
  misc_feature (1)..(1): n is a, c, g, or t
naaggcaagataacgcctggatttggtgggaggtaaagatcccctgaggagggtgtgcaacccactccagtactcttgcctggagaatcccatggtcaggggagactggcgggctacagtccacggggtcgcacagtcggacacgactgagcagctaatcacgcgtgcacacgatgacacagtcagctttccaaggcgagtctgtttgtgtaaaggtgtcaccgcacttctgggctgtggtcaccagtgattctgcctttcgtcacacgcccggtatattaattatctatcgttgcatatcgaatggtcccccaggtttagcagcttaaaagtaatacttttttctggatcagaagcagcttagctggtgctttgggctcagtttcggtcacgaggttgcagtcatgatgtcggccagagctgcggttacccgagggcttgctgaggctggagaatcagacacgcagagtcggaaaagtcaacagtgacccgatccagttccctccttttataatgaggaactattgttcttcacaagctcaacctgaaacagttcttaggcaggttacctgtgttaacccatgatcacagtgagggtctctggaatgtctcctggtgacttagtgactgacacggaaggctgagtttcagggttaccttccctcttattttaaggctttgctctctgcctgtgtacctaggcccctgtggttgtgtgagtgagtgaacaagcagagactcagttttgaataaggagatgggaagactgcctagagcctttgatgccgggagaggagccaagggggactggagggaggttgtgtgtgtgtgtgtgcgcacgcttacttgctcagctgtgtccgactctttgtgacctcagggactgtagcccaccaggctcctctgtccatgggattctccaggtaagaacactggagtgggttgtcatttcctcctccagggcatcttcctgacccagggatcgaacctccgtcttctgcgtctcctgctctagtgccagctgggaagcccccgagggggaggctgggggagcttaatctctccgtttggcctggtcagggctccttcctctagtctggtggggacgcaagtcatgtcacgtgctggagggaggagtggaccaacctctcccgatcggatccaccttccttcagtcctcgttgtgaggtttccaaaccagctgtcttctctccaaagggaccacgggatgtcctgctccttactcccatggctctccctgtggacagggtcaaccgaatgggatcagaggtcatttcttaagccttgaatcagttttgagtgaagaactaaaggacaaagagttatatttcttgagaggatggagcaagagcaaagaatcagaactaaaagttcctttgaggctctttttttggaaaatatttattttagaattgccctttcccctcaggctctgttctgtaattatacacattaacacagcaccaaacgccaacatggctcatctcagacaaaaacacagctcttctcagaggcctaatctactgaataatgaagctctgtatattctaagtccatcttagagaagtttaaggaagtgttgttccagagaaagagcaataaaatggctagtgtggatgatttatacctgaaattcattaacctggtctccccttcaatatctaagcactacagatatttcttctatattttgctagcgttttcccatccatttggacatgggccagaggtaacccctctcataaagaacatcaaaaatacgacttgaaaaaatgcaggcttgcatcatttttagccatttggcaaagtggtttgaaaaatgtgagcagttgaagatttcaaactgttggcaataataggatcatctgtttccaggaacactgtcagactttcgatcttgttctgcttaaattacaccagatactataatagcagcatttctaagagtgcttcctaaagtggggtctgagatggtcgtgggtgcacgtgtgtgagagagagagactgagagacagcaagagagacagagagggctgattgcagtcctttagggaaagcgtcggagaaggcaatggcaccccactccagtactcttgcctggaaaatcccatggacggaggagcctggtgggctgcagtccatggggtcgctaagagtcggacatgactgagcaatttcactttcccttttcaccttcatg

SEQ ID NO: 62396 - DNA, 1911 bp, Bovine  19866880653995
  misc_feature (1)..(1): n is a, c, g, or t
ntgacctcactgtctgcttttttggttctttgcttgttttctaagcacctttgttggaaaaaacaattcaggattggctcggttttcgttttgtatatttgggtcaaaaactacattttttttttttttttgtatggtggcttttaactgtgcctactaccttaacccccatggttttaggatgattaactggaaaagagcacttaccttggtctaaaagtacagtctgcgtatacctaaattgtgaatatcgattgagaagggccttaaatattaataacctattttttccttcagatagttgtttttattggcttctatgtgtatgtactgtaactaactaaacacacacaacacacacatctgtactgtaagagttgatgataaaatgtggtttctaaattatttatactaaaaacatacttgttgatacttaaataaattgtgttctgctgtttggccatattttgaacacgatgcctctttggttgacttttgggggatttgcattagtttaggattgatgagaaagcaatggcaccccactccagtactcttgcctggaaaatcccatggatggaggagcctggtaggctgcagtccatggggtcgctaggagttggacacgactgagcgacttcactttcacttttcactttgatgcactggagaaggaaatggcaacccactctagtgttcttgcctggagagtcccagggacggtggagcctggtgggctgccgtctgtggggtctcacagagttggacacgactgaagcgacttagcaacagcagcagtggtaggattgatctgcttcaactcccttatcatatgaatgtttgtggaggtattaccattaacttttttttgagatctaatcgtcatgacattttactagttttagatgtccagcagaatgatttgatacatgtctgtattttgaaatgatcaccacagtaagcttagttagcacccatcaccacatagctacactttgtttgtttgtttcctttgatgagaacttctgtgatctactctctgagcagctttgaaatacacaaaacaatattgttaactatggccaccatgctgtacacttcatccccaagacttatttatcttgttggaagcttgtacctgcagttaactttttaaagtggttctggccccatttcagtggagcgtgcgaaactggtaactctccaattccatatgtgcatatagtttctacaaactaaggaaatctgcacaggaaaatctgagaaagttggatgtaaattgtcgaatttactttaaaaatagattcttcagatttctgagaagtgaatacttgatgtaattgaatacagcaatggtatttactaagattgagcaaaaggtaactgtaacaggatcaagaagagtgtcctagagctgatgtgtttgtattatagcaagctacgtgatagatctctcacattgatgtgaataaaatagagaaatatgagcttggtagaagagtaacagtggaaacatgtgtggctgataaaacagtagtaggtctgtgccagtgtgtaccacctatacttttgaaagtgaaagtgaacttggcctattttttgaagaccaccgaaaaattgatgcttttgaactgtgatgttggagaagacttgagagtcccttggactgcaaggaggtccaaccagtccatcctaaaggagatcagtcctgggtgttcattggaaggactgatggtaaagctcaaactccaatactttggccacctcatgcgaagagttgactcattggaaaagaccctgatgctgggagggactgggagcaggaggaaaaggggacgacagaggatgagatggttggatggcatcaccgactcgatggaccttgagtttgggtgaactctgggagttggt

SEQ ID NO: 62397 - DNA, 1512 bp, Bovine  19866880665306
  misc_feature (1)..(1): n is a, c, g, or t
nggcacgagctgtcattgcagtttccacggaaaggccagcaaggcatcaagcaagctgaagacgggctactttgggacttcccttggggcccaagggttaagaattcgcctgccatgcaggaggcaaaggttcagacgctggtctaggaagatcccacatgctgtggggcagctaaggctctgggcccacagctactgagcctctgctctagagccaggagctgcaaccactgagccacgagccgtggagcccaagctctgctgcaagaggagcccactcagtgagaagcctgacgctgcacctagagagaagcctctgctcactgcagctagagaaagcccttgcacagcgacgaagacccagtgtagctaaaaaaaaaaaaaaaagattggctagtttgtgtctcagtgggctccataaggctccagttgtcaggtgcctggccctggagtaataggtcagaaaaatattgccacggagtgtaagagccccagttgaggggctggggggttgactctggattggccagtgtgtatataaaggtgttgtcaagcgtgaattcttcactatttctagtaactggttacccgtgagaggacagtttcccatgcttagtaaggccccagttgtcaaaacattagaataaaacaatgtgttattacataagattttgtctattgcatccctgctgtgtcactttatgggcttccctggtagctcagttggtaaagaatccacctgcaatgcaggggatcccagtttgattcctgggtcaggaagatctgctggagaagggataggctacccattccagtattctggcctggagaattccatggactgtatagttcatggggtcgcagagtcagacacaacagagcgactttcactttcatgtcactttatatctttctctgtcccctatatttgctataaattagaaacaaaatttggaggcttgattggattcaagttttattttttaccacttccatcagaaaaaatataacatacaattatctctttttattatgccagcagccgttgaagagcaatggctgaattaaattatttaattagtaattacaaaagaagggcattctaattctatcattccttccctgtttactagagagagaatttttttttggtaaagagaaatgtttcctcatcaactctgtgataacccagagatagattgtagaggaacggtagattaaatgcttgactctttccccttattgacctgttttcagaaataatgtgttggtgtcagcatcctgtgaaagtgaccagtgagttggtttcagagactttgacatatctgatgggcttcaatccactgtgttcttactgatgctgaagttgtcccgtctggggccactgagcttctttgagttgaccccttactcattttgacggggcacagtggttgacctgtcttctgggatgagaagtatttcaagcttatattgttcatttcctgccctaggtctggtgtgcgctaagtt

SEQ ID NO: 62398 - DNA, 2578 bp, Bovine  19866880674805
  misc_feature (1)..(1): n is a, c, g, or t
nttgatgcttttgaactgtggtgctggagaagactcttgagagtcccttggactgcaaggagatccaaccagtccatcctaaaggaaatcagtcctgaatattcattggaaggactgatgctgaggctgaagcaccaatactttggccacctgataggaagaactgactcactggaaaagaccctgatgtagggaaagattgaaggcaggaggagaaggggacgacagaggatgagatggttgggtttgagtaagctccaggagttggagatggacagggaggcctggggtccacggggatgcactgagtcggacacgactgagccactgaactgacttaacccttgttctttgctctttgcctccaagaagctgtttcttttcctccacttgcagcactagaatgggccttcttagtagaggatttgtggatccctggggctcacacagcacgtaaaactcgcttttttgtgctggtctcactctgatcccacgctccatgtccaggatcccacggctctccctctgcactgcagtccctgcgtttgtaactagtgggaactctagaccttggacgccctgggctgcccctctggctgaccccctggggacctgtcccttggtgctgaaggccaggccagccctgcctgtggcctccctgctcccacgtccccaaaccccaccttcttaggcttggtctccggcgagccagagctgggtcttttggataccagcctctgtccagatggcccacatccacagaggggcatttctggtgtgaatgagtggacgcccccagcccctcccagtccaaccctcctttttcctttgggttctagttctgacatccctcatttcacctgcgctgggagagccctcaggcctctcaagctcctggtcctttggccctttcctcccgctgctcagaatgtgggcctgactccgtcctctgatgctgaagctccagtactttggccacctgatcaaagagtggactcagtagaaaagagcctgatgctgggaaagaatgaaggcagaaggaaaagggagcggcaagggatgacatggttagataccatcaccaactcaatggacatgagtttgagcaagctcggggagacagggaaggacaggggagcctggcgtgctgaagcccatggggttgcaaagagtggggcacagcgaccggaaaacaatctccccctgaaaccaaagatggcagctcttatcattggtaacagtcctcataaggcaggaattagatgaaaatatgttcctacctaagtatttcggaagcaatctcccagggaatggggtgggtggcggggagcagtgggagccgggattcagcataaggcggcggattttcagtaaacggggtgattttctcaaccacctccagtctcgtctctttgcccaagacggagcaacagacggcctttggtaaccgatttgagcggtatagattctagttatctacatttttgtctcgtttgcctttaggatcgacttgtttccctctaaaacaacagggcttttgacccctccttgttttcattaaacaaataaagcagaacgacttctcaactatttatggaataaagggtacggtcacataaattcaacgttaggtctgtcgcagcgcttgtgtttggggaataggctttgattcagggtacttagaagccttgtaaaaaccacgcatgtgctgacagggccctactacaggcttaatcagtaaactacaaaagtaacgtctgggcccgcagagtttgcatcgactaacttctgcttcctgacagacagctcctgagtatagaaggatccctagaggctgtttatagcaaatatcttttacgtttccccctttcttctcccctgcccatatacattccttggacagtcttagaaaaaaagaagttaaaattaaaattaaaaaagcagttaagacaatgcatctagcgtattggccatctgttacctcactttcttttgtgttttgtgtcatgtcgatattcgtttcagggcgtacaagctgctatttaattttaatggctgacagactcttctggaataagcatgtctacagtctatgcaaggctttgggagataataaattgtaaatcaaaattgtctttataaagctccgtggatttattggatttgtttcccaatgcaatgccatgttaggtctaatcctgaaaaactccaagctgaagaaacaaaacatttctctgagcagagtggcagagattggaggatctgtatttggaatcctgcagggaagattgacttaaatatttatttttcgtgcagttaaatcaacccaattgtaccgaaaggcattatgaatcctaaaattacttttctgctctactgaaaattcatgctgacatgtaacaaaacagaaagaagcttggctccttctttcaaatcaagaagaaaagaactcaacccagaagaacaaatgagggattttccatagattttattttataaaatatcatccatgactgtatttgagaatctggctgtaaattaagtaaagattggatcacatttcgattgttacagtcta

SEQ ID NO: 62399 - DNA, 820 bp, Bovine  19866880727474
  misc_feature (1)..(1): n is a, c, g, or t
nattaagaactgttctaaaaataacttgaaattatttatgagttacttttctatgtctacaggacatagtgtaagaaaccactgagtgacagcaataatgatcaatccccaataaaaaacttgtttcacttggtagctttcagtgcatgaaagacaaagtgcagaaaaggctttaacatatgacacatcctcagagaaactgatggttttgctcttacatgtcaattcaggaaagagtaaaaaaacacaacttacactcatctcggaaccttggttctgcattaggcccaactctaccaaatgtttttatgatctctgtatgcagagaatattggtcttgatattgagggtcttccaggaaagaagccaactgcattttcactctttccagcaacttaaaattgaatattatacagtcagattgagagaaagatagacactaaacatggtttgcataactggattcaaatgacttatatcaacatgagttgaagtttgaaattaaataagtacttctttagtctttcagctcagaaaagatcctacatatttatgtttgccaactcatttttttttttaaacacaaatattccctgacaaactgtagaaagatcccgtaatatttagggaaaaacataaatgtatgatgatttttgtgtctaagtcagaattcttaaaacagatcacaggggtaagttaccctcttattcaccttctgaaagcaatgagtcattagtgacttatatattactcatatttcccttaaaagtttttattttggggatttaagaacatgttgaaattctgccaagactgcaag

SEQ ID NO: 62400 - DNA, 1768 bp, Bovine  19866880809948
  misc_feature (1)..(1): n is a, c, g, or t
ntttgttgtgttgtgtttggggatttgtttttagggtgcaggcagtggttttggacatgataaaacaggaatgcagtcttccaagggcctataatccagaactagtccctgtttcacatagtatgcactcagttctctcatgtaatatgctataagtatgaataaatatgcttatccaataagacaatgcatttaatccccatttctacagatattccattgacagaagcagtgatcctggaagattcttctatgtggacattacaacaggtgccctaatgactgcaagacctcttgaccgcgaagagttttcttggcataatatcactgtccttgctatggaaatgagtaagtaaaacaatacactggtctccatatagtgacaaaacataagcattgtagaaggcggaagtttccagagcctgctggaacaaaaattgtattctttatggaaaaaaatgcaaatcctggtttatgcaattgaatgaatgtatttagttcaaatacttattgaggatctctatatacctagtcctgtgctagggataaaaacaaaagtatcatgcaaaagcagcacaaaaaacagcatccttaaactgaagagctacttctgtatgaagaaaagggacaattcttgagacatctaagaggctttcaatctttaataagattaggaatgcaaatagtatattattactatatgaaaggagacatttataacatatcacgcttatcatgcacacacacatacatacacatgcaataagaatttgaaacatcttacaacagattaacactaaacctgaaataaagttgaagattaataaactaaattaacattataatctcaatacaaattatatactactacattccatttttttctttcacaacacccatggatttgggtggactccgggagttggtgatggacagggaggcctggcgtgctgcggttcatggggtcgcaaagagtcggacacgactaagcaactaaactgaagttatgagaaatattaagggaaatggtaaatccaaacatattggcagaagtatgtacagtcattcatgagggaaatttggtaagaaatcttttgtattcagattctccaatacattcatcctctttttctcaagaattctactcctaataattatcttatggaaatagtcataatattaacaaagatttatgtaccaaaatgtccactgcattgttattttaagaggggaaatacctaaatgtctaataacaggagtttgactaaataatggtacagtcatacagtaaaatgagaatatcctgtttacattaataccaattaatgtaccaattaattaatttcaaagtacatttcaatgactttcagggaaaatctttccctaaaatattaaagttctaaatcaaatttttttatttttcttaatttcagtgtgcgtgtgtgagagagagagagaatttggacacatgtaacattatacataatatataatggatatctctggtggtaggactatggatcacatttattcttatttttctgaaatttttatcactgcctatataaacaagtaccagcacaagttacaatggaaaaatttaaacatgtcagcactcttgctaaacaagcaatataaatatttaggggaaaaacaatgtataaatattcttgagggaaaaaaaaatgaaccaaaagaacagggcatttcaataaaattatttactaagcatacttttctatgtcttaataatttctattttgtcttc

SEQ ID NO: 62401 - DNA, 2721 bp, Bovine  19866880832620
  misc_feature (1)..(1): n is a, c, g, or t
nactcttgcctggaaaatccatggacagaggagcctggtgggctgcagtccatgggggcgctaggagttggacatgactgagcgacttcactttcacttttcactttcacgcattggagaaggaaatggcaacccactccagtgttcttgcctggagaattccagggacaggggagcctggtgggctgccgtctatggggtcgcacagagtcgaacatgactgaagcgacttagcagcagcagcacggggctcactgccctgatcctgtgagcctgtctcgtggtggatgcttggggaacgtcggtcccgttacccaggtccacagagagtgtcagacggccttggaaccaagtccagatacagccttcccggcaccctggctccggaaacacgtttgacgctctcgttgacctcagaggaactgtccctggccgcagccccccagaagctctttgcctggcctggggaaggtcagggaggcccttactggctgcgtcctgcacgccctgcttactcttttcttaatttttactttttggccatgtctcatggcgtgtgagatctgtttcctgaccggggatcgaacccgggccccctgctttggacgcagagtttgcaccaccggaccaccagggaagtccctcttttccggttttaaatttagttttggctgtgctgggtcttcgttgcggcacgggttttctctactcgcagcccgcggaggctgccccatttgcggttcgcgggcttctcttgcagagcttaggctccgcgtgcggcttcgggagtcgcagttcccggctctaaagcgcaggctcagtcgctctggttcacgggctcagctgctccgcggcatgtggatcttcccacaccggggatcgaaccctgtgtccccggcgttgggaggaggttcttcacccgctgagccgccgggagccccggctgatgtctgccctgtgagccggtgctcacgcacagcgcgcagggagggcccgctgccccccttgcagcccaccgtggagagccaaagccccttgagagcaaggtggtgactgcggaccccagcccagcaaggccctgcgcctcggtgtgtgcacgcaccgtctgcgctgctgaccccgggcctccgtgtctcccttgggtctgtaactcgactgcctgcttgtcaacaggggtgtgtgttgtttttctctaacagagacagctgataagggaaagagctttactgtggcaaactgataagaatctgagtgaatgcagggtacttggcttttgttttgctttgcttagatgagcaaatgtggaaattattattggtgttagaatcatgcagaaaggagaccgaagttcaaaaagctgaagcggctcatggacatcccccgagccggcgggcccgcggtgctccgggctccaggtcacaggctccctataaccccttgctgtcccactttttaaaattctctgcatgttaaaatttttttaaaggcaagcagtattaagcatctttctaaaatcataaatagcttgtcagatcacatttcccttggtataacacacaggcttcccagatggctcagaggtaaagaatgtgcctgtaaaagtcagcagacaaagagaggcaggtttgatccctgggtcaggaagatcccctggaggagggcatggtaacccactctagtgttcttgcctggagaatcccatggacagggaagcctggtggaatgcagtccataggttgcaaagagtctagtacacgtatgaagggaccccactctgtacttccccagtttttatgaccagagtggactgaccacacggtggatgacacagaagtggggccacttctgtacgtggttggtcaaaagcagttttcaaccttctgggtaccatttttaaatttcctttcaatccatcctgttagcatgagcgtaaccgaaatatttttaaatacttaaatggatcttgatgccagtatccttggttttgtacattcttaggggaaagaaatgagctagaataggatagtcatatctttggccggggggcggtatcatgccgagcggcggcaggacggtttctggtggcttcctctgggaagaacttgtgtttaatctctgcctgatgcacattttctttctaggtgactttgcagatcacccctccatgtaccagcgagaggtattacgagcatcttggacaatgctgtaagaaatgtgagccaggttcgtgcggctaaacctcctgttgtggccctcccaaagtgggtgggactcttttttgttttaaccttagtaaataactgattctatcttgccagatgagaaatgaaatcggataggcttcttatggcagtggcaggtagtaatgtctgtcactctgaagacaaaaatcttactctcaatagatgaaataacttaaaaatcaagagcagtttcaggaactggaattaagcaccagttttctaaaacactatttctggagaaggcaagaggttttttaaaaactctgttttagaagtttatgattcaaactctcaaaatatgcaatacaagtcttatttaaaaggatcacttgcagtagttccctggttgttcagtggtttgggctccgctctttcactgccatagcccaggttcaaaccctgatggggaattaagatcccgcaagccgtgaggtaaggccaaaaaaaaaagtattaatttcatagaaattcgccaggg

SEQ ID NO: 62402 - DNA, 1530 bp, Bovine  19866880860066
  misc_feature (1)..(1): n is a, c, g, or t
nctaagtcttctccatgatttttgcttttttaaaaaaatcactgctaaatcagggggacggataaatcaggagtttcgtattagcagaggcaaactactgtttttataagatagccacaaggtcctactgtacagcagaggaagctatattcaaacgttgtcatcagttataatggaaaataaacacaaacacaggcgtcgctgacggggacttctctgacagtccagtggtaagatttcaccttccagttcacgggatacggttcaatccctggtcggggaactgagatcccacgtgcctcacggccaaggaaccaagacccagaatagaaacaatattgaaacaaattcaataaagactttaaaaatggtgctcattaaaaaaaattctttgaagaaaaacattactgggggacatgagaaagataaagacctcaaggtgttgaagatgctcctgtatccactcaagttcacggcttttgtgtgaaatgtttccaaagaacatgtcagcccaggtcccggtgcccttagcctgctgggagcgcgtctgcctctacaccccatgccctccccgtatcaggcacggttgccaatgagccagagtttgtcttcggggcccctcatccccctcgcccttcctgcttttcatgtccaaccatcgttctctcttctttcccgattccaggaaaggacccagtgttaatacattcattcacactgaggtataagggcctaagaagatgtatgcagacccacccacgaacagccacattttacctaagccaagctttgagcaggcagttaaaatacagaaacgggaacagagttggcaacctctccaactcttcccccaggctgcatttttatgcctcaaaatcagattctgcctgcgtgtctcagaaaaccttagaaatgtcttctccgaagcctcctcccgcggtcagtctctgtcatgtgctgcgttcggaagcctagaccgcgctctccccatcagccctcttagccagagccctgtgccacgtcaggttgctcagtgggcacagaaatgtctccaaggcaccttctaaacctgccaaggccgattcagaaacagaaggctgaagccaaatggagacgttgggggagctcttgtggagaacagagctggcctggacctgaaggcaatttattactaatgcagtgagaggctgcaaccaaacaagaccacatggacattggcacagaacacatggaaagttctgtcttcactcaagcctgtggcctgtcctagaacaaaggagcagaggttccttaaaaataaacgcagctgactctccagtgggagagacagtctctctttcatagttgcaaaaccagaaccggcgggtggggggctgggcccaggaatctgtatttttacaaggctccctgggagagcagatggtctcaactaaagtgatggcaaataaaaagccaaaataaggtggtttgtgttctcttttgtttgatgatgttgtggatatcaacaatgaggagtgtgatattcatctt

SEQ ID NO: 62403 - DNA, 1655 bp, Bovine  19866880987567
  misc_feature (1)..(1): n is a, c, g, or t
nactggcaggggaagggaacgtctcaagtcacctcagatcccctgttcgatggaaaccgcggttcacatcacaaccccctgcagccttcttccttcttgcagcctcaactccaaaccagttgcaactgagtccattcaaaatgctgcagccaagagtctctttactgcctccctgctggactgagctgcagcgggtgcttctctggtacagcgctgggggcgttagcacctccaggtccttgaaggggcacgctggacgatcttgctgcccttgcatccatccagacccccccacttcccttagaaacctagtttgccctagcaccaccccgtgaccttgggacatttctcagagcctaccttctcgacgagaaccgagtcccaatgccaccccacctgcccatgtttcccatcatcagccactcaccccagatccatgccggcagtgttcgctcatcaactgaacaatgtgcgactctgagttcctagtgcctgtctccctgtcattcccacgtgctgccaaggagagtgctttcagccatccttgcgtgacctgcctccagttggcctttggtgcccccacagggcaacagggagaagcagttttgttatttcacaccccaaaagatgaaggatcacatctctcgtctttccccagtaggttaaatgtggagatgaccctgacatccagaaacagaatttttacccccaaatttggctttgcaggacagctgagatgctgaatggttcacaaaaacgcagcagaacctaagacagctggcatctgcacggtttccaatcggcacgtggaaactgtggcagtacaaaattgttctctgggcttcccaggcggcactggtggtaaagaacccacctaccaatgcaggagacataggagacacaggttcaatcgctggatcagaaggatcccctggaggaggacatggcaacccactccagtatcttgcctggagaatcccatggacacaggagcctggagggctgtgatccatgcggttgcaaacagacaggacaagcgacttagcatgcacgatttttctctaattgtttttcttttaacagaaacaataaataattatggaaaaattgaaaacatgaaaatgttataaaagaaaatcgaaccatctctaatcccactgaatggaaatgatgctattattttttagggtattacgtgcctgtatttttctactcaggcaatacattattgtatctaatttatatactatagtatggattgcttattaatataaacaacttcagttattttttgtgaatatactctgcctccttgagaatcctaaagaattacctttcaccatgtaaattcttaatacttggtgagttcatttgattttttgtgagttcatttgattaattggactactcccatagaaagtttatggcagattttgagatcaacagagttaagtactggtctgttttgtaccacctaacagtctatgacctgagcaagcttcttaaatctgtgcctcagtgtcctctgatttaaaatggcgataattgatggtgtctacttcagagagttactgtgatgatgagggtggaaggttctcagcccagagtctgcgtctggaggctctcggggaagggcagttcccttagcgtctctg

SEQ ID NO: 62404 - DNA, 713 bp, Bovine  19866881033105
  misc_feature (1)..(1): n is a, c, g, or t
ncctatgaaaccttctgtagcccaaacggtgtaaagtgaagaagcaattacgttaggacacaccttgctagcagacgcacagaaaaggcacagacgctcacgcaattcaagggcgtggcagcctggcgctgaggcgccgggcgctgcttcccggggagagagctcgttgctgccagtctcaccgctgcagcctgccctcaactccagaacctgaagtctacgccaagggagaagctcagaacctctttttaaggttcatttgtgacgtctgccaacccgggagtctcaccccgcccctcctcctgacgtcacacacccggtcctgcccacactcatgttccagccacactctaaacacgcaacccctgcaacctggcgctgagttccatggtctttatgcatcccttcaaagaccagaatgaggagacaaatacctgctccaacaaagacctgctttcctgcgtctctgagccctcctcacctttggtttttgtctgtgttgtgtgtgcttcctgtagacaatccgtcccaggttgggagtgttcctgtcacaatcaaagtcttagatgtcaacgacaatgctccggagttccccagattctatgaagcttttgtctgtgagaacgccaaggcagggcaggtaagcagcctgagcactgtggttaacctcccaacacgtggaaacgagttacagataaccagattgcccatca

SEQ ID NO: 62405 - DNA, 1459 bp, Bovine  19866881136456
  misc_feature (1)..(1): n is a, c, g, or t
ntctgcctgcaatgtgggaaacccaggttcaacctctggttcaggaagatcccctggagaagggaatggctaccactccagtgttccttcctggagaatcccatgacagaggctgcagtccacgcggtcacaaagagtcagacgtgactgaggactgacacgtcacttcccccaaagagcagagcagagcctcacagggccctgggcacccagcagagcagcgtgagctgagaagctcgggttcgtaacggttactgcagggaagaggagaaaggagctctcctgtcaaatgaataaaagttaaaacaaaaaattcaagaatggcaaagaaaaaaaaaaaaccctccacactgggagaataaagggggcattcacagagcctgggagggttggtgtgaggacgagtcacccaccctaatcgcgctgtttagggaacagacgttcccgctgctgcaggtagcgcacagctgcagacttgcttcacccctcatctcccagaagacaaagacacttgcaattaaagttttgaaatgcaaggttatttcttcattttcccttgggccatatgttttctaggagcagagataatacatgcattgtgagccgagtaagaaagagagatgagcagaaatcaatagacctttgatatgctcttgtctgagtaagatttttttttaatgagcttatctggaatcaaggtgatcaggggggaaaagatgctgatggggccataaaaccaactttcaagacagctcgtgaagtcgactgtattgtttggtagatcgaaatggtgactatgccaagacttctaaaaggccacaattactctacatttttacgggttttttttttttttttccagttaaatctgacctgagtcagatttttgtttctgtgtgcagtatctatttttaaaaaatctcatagcaaaatggttaagatagtaaattttgttatgagtattttatctcggttaaactttaaaattaaaaaagtcttatgacaaattatttcctccctgatgataaaaatagcacggagtgcttattatttcaagtgttatgtccactgggaacctgcagtctgtacctcagtcctgaagctgcaggtacatgttaactcgtgatgtggataaactatgtcaccagttgtgtggatttagacttcccgttaacctgacttgttccctcacttcatgcaggtctccactcaaaagtcaccttatcagtgaggctcccctcgtaattccatcaccttatcctgtttcatttttccatcgtgatcattccagccagattccattgcatgtttgcttcctgccattcttctcccaaggactgtaagcaaggactctctctggctaatatctaccatgtccacaaaacttaaaattgtctctggcacataggatgtgttcaatcagcatttggggagtaaagaatgcagtgtgtcccacttt

SEQ ID NO: 62406 - DNA, 548 bp, Bovine  19866881179599
  misc_feature (1)..(1): n is a, c, g, or t
ncgtggggagcaggcggggcggggcggggcggggagaggggcgggtcacgcgccatttctcgcgagaccggggaccaggaaagacgcccgcagagccgggctgctggtgcagctgcggctgaagctgtggctgctgttgccgctgcagcctgcggacgattcgcctccaagcctgcgcctggtctccaggtgaggagacgggacgtggcaaggccggggctgcagaagcgagcggcgaccgctgaggctgagccgggactcaggccgcggcctgtcagagccagacagggaggcgcccacactcctgacagtgtaagatggcggcgatggcgcctggaggtggcggcggcggcgtgaaccctttcctcagcgattcggacgaggacgaggacgaggtctcggcgaccgacgagcggcgggcaggacttcggctgggtgccgggggcggcctagacccgggctctgcggactcgctgtcgccccaggaccccgtggccttggggagcagtgccagagcggggctccccggggaggctgcggcggcggcc

SEQ ID NO: 62407 - DNA, 1386 bp, Bovine  19866881220791
  misc_feature (1)..(1): n is a, c, g, or t
nattatgtaaactatttttatgacctataacaatgtcgttcaagtattcataaaataacgatgtaactgctcatcctgaaaaatgcgcccccaaatcaatagcttttgaaaggaagttatagtgataagacatcaagaataagggcaaagagccacagtgaaacacggtgcagttaatatgggagacagcctctgtgaaatattagatgtaacaccgggaacaggaaaagcggctttcaagcaaaaatatgttacaacttgtaaatgtgctctgagaatgcatctgtcttgttttatacttattcccttgagaaaatcatccttgaattatgcaagtttgaattatacaaggtcttgtgagacgtagcttttgtatgaaataagacctccccacattttacaaccagaaataatccaacttaaaaaaagtgctgctggtacttaaataaacaagttccaggttgtcttattaatagaaaaactgcagctttagattatataatccatcaatttgagttgcttaaaagtgcttagtaaagcccatgtgcaaataggtgtaaaggaaatgtttttggtgataagaatcgggtagttaatatttccaaagcattttggtcagacatgtgaagagctaaattaatttccttgacatgtttagtagaatgcatagttattaatctaattcagcttcctattaatgcaaaactcactggaatgttacagtgtaatggtcagctgtcgagatgatttatgccatttattatttttaaaaggagggatgttttgcatttttttttatttccatgtgataacctcggcagaatgaaatctcatttctagtttccacagtgcaataaaaagaagtttggctcttcaagttcagctgtgtgatttgtgtgtgtggtttcagcttgtgctgtgacagccaatgaacggctgatttaataagttaggaacctccactacacgggaatggctgaagtgatgtttcctgagatcaataatattgcttggttttaccaaggaaataaatcattttgccacaaggttgccaaaaggtgagggttgttgtttttgaccaatgacacaaaactgagtggcctttggaaagactgagatctgagtctattagtcaaattcaacttcagttaaatctaatttaatggactactgcctaatagaatatttaaaaggaagtcatagttgaagcacactgagtttttcttttcccacaaatggctaatccactgactagagggcaatatttcaccagaactggcctgcatattctcctgaccaatgaatttctgatgcttttgctcaattcttcccctttaagtgtagaaaataaaaactttgggctatagacagagaccaagttgattt

SEQ ID NO: 62408 - DNA, 950 bp, Bovine  19866881263551
  misc_feature (1)..(1): n is a, c, g, or t
naaataaggatcctcagtcagagcagtcctcctggtggaagacgacagatggaaagggcccaacttgtgattacatggtttacttatgcaagtacagttaagctgcctgtgaaattcacatagctaaacaaaaattacaaccaagttacttattagctaccttgaacctgcctccctgagagatggcaggctggtcagagagccagtttccgagccagctggggtggtctgccttgctttgtattgtggtttttagagcaagtgggtcctgagcatgcggcgtgtggctgttcgcctggcgtcgcccagcgatgtctccagactgatcagatcagcagacccaccagtcccctgccaacactgttactgtcgagtcgctaagtcatgttcgactctttcggaaccccatagactgtggcccaccaggctcccctgtccatgggattctacaggcaagaacactgcagtgcattgccatgccctcccccaggggatcttccagacccagggatctaacctgggtctcctgtggctcctgcattgcaggccgattcttcacctctgtgacaccggggaagcgcaagaggaaggtgaccctgtagtaaaggagtcttggagacacaaatggtcaaaacacaggaaaacccaccagacagagcaggcagctcattttatccaaggagagagagacactcttagggtataagcatgtgagctgtatcttcagttcagttcagttcagtcgcttagtcgtgtccaactttttgcgaccccataaatcacagcacgccaggcctccctgtccatcaccaactcccggagttcactcagactcacgtccatcgagtcagtgatgccatccagccatctcatcctctgtcgtccccttctcctcctgcccataatccctcccagcatcagagtcttttccagtagtcaactcttcgcat

SEQ ID NO: 62409 - DNA, 1134 bp, Bovine  19866881298041
  misc_feature (1)..(1): n is a, c, g, or t
nccagaagaggggcatggagattttgtgttggggtgaaaagctgaaattttagtttggtggccgcgagggccccttgagaagatgcttttgaggagggatctgagcaaagatttcctgttatcagacagggtgcagaaagagggctgtaacctgcccccgagcccgccaccccactccctgggtggaggttgaaatactgggactgggttacaaggtcagtcagaccaataacactgatgcttagtcacctgaggctgaattaccactgctaaaatccaggcagggatgagttattcatctttgtacccacagcatcaagcacagatatccaataaatgtttattgagctgaacccttaaatctccgagaacatggggtggggctgagataactatggccctgtgattcccaggacagcctttctatcaggaagatacttccacagacaatgcgataatctttttttatcccttttcatgactgtcttcctgatcttcgagggcagagattctatttcagcttggtccctgagtgcctgacgctctaagaaggaggcagagatgaaatagcacagggaaacgaacagaccctcccgggtgctgacggccctaaagatcccagtccagcccattagtgagggtgaggtttttgtctaacatgtctgagttttacattttaaaaccgcatcttgaaactgaactatggtgatagctgtacacttgaaacaagcggattttatggtgcataatttatacctaacgttgttttaaaacgttgaagtaggagccaggttcagacagctttcgcgtgctgtaaataaccccaagaggcatgttgcaccaaacacatcatcatccttcctaattactgtttaaaccaagttgacttggatgaaatactagggaaaagtatatattggtctccacccctagttcctggcacagagctcccaagtgatacgaacaccgggagcatcttgtggtctaacatttggtctctggcactggttcctgacatcacggtgatagaagtgtcttttgttctggtgaggtgaccctgggtgggctcctggatgaggactggtcaccagaaagaccaagacacggtcagaagctggaattttcagccctact

SEQ ID NO: 62410 - DNA, 1199 bp, Bovine  19866881320879
  misc_feature (1)..(1): n is a, c, g, or t
nttttttcttccttagtgtctgatatcaaatggcagatttgaactgtcctatgaagagttaaaacagtgcccatctctgcttgtatcctttatttctctccagcattaaacatctaaccatggaaaaaagggggaaaaaatgtgtaccatccactaagtggtgttaatttgcaagaagtttacactgctttttctgtctaaatctggtgctcagccatataaaacatccgcagagcgctgccagcaagcgggccagatcgtgttcgcctgaggagcagccagactgagttttgaggctgtgctgtttcctgtataattacttctacatgaatggcctcctggttcctggtccaaacagcactttctcgttattgctttttctttctcctggctgtgccgggtcttagctgtgcaatgcgggatctttagctgtgtcattagttggtgcccctccattgagatcgtggagtcttagccactaaaccaccagggaagttcctcgttagtgctgtgctgtgcttagtcatcagtcagtcgtgtccgactctttgtggccccaaggacggtagctcaccaggctcctctgtccatggggattctccaggcaaaaacactggtatgggttgccatgccctcctcccggggatcttcccaacccagggatcaaacccaggtctcccacattgcaggcgggttctttactgtctgagccaccagggaagcccattattactttaaaaaaaaaaaaaaaagaaagttcacttgcctgttccaggccgtagttgtggcttgtgggatctagctccctaaccatggatcaaacccgggcccccaccctgggagcaaggcgtcttagccgttggaccaccagggagtgcttctttactgctttttaaaaattgtcatgctttatgttctataaaaatgtgtgaaagaggatggtgcttgggtaaaagttatgagtgagcttaatcctgaaaggcaccatcttcttaggacttgagggaggtgacctttttattggcttttggatttatatgtgtgagtatttaaaatgaaaaaaaaaaaatcttgcaaccaaatcaagggggtttgtgcagaaatgacaggcctggacacttcctcagtaggaaaagcaccttcttggcacccaacttttgcagacgacgatagctcttcaaacagctccataagcatat

SEQ ID NO: 62411 - DNA, 1021 bp, Bovine  19866881560603
  misc_feature (1)..(1): n is a, c, g, or t
nctgtgaaaacatgacccgcctttatctcttgaacattttcatgccttttgagtgagattttttttttctgctcttcttgctttttctgaaacaaaaacctgcctctcgtttcctgaccgtctccactttgctctcttcaagactgagtgactttaggtgtgtctaatgcgactggatttatttgagaagctcaagcactgatttgtttattccatttacttcgacagcatgcccattaccccgggattctgagcacatataaatgatctgctcggggttggcaaacaagagctggtgatggatggagagcgagcagacagtctaaaagcattcgtcaaaagggctcttccgtcccagaaatgcttggttaagcaggttagtcttgcagtttgcttggatcctgacattttaggttcgagccgcttgctttttatttgacatacaccaggaagaatccctgggtgaggagggcatcagaaacaggccctcgaagggccaaggcggggacccagaggtgacgtgtgcccctgaccactcgacaaaaccctggccgctgtctacgtatgttatgattcacaaagggaaaggctctgggaggtggatgaatcggtttgccttggcaggtctctagtatgtcaacctgcttcaaggaggaaaaaaagaaagacgctggtctccacgaagaggggatcagaaacgaacaaaccagagaggaacccagcttgaagatccaccaggggttcccactcaggagaaaggcgctgacatcagagccagcgaagaggaacaaggatgccggccctggtcctcctttcaagtccctcctcgactcgggaggcagctcgccgtccttgtcactccttggcttgtcggccctggagcaggcctcgccctctctccgcacctctgttttcctgtctgtaaagggaaggaagttgccctgcagtgaagagtcttcccggcgtgaagccctgggaggccgcaggggaggaccggggtaagaatggccaagccagtcag

SEQ ID NO: 62412 - DNA, 1196 bp, Bovine  19866881790201
  misc_feature (1)..(1): n is a, c, g, or t
ncaattttctttccaggcatacaacacagccaatttactcattttggctgggaaagaatcctatttacctaagaatgagcacgtttcaatctcatgaggactaagtttcactgtattaagatgcaaccaaaacacagatttctgtctcacacacagagaaaaccagttgaaggtcttctcccaaaaagcctgagagtttcaccagtcagctttatcatttgaaatcaaaccccttacaggcaaacaaattaatcttccagcattcatcttcccagtttgcagtgtttggaggatgttttaattagctcagctgcttatcccttcaagtgtctgaaagtatctgttagcttcctacaggtttcagtaatggccccttccctagagatggctgggaagtgtgtgtgtgtgtgtgtgcgtgcattgtgagtccaactctttgtgaccccatggactctgctggagtgggttgccattcccttctccaaggaaggctgtatttggtttcaaagttctgtggctttctgagactagcattccgtctattatttccaacactaaccactgaatgctgaaagttttagctaattctgcacaccgcaatccacagtaaacctgaaaccagtgaaatcaactgaaaagtaccctgtggtcattcctgtccctggaacaggttacaaaggtagaaagttgacggtccacactgggttccagaaatggtctctaaacgtctcagcatttcccctacaggtcccttctaaaaatgcaaataacctgaaggattatgaagatttgtttcccatagcagcattgatcagggcacagaagtgatggaaatttttgtacagccaggaagaaagggctctgatggtgcctgggtcatgtaagttcagaatatggagcagggagaatccaaggagagcagcagcaagacccctcgatctctgatcagacacaacattgtggtccccactgtagaaacaataagacaaccaagcccttagaagggagagcagtaccccactgaacagcaagagagccctagatgtttgagaagcttcatgaagagaggacagagcaaacagggcagcggggtcagttctgcctggaaccgtctctgctctgtgacgtgtgggccacctgtgaaggtgacactctgcgtctcccccagttgtgaccctgaagaccgaggacgtgaa

SEQ ID NO: 62413 - DNA, 2945 bp, Bovine  19866881997715
  misc_feature (1)..(1): n is a, c, g, or t
ngacggggaggcactttctaagcccgcgggctgctccgatgccgctcggacacgagcccattactgaggggggctggggctccccggcgtctgagtcacctgcgtgccccgttcagaagccgtctcgagctcactccacctcgcagagcaggacagggtaggcatttgctcaaattcccacttgagtacttctgataaaaccaactgtttcaaataaaactggaagggcttttgtatttcgcactggtaccatctaagttctgggtttcaggcttagttgacttaagtgaaatcagcaacagagcaggagagggctgtctgggtgctgatccaaaccctaagctgcttccaaagcgctgcatgactctcagagactgcgttcccaggggctccatgacacagtcatcagagacgctccatcacagctcccagttctggaaagctgagctgcatccctgtccagcgggagcatatgccaccctctgaaacgcacttgaagctgtggcctcaatgagcatcaagctgtctgctggggaagaaggcaatgttatgggttgaactgtgtctccaaaaaagatgtccaacgcccgggagctcagaatgcagctggagtggggaacagggctgctgcctgtgtcatcagctaagatgaggtcacagtgcattagggggacccctaatctaatagcaccaatgtgtttaagagaagaaacacgaggaaagaaggcggtgtaacgacaggaagaagagatcagtgatgtatctatgagccaaggttgctggcaatagcagacgctgaagaggcaaggaaagatccttctttacaggtttcagatgaagcgtggccctgcccacaccttcaacctggactcccagcccccagaaatgcgagacaagattctcttgtgtgaagccacccagcgtgtatgacttcgttacaacagccctgggaaaggagagcacagggtaaccgaacaactgggggatcacaaagacctcttgactgagaagcagcaccaaggaggaaggaggaaatacagacggtctccagctgaggatggttcgatttaggattttttgactttacaacggagtgaaagcaatgcgcacttgggagaaaccaaactttggattttggatttgctctttccccaagcgagcaattcccggtccgctctcctggtgccaggcagtgacgctgagcacggctgcacgtcagccacgtgaccaagggcaagcagtcactctatacccagacagccattctgcttttcactctcagtacagcattcaataaatcatatgagacagtcaaaactttattacaaaataggttttgtgtggggctcccctggtggctcagatggtaaagagtctgccatccatgcaggagacccaggttccatccctgggtcagggagatgctctggagaagggagaggctctgtgtgaaacggttttgcccaacggtgggctcgtggaagtgttctgagcatgtctaaggtgggcgaggctgagctacagtgttcagcaggttgggtgtattcaaaccactttttactatgatatttctgacgtatgatgggttgattgggatataacctggctgtacgtgtttgtgaccaggaacgcctttcatagtgtggccgcctacctggctgaactggagggagacagacaaggcccagcatccctggaaggagcctttcttcccctaagaacctagactatctaactcaggccccgaggaggggaaggagcagggcaggcgtgggagcaacagaaatgaaaggtttcattcctccccagttaagccaaaaccctgcctcctgcatcccggcccagtcccttccctgctcacatgcttacagaaggaccctaatgggtgttttcagagccatgatctggtgtaatcttcatacgacagggaaggagggaaagtattatcactcccattttatatgcaaggaaactgaggctcacacaagatcacaaatgcaatgaccaccctgcaaagagggtcagttaacaaagcaaaaggcatgggagtgggcatggggagtgggggtaggaaaaaagctctaaatttcatcttaaaaaaaaaaaaaaagacggggtcaaacgaaagttcccaagggaatcagatctgttggccttggaaagcggaccttcatctgtttcagtcgttccgacagcgctgctgcggacacgatccgctgattctttgaccagattggtcaagggtctctgaggagaaagcccaagcatgtaagaaccctggccttctgtctcattcggggcttcgctgtcttcagaagcgtctgcgcaagcagagggcccttccccaaccatcaccctgagcaagccaggcctcagggagtgagaggccgggggaccacagacccgcgtccaacagcctgtgatgactgacgggccggccccttccccgaagtatcaccctgcacaagccaggcctcagggagtgagaggccgggggaccacagacccatgtccaataacccgtgatgactggacgggccgaccccttccccaaagcatcacggaacaagagcagagacggcagggatgcagcgggctggcaggcaccccaggaaacgacagggctgagagggttatgccacaaagcactgggcagaagagctgggtggagagctctgactccaatcagcggactcttccatgtagtataatcctccccctctggaaaacacccatcactggtcaccgagaaaacgtgcctttcccaccctcaaacccatggccaagatgtcaggcacagagacctcaggagtcaccactcaccaccccaagaaatttcctctgcgaagtgccctcactccccatcttgtcagcttgaaaatattaaacaccactgaaggaaatttaaggtttctttttcagatttaaatgtctactatttcaaa

SEQ ID NO: 62414 - DNA, 1271 bp, Bovine  19866880379333
  misc_feature (1)..(1): n is a, c, g, or t
ntctttattatgttcgtgccagtttttgcatgatcatgaaaagaagtatttttagaaaatgtatcctcagctggcatagtagatagagcctatattcactactggggctgtttttttttttcccccactaatattctttacatcaagaaaggcacatacagtataggtttaacaggagaaaccaattcatcactatgactttaggccaatatccctttcaaggctgttctgattgcttccagaaataagactgtgttcataaaaatgctggttgtgtgtgtatgaggtatgtatcactgggcaagaggtacagaggtttgttgttgctgttgttttaaatttcctatctcctgtctccattttataaacaggtcttaaatgaagcacttttaatggcagtcacaatttctttaaagaatgaaaattctgtccataaggaaaaaaaaatctgtttcttcacctcagttcgttagctttatcttgttttaagaaggccagagtgatttttatgccatgtaaaagtagcacactttgagcaaattgaaaaattaatttttacatgaaaggtaaattagagatatctactttatctactaaaggattcttaataggattctttaaaataccaaagcttctgtagcaaatagaaagcaaccaatatttactgagcactcactaatgtgccaggcatgccatctggccatttcagattcatcatcttgttgaatccttcctgacctgtggcatgtataggataattcccactgaacagatgcccagtactgcagcgacagacccccaggatcccagcaagagtgagtgccagcggagggtttctaactgatgatctgattctaaagccatactctctccaatggatcattcatacttctaatacattttaaaatataaacttattgtcaaaactgtcgttaattttcattttctcttataagttgaggtgtcacaatgaactcttaaaagaaaaacaagaactcagtcttttaggaatttaactgaagagatcttgtggaagtctttgcctttcaaagatgacagggcattaacaaagcatctcttgggcatgaaaagggaaaaaataacatcctttgctctctttttaagttttttgaaccagccaagaaaattacccagcaatataaccgatctgtggtccagtctctaatggcctaattatgcttatcttaccacaagggtgtagcagagataacaaacctaataataacaaagacagtggtaacagaaacaca

SEQ ID NO: 62415 - DNA, 3013 bp, Bovine  19866880399610
  misc_feature (1)..(1): n is a, c, g, or t
ntctcatcctctgtcgtcccctcttcctcctgcccccaatccctcccagcatcagagtcttttccaatgagtcaactcttcgcatgaggtggccaaagtactggagtttcagctttaacatcattccttccaaagaacacccagggctgaactcctttagaatggattggttggatctccttgcagtccaagggactctcaagagtcttctccaataccacagttcaaaagcatcaattcttcagcactcagctttcttcacagtccaactctcacatccatacacgaccactggaaaaaccatagccttgactagacggacctttgttggtgagatgtaattgtatctcctaagaaatggacaccttgcagactcagtgtgcatatttcccatgattgtgttaagagctctgaactaggttaatcttctctcttgacccatctataccccatttttctttctctccagaaaaagaagctattcgaatcagttgaaagcaatgagattaatgacagaaagaaaaagatcttaaaatctagtttttagctttgaagagagattggttactactgtctagcaatgggcaggttaacccactctcttggggccagagatggaagaactgatcagaaggcagcagaccaaattcctagagggtttagtgtttgaaagagatttctctctgtagacataaagatgaggaccagccactctcatggttaagagagaggaagtgagaagggtggcagagatgatttaaacaacactaggaaaaagagacctgtttgaatccagagttcatgccagcatccgctgctagtttaaaattgaccaaagatttgtttcaataatctctccaaccattcttacttgtgcttctcattcttcttagacttgatatcatatatatttaaattttcatttaaaagcttccagtaacctttggcaccaggattcctgacttggaggtagcccatgtctgatcattgggctataggaggctgtggggatttaatgcaatcctctcctgctacagttctggttattggtggttcaaaagtagttccccatttaaaatcttgaaacaatccattcataattttctgatgttaatgagttgatttccgggccctttttgaaaaaggatttctaggtagaagaaataagcaaactcttattcatggaatatcaaacccaaacaaagggtatctcagggactgtctcggaacacttgatagaaattgaattctgtatcttccaggctaatgtgctgtggtcctttaggtgggataggaaggctcacctggtgacttccctgatgatagagttatcctgcatcagccctagttttccagtgttccttgttagtttacttgctagaggggtgaggcaaggctgggttaaaatgtagagttgagaatttactgttgcccaggaagattagctttccaagcactgattcttgagaaagaggtttcttaacaatgttgcctggacactagaaggattccccccacccctaccctcaacatgtatataatttgtagtttctccaaagcaccttgtgttcataatgaggaagaatgactcacaagatgagtaaattcagagccccaagagcaatgaggtttagtggtgaatatactaaccatggggaatcaggaaaccaagtggggtcctggtttggctgctgactgctaaagttactcaccatctctgagcttgtgtcctctaaaaaataaaaagagctcctatatgtcaaacatatcgtatgttttaggaaaatattattattatattgtgcatcatttcatttaatcctcaaatttctgctatggggtatgactctgcgctctgttgtttcggtcatgcccaactctttgtaaccctatggactatagcctgataggctcctctcttcatgggattctccaggcaagaacactggagtgggttgccatgccctcctccaggggatcttcctgacccagggattgaacttgcatctcttgagtctcctgcatctgcaggtggattctttaccactagtgccgtggggtgtgactttaatcacctctatttttgcagatgaggaaattgaggcacatagaggttaaataatttgcccaagttcatagccagtaatgacagcttggactcaaatactggtgcgcagactgcctgcagtctctcccattattgctaacactccaccacctcctaaagtgaagagaaaggccgagagaatgctgagggtccttttagtcctgctagtgtagggcagagggctctgtttctggagtgagaagatccagcattcagccccacctcgttccttctgactactgggaatctttcggggaatacatctccactaccaggtcacaggtagcatttcaggacttggcttatctcctatgccccacaaaaatacatatcagggccattcttttctgagcacatgggttaagccaaagctcaacgtagtggggccttggagaaatgaagcatggggaatgttggccacagagagaagtatttcagcaagaagctgcaagctcccagctcgctggcttggtagggaccccagtaaatcaggataagccatggaggctggcactggatctcagcggcagaatgtggtcaggggctgcggacccctcaaaacaacagcagcagcagcagcaacaaaccaagttcaagctaagaaagcagactgtgtgtgcagaagggggctgaaagcatgagggaatgagggggaggaaggaacagacaggaccaaagggacctggaacaaaaggggagagaggattctagtcacatctcccagagactgggaaagggctccagtgtgccctgaaatggaaggagagggaaagaagtaagcagctcacagtaagctagaggaggaagtgggagatgcgctgcttcctgtataaagaccgatgattgaagacaaagctgggtggggactagtccctgggctgcaggcgctgctgctacacatacaca

SEQ ID NO: 62416 - DNA, 972 bp, Bovine  19866880400331
  misc_feature (1)..(1): n is a, c, g, or t
nctgtatttatggtaccaataattctgcaagtataaacaatgatgtgggcaaaattgtgcaagtttgcatggtttttctttgttagtgattttaaagccaagagaacatatttttcccatttcttatgatttttcttcttagatatgaagtactacagctaaactgactctgtaccttctagtattagcttgttcagcctagtaacgtcacagatggtcaaaagagtatcagtgtgagaatttcctggtggaaatcagccagtttcaagggcctattttcggttctcggcctttcatcattttcggggtgagggtcgtgttatacttgaatccttccaacaaatgttgcattgcgctccccttgtatcccaacaggttgtttccaagagagggaaggactacatcctgaagcacacttccaaacatgcacaaagatcagtttgcactgacagcttctgaggctcatcttaaatatatcaaagaggctgtccgactggatgacgtcgctgttcactactacagattgtataaggtacaaaactgcagtacgtctgcagctgtatcttcttgatcaggagaagttttttttttttttaagttttggttgtttttaaaatgggtttttaaaagaatttttatttgaactgctgtttgtcgtcataagtcagtcttggagtcagtgatgtttttctttgggcctggaagcaggagtgagtctttttcatggttctgatattgagatgacaagtggctgtaaattgtgcttttgatttttcagtgattatgaaatagttattctcctccttcccaaatctgcatttctgccttggggagtaatgtttactacttctttgatcagtaattatttaataagtgaagccacacctgcactgtatccattagtaataagagcaccaccacagcagctaatgtttattgagttttgtatttatgggaacacttcatatctat

SEQ ID NO: 62417 - DNA, 966 bp, Bovine  19866880742342
  misc_feature (1)..(1): n is a, c, g, or t
nggatttcccaggcaagaatactgtagtgggcagcatttccttctccaggggatcctcccaacccagggatcgaatccaggtctcctgtattgcaagcggattccttattgtctgagccatcagggaagacctgttgtaattattgcaactatcataaatgttagtctaatttttattgacttaaaaatcatatcaatagttgatgaagggtaacaaaagtaaccattcaaaaaatcagaatctctaacaaggatcagcactggagtcaccgtgtttctgtgtcaaagaccatttttggtcagtcatatactggaacatgaaactttggcctacatatctgcctactacacccacccccccaacattagtccaaagttcattctagagtcagatataaaccttctgttgttatcctaacataggaatctgctgctgctgctgctgctaagtcgcttcagtcatgtccgactctgtgagaccccatagacggcagtccactaggctcctctgtccctgggattctccaggcaagaatacaggagtgggttgccatttccttctccaatgcatgaaagtgaaaagtgaaagtgaagtcgctcagtcgtgcccgactcttagcgaccccatggactgcagcccaccaggctcctccatccatgggattttccaggcaagaatactggagtgggttgccattaccttctccgacatagtaatctacttctgcctataatttctatgacttgtttagaagggaagagatgggatatttttaaaagttaagatctaaaatccactattttgctttgctcttcatgatttttctctaaataaacttaaatgcggtgagtgaagcagagtgttagaagcaaacataaggtcaaactgaggatttcagaagatttggaagacagcaaaataacccagtataacttatcatggccaacggcagatctaagagctca

SEQ ID NO: 62418 - DNA, 1801 bp, Bovine  19866880757900
  misc_feature (1)..(1): n is a, c, g, or t
naaatttgctaatgagactctacaataggaaattccagtgacaattctcgactagatcctgcttctctttttctcaggactgttgtgttatctacatgtctgctaatgccatgatctgattatcaattattctttctctttaagaaaaactgtactagcatgctgtgatgacaaagggccagcggaggctgatgggtcgtttggctcatgccaaagcagactgttgacaaagacagaatgaatagtgcatgaagctctccgtctcccacatctgccatctcttggagcatttaacaatgagatttgagatccacatgaattctatagtaagcacacatatgtttttcagttttcctcaatggaatcagtatatcttttccccaaacttgaatgctacagcaattatttgaaacagaaaaacaataaaaaagatgcacccaaatgctgatacaggctatagatctcatcttatctccttaacccagggtgaagcagccaatgctgtgttgctctcttctctattacgacatcaatcctatggaaccaacactggggaagcactgggaaagaaaaagcagaaggggccctgacgatgggtcagcaccgttagcttggagggcctggggggcaggttaccatcatcctgtgaatcctcctccagccggtccttgccgccactctccaccccggaggtgtgggagctgccgtggctggtcatggagctgcaggttttcagcttgcggtggatggcactgccagggtaggcgtcctcagggcccgcatcccgggccttggtgtcggcctcgatgcccgaggtgtgggagctgctgtggctggcggtcgagtgacgggacaggcgcttgtgcttcatgctgccggcgctgctcccgctggcccgtgaccgcttctccagctggtccatgtcgaggtccaggttgtcgctgatgtaagactcccggtactgcttcttctctgtgtggtgaggaacacagctcatcattacagtcaaccaaggcaggaggaatggctggttagcccagggcaggcatcaggccacgaacgagtacaatttcacattcagaagtgagtgactggaaagtgctgataattctgataggaactctatgtaagaagactgcaaaatgaataaaacccagtacaatagatctgaggcaggtatttgactacttgaagacttttaaagtttcaaacactgcagaagaatgctactcaatgtggatgaaaagaccacttcttgtctgaaaactgttatttgtccacaatggaataagtttaggaattgagaataaacatttagaaactttcagagcgatctgatattgccaggacatccactaatgagactttgaactttgcaaaagtatcagtgcatggtggattagaagttttgaaaaatctggttcttccccacagataatttctgaaactctgctacagaaatggtttcataagtacacttatactaactgcctttcatttgatttgttcatctgttcagtttggtccattgttaacttagctctaactgttgaagacaatttaaaataaaactatttttctgagaatttctttcaaaaaattccagaactgagattttcacagattaagattgcttttctccatttaggctgaactaatgagacttcacgatctattaagaaaacatagtaatcactctggtttgatgatttatacccacttagcctctgactgataaaactgttatttaacaagttggtacagatctttaatgcagacaaagacacaatacggaaagtcc

SEQ ID NO: 62419 - DNA, 1538 bp, Bovine  19866880810996
  misc_feature (1)..(1): n is a, c, g, or t
nccagatgggcagcaggatttgcgctctgtttacatgcgtttagattgttccatcaaaatgtgagttctgctttcttttgttttcctagtgacagagcagcaagatactattactactggcacctgagaaaacaagttctgcattcgcagtgtgtgctccgagaggaggcctacttcctgctggcagcctttgcgctgcaggctgatcttgggaacttcaaaaaggaataagcactatggaaagtactttgagcccgaggcttacttcccatcttgggtaggcactgttttcagatctaaagcgtttgctctagcacatttctagttcattgttctagttcaatagagacatatcaacccctaaaatgtctaccctctatgttagacacattgcgaggcgcaatggtaatgacaaagaaactagtagcaaccagaaatagtcaagctactcatgcagcttcaagaactgggaagccaggtgtttaatggcccacacaccctccatgacacccgggtacacatttcacacttgagagcgtggcacacacagtctctccaccaactcgacctgtacgtgggtaatgaggaagaggatggctgtccatcctgcagatgctggaactgggaatttgtcagccttcttttgagatttactcagctttgactttcttatttactcttaattcaagcagcatatttccccttcaggaggagaaaaacactgttctttaaaaagcgacatcattcacaacttttcctgtgctgagaaaacaaatataagtgaactgcttgtgccttccaccatctccttcactatcaaaggaggagccacccccttccttcagcaagaaaatataggttatttgagcactgactgtctcagccatgttttcctccaccatactctgctgatatcacttcccgttcttcctccaggtctctgctgaggcatctctcctgtatcttcagcctctacttgaactaactcggttcacaccttcctatcttcagaggaggaaggagggagggaaagaagagctacctatctctccttcccttctcagtaaagcttcttgaaaaagtgatgtgaatttgatgttttaacatctttacttcgacatgtactcctcaaccgacatctatctgccttctttcctcaccagcccctccactatggcgttgtccttagggccagcagtgacctttaagttgccaaatccagtggacacttttcacatcttttcctgggtttctctgctgtgattgacacttagtcactcctatcccaggagacctcctccaaattgatgctttttacaaccacatatgtgctggcacctcccgaatccatttctctcccttatgtctgtaagacagatgtttacccataggcacctcaaactcacagtgccccagatcaaatttatctgcttcccacctcagttctgggtgttcctacctctgggttcataacctcagccagtggccctggtcacctaaaaacttaagagtcattcaggctcttccttaacactctt

SEQ ID NO: 62420 - DNA, 2735 bp, Bovine  19866880876898
  misc_feature (1)..(1): n is a, c, g, or t
natgacagaggagggaaatcagaaagtgtaaaatcctggaaatcgaagaaaatgcttcaagaagaagggagtgatcactttggaactacctatccatccaacaagatgaacattgggaagtgaccactgaattttgtagtggatggctagtggttctgatgagagcagagttgttgaaatagtggaggggaatatcccgataggagtggatttaaggcagaatgcaaggagagattggagatgtgaagatagacaactctttccagggatcttactataaaagggaggagaggaatgagtcagtggctagaaggtgaagtgggatcaaggtgggggttgtttttaagatggtaggaaacaggagtcacgcaaacatgagtctgcagtatgtgatgaactgggtttaactaggatggcggttacccatttgaatacactgaaagtaagagaggtaaggaggatgagagtgtgaaggagtgataataatgatgagctatggaatctgagctagataagaacagggagggttggagggttagagaaaaattggtaggatcaacagcttgtaggtatattggagagctgctggaattaaatcattcttggatggggggagatatgctgaaaggtcagtagaggatgatcaagtcagaaaggagaaagggtcattgttgatagtaatgaccatcccaggaaatacccgtgggggtggacagcggaagcaggagagaccaaggccactgcagggctgacaggctgggtgggcaggacacagctctacagccagtatgtaccttgctgctttactgaagtattcagagctggtgtctattctgactcatcagttagtgcctttgccctatgagttgttaaatattttgaggatgagtcctgagtccaagaattgaaaacctcaccactgtgaatgtgatatttgcaagcattggactgggatatttggagagcacaatggtgggctacaagtcatcaggaagggaggatctgtaatgactgcctgctgagggtagaaggagaaggctgaacctccaaactgtcccttgcctgagcccccgaggatactcctaaagggtgggtgcagcactacagggtgagaaaaaaccaaggcaaaagatttctcgaggaagacaaaaggccctcaaaccgagtacaatccagaacaaattaagccagcttcacaattttgccttggcagcccaaccaattgaacccggtctgtaaacgaagctgcatcttgtggctcttaggatgcctgattcatacctggctataattcattccagaagccccagtgtggctgtgagtcagacagaaatcatcagccaaactacttagtccagcaaaaaggacctgttttcctctgcttttgttaatgtttccttgattgattccttcctccttttctcctccagcctcacttatcagtcagagccaggataagtactatctgagagatttcaaggttctcctggtcctgctttcctttacgataacaactgggccctggaaccaagatctagagcttgcgggggtaaagaggggggagaggggtagctgtgcaggtgaaagagctcatggaagaccaggccccccgactccccatccatcttgaggcagattcccaagacatgcggcctctccacctcacacaaagcagccttgctggagactgtggctttcaccacacggtgactcagctctctgaaggatgggaaaagactgtctgggaccgtcaaccacacaggcaccaaataactcatgttggaggagaccagtcatttctcccaaggccttttataccactgacccatagccactggcccaaaggcaagtagtacctgcctcctccccattcttccatacccaaacatcaagcctgtgtcattctctatcttccgcagctttatgcttccttctgttcctccacagtcagtccctctctccaaacccttcacccatttccagcatgccctctggagccaccatttcagacaatgagtgtttcaatattttcttctctatagttttcttatcaactgaagcctaccttctcccaaaggtgtgcgttttctgacttccatctctggtggaggctgccgtttctcccacacgccctgagacaggaggcaggggttggggccaggattcacccgactccctggtgctgcacaaactgcatcaaagcttatgccacttgaggttaccattttctgtctcctacaatcactgaagacctagatgtgtgttgtagtcatcttctcaccatgccaaatcctgacctaatcctgagacgtttaaacctatccgtggatgaccatccaatacactagtggttagttccttgacattttcaagtctcaaagctgagctagttatggtctgaaaatctttagcaacaaaggataccagaccttcaagttctctcactacatctgctcttcaagagatggccaagcctaagattcctttctttcatcctaattcagtgctagttaagctttaacaagcatcagaatcacctggaagacttgtgcagccacagattgctgaactccaatcccagaatttctgattcagtgggtagggggtagggctcaggaatttgcatctctaataagtaccagggagatgttgacactgctgatgtgtggtccacactttaagaaccagcgtcttaatgtattgggacacattgggaaccagtattcccaaattat

SEQ ID NO: 62421 - DNA, 3095 bp, Bovine  19866880926373
  misc_feature (1)..(1): n is a, c, g, or t
nactgatatgaagagaaaacaagagcaagaggctttctgggtggagacggctttcatgtggtttctacaaagcctgtctggcaccttggcccatggctgcagactttccatcctttgctgagctcagcatttattgatcacctttttctatgccaggggatgctcaggatgcagttgtgagcaagaaagacatggtttccaccctcaagaaatttacaacaaggtgcagtttttaaagataaagttcagctggccctctatttctacatttgccgtttatcttcttcatcacaagatacatattttagattgtggactagggtggctttgatggggagagcttaacgaccacaaacactaggacccagtggtaaaaccttcaagagcctgaatactgcacgtgggggctctgaaaaaaaaaaaatccccaccattccctacccaactgtggctcttggctctcagcgttctcctcgtatcatcccgaactgtgagatctgggtgagaagagacggttccagagacagagctcacatcttctggaactgaatctggtccatacacgcatcatcatctttggtgccccctcctggtgccgagcagaaacacagcccccgacggccccctgcccgcacttctcagaccttgggggttgtcacagggaaagaaatatttgtttctgaatctctcagtcgcctttcagaggttctcactgaagatgaatgatgggaataaagttggaaacagtctaaaggagagttttgctcctgcgcatcccaggaagcagctgcttctcctacagcacaaattcatacctgacagatgctgtgaaaacccctgcaaaaagctgacatcccctcctgggtttcagagatttcctttcgcatctgaactgctcgtaagaaagaaaggagaggaacggctcaaatatagtgaggactgccttggcctcatgggcagggctggtctggaaggagcttgcactagggctcccatggctggtgaggggggatgaacgtgggcatccgcatcctgggctctaccgttggaggttctgatcaggtgtggtgtgaggcctgggaatacatgaatccttccacaaggcttccgtgagtctttctgaaagtcactcaggcttgtgaacccttgaattaggggacagactgaccaatagtcccctagttagctctccttccatcctgacagcctccgtgtctcctggctccctcaggttcagtctccctccgccccactctcggtctttagcccccaggggctgaaacctgagtcagcaccaggccaggtggagcaattgactcgggcctgttcaatgaaggcgtttagttaccagacacccatctgctggctgtcctcaccaaggaaacgggggccagatcactttcactgggcatcggccccacacttgccaggtggagtgtgggaggaagggagatccaccccgccttctggtgccttcactgcaaacaattcccatgtgactccctccagctccagaatagcctgcgagcgttgtcaagaaaagcccacgtccacagaacaacaacctcgctctccctctcccattctgcattctgggctcggcacccattactctcttcaaatttacaacccagtcctcaaaatgaagagtcctgtactctttagggtctctaggaacccagggttctacactggtgactgaaattagttttatcttctttaaaagaattttaaaaaaatttaagtaatatacatttacataatttgacagtagaatgtactatttaaagcttctaaaaaaaaaaaaaaaacacttttctttccctccataaatgctaaattaacactttcaattcttaaggtggtttaagaagaaaagtgtttaccttccatatttccacataaccatcctttataatatgtgtatactgcttttccaatcaggaatattctctgtcaacttccttatcatggaagatgaggagaaagtgcttttacattgactctgtcccaccactgtctcctccctatagtgacatcatagtttttgttaaatcaatattatacaatgtttatttttatgcctatgcaagtgttgttgggccaactgtaaaatattatgatacgtttttctttcattgtttttcttggagttaattttcttttttgtctgctcagttgttctgtatgtagagcaacaaactttcccatattcctcacagaactataaagcccctctcaatgtcctgttctctctgaggaggtgacatttgaactgagtcctgaataatgagggggacccagctgtgggaagatctgaggaagtgtgtgctaggcaggtgaaactgcaagagccaaggccttgagatgggcgagagcctggcttctttgaacaaaacaaacggagtgtgagtggctggagcatggtgagtaagggtggagtggtatatatgagatgcaactacagagacggtgcagcagagccttctgccacggtgttttatcttccagtttttgactgggcatgtggctgcccaggataaagatgacattttctagtttttcttataggtagatatagtcatatgactaaattctgacccatggcataaaaatgcaagtgtcgtatagatcttcaaagaatcttcttaataaacagtaggcatggaccccttgtcctttgtaattcttcttccaactctgctgtttgaatgtacataaagactggttctctggctgcttttttaggtcactggggtcaggtcctggggatggcagagtgtggcctggaaggagtttgtgccttgaggacctcatggttttattgtgtttttttttttgtttttctttgctggtcattccttgtggcatgcgggcacttcgttgcagagaataggcttctctagttgtggtgtgtgggtatagttgctctgctgcatgtgggatcttaggtccttaaccagggaacctgcatccccggtattggaaggcagattcttcaccactgaaccaccagggaagtccctctgagggaagtccctctgaggggttcttgaagctaactccagtaccagtctgttggtcttccttcagac

SEQ ID NO: 62422 - DNA, 2276 bp, Bovine  19866880981380
  misc_feature (1)..(1): n is a, c, g, or t
ntatggcaggggaaaaaaaccacacacacaattaaaatttcagtgtcggctgactctaaacactctgaacaaaagcagtatgtctttttatattctgtatggccagaagtagtggaaatagtcccattttacaggctaggagttgcttcatctttttcctaaaccttctaccatcatagttactgatctgctgttactcattcatgttgtgcttcaagctggaatttaacaactaaggaaatgttttgggctatgcaaaaataggtatctcttgttcaacgtctttttaaaagagagcagggggtttctggactcccctgtgcctatgacccaaggtttcattttctcactcttttatggaacacagagagaagtaaggcagattgtctccacatcccccacacaaagcagggtgttggcattacctagtgaatccagactgtagatgagtaagtaccagaggatgagtcccattttcattcatatagcccagactcccaactttccatttcatgacaggcagcttgagcatatagctccagttaggggcattctggatccaagatccacccaagactcttctttgggtagatgatctttacatattttactctaggagacatacaggaactggagccatggaatacgtggcatgacttgttttgcccacaggtttgattaaattcaacagatctgtcagaggagctccatggttcaacaccaggaatactttgcctgttagtcatcataaataagctcataaaattagacattttattccttaaggacccaaaaattcttatttctgaaatgtgctgttaccccacatattttgagaagccaaatcaatttcataaagatgacattaaaagaaacttcacaattgagaataatgataaaaaaggaaacatatatactctccatggcatatttagtatttaaaacccacatttaaaacatttatgagtgtctaaatatgacctttttattatttttactccactataagcagttctttctttcctttgaaaatgtatctcctttcattctaaaaatacaagacaaaacgtttttatcaatgatcatttattgcttaaccgtactacttattggagacaaaggttaattttaaaaatcaggctatgttgggatattaaactcttcctcctacatactctgtgaaaagaatctcacaatttcatttctaatccgttagacctatttactgcacttgtatgtatcattcacaaatatgaataagccagggccacagactctcagtaagaagacccattgctcaagaatatcaaagaataaaaatcacattctgatttcactattttgtccatgcacagcatatgcaggtaaggaaacaactccagcaacactttaacatgttgtccctcactgaggctaatatgtaccttgacctagagctgagtaaaatctatataaacataaaatccatatatacactcctatctgattctagacaagttaaactcgccccactcctttgagaaaggatgcaactttaggataagacccactggcaactgatagctgtttctaaggttatcctgagagcagctgcagagacaccgttttttaaatggtaaatactgcccctcacatacgcaattccagcctttgttggcaaattctgagtacaaaaggatttaccctccccaaacaaacaaacaacacagaaagccaaatcacaatccttatgctgcaagacaggccactccagtggtctgtgtaagaaagataatgcaattgacattttataccacttacacccctgaaacaggactgcgacgctcagatggtcagcccacagcttcacagcccccattgatttcgcctgggctctgcttttcttacaaaagaactctgcaaacagcttcttaatatttagcatgttttcctgatgagtcacggaagctaagcactaatgaggattattttttcaaaccaaggtgtcacaaatttggtccttctcaaaagtcctcctaacagaacccatcctgatcatttcctccaatccccgaacaatgtgcctttcttcccttcgaaatctgcccttaaaaccgctgccggtggtcatttttcccacttaacaaggagcaacacgaacagcgtttcctttaccttggctcccgaggctggtccgaggagagtggctttccttccgccctccgcgccgctgagtgcaggcgagctccggcgcagcccgcccagcccagccccgcagtagtaggagctgcccactg

SEQ ID NO: 62423 - DNA, 1384 bp, Bovine  19866881037991
  misc_feature (1)..(1): n is a, c, g, or t
ntggatgtctgtgcttgcatccatgccccaggactgtagtttaattcacctgaaatgtggcttgggcattggagttttagagatcctcaggtggggcttcccaggtggcactaggggtagagaatctgtctaccaatgtaggagacgtaagaggacatgagttcaatccctgggttgggaagatcctctggaggggcgcatggcaacccactccagtatcttgcttggagaatcccatggacagaggtgcctagcaggctacagtccatgggatcacaaagagttagacacaactgaagtgactttgcacgcaagtatgcacaggtaatgctatgtacagataatagcatctggaaatcactggtatcaacatcttctagcctccctacccctcctactcaatctggaagatacagttaatcatccaaactatacctcccatcttctgtatccttgcgtcagcgttcttccccagggaccctcaaacctgggtcagttcatttccccactgctcctaaataccagatatcaaatgtggctggagaaaactacatagccccctcattttctggctcatcctagctgtcctcattaactgatcttttaacttcaccttggttctctctagacatggagactagagataatcactagtaatccccaaacttcacattccaatttccctacgtaaactccagatgacctcacctccaacttcatcaagtaaaattgcttccatcaggcatgctctctttccattgtatactccactccacccaaataacacagttatctgtggccacttgctttttatcctttcagcttagatgacgtattcccactccaattcaaggtcaatgtctctacactcccacacaaatggccacacttcgctagcatttaccttgatagcaaggtgctctttccatatatcttcaaccatcccttctctgctagctctggaccccctgcttcaactcttaccctctccaggctctgactgtccctcttttctttcttctctctcatacttaaccccaggttccaattatcagctcttgctgttcactgatggctgattcagggcaaggagaaaattcttccaaatgtcttcagtaaaggtttttggatttggtatttagaattttttttttcttgtttttccacgtgaaaaggagactctgattgcactgtcaacaccacacttttctttatttctagaaattgacttctttgctcagtatgctagacactaatgagaaagctgtctcagaagcatatagcattatattaatgatactcttgcttccagcatgtatttaatattcgacaaaaggcaggcaaatagcttctgtcagcacaaggaaaaaacaacaaatccatc

SEQ ID NO: 62424 - DNA, 1565 bp, Bovine  19866881129752
  misc_feature (1)..(1): n is a, c, g, or t
ntgggtaaaggtaacaggccctgaaaaacagatgtctgttaggcaaaatatggagcagcctaatgttatcttttaaaactgttgctgagttttcgttgtatgttcatttaacaaatattaattggacacctatataccaggttctagacatttataggcaaataaaaaacagataaagcccctgtcctcatggagcttaaagtctagctggggaggcagaaaataaaaacacaactgtatgtgtgtgtgtatatatatttacaaattgtgatacagaaatcctcagaaggatggtaacagggtgccctgatatacaataggaagacaggtgagcattaggattttgagctcttagaatagtctcccttgaatggttcttagtatcttcttcctttcatcctatttgacaatgaaagataacaagaatgcctcaatagtgaatttttcctgtgttactgccaatgttgatctttcttaaccaagatacaatgaatttacagaggcctgatgaaacacaattgttggggtcatggaaacatgaaaggcaatgtggaatcttgaggagggcacctggctccttgttgttgttgtttagtcgcccattcgtgtccagctctttgtgaccccacggactgcagcacaccaggcctctgtgtcgctcaccatctcctggagtttgccccatttcatgtcaattgcagcagggacgccatccagccatcttatcctctgacaccctcttctccttctgccctcagtctttcccagcatcaggtgcttttccaatgagttggtcttcctagctccttaggaaaacctaaattctactaaggatcagggaggaggcagggagagaagagaacagtatgtacaaattgcattaggattggagtgatgttggttgtgctgtggactttgctgaattttctgtatgtccctaagttaagataagtctcctaacttcactgaatctcattctttcttctataaaatgagagaattaaaatgagataatttctgaagtccttttagatccaaagtcttgaaagactatataagtatagtatataatttagtacagactctgaaaccagattgtaagaatttaaataccagctctgtcacctactggctgtgagctcgaataaggttcttaacttctctgtgcattcatttccaaaaatggaagataatattagtacctaccgcacagcaggaggactcgatgaattaagaacttagagcagtgctgcctcatagtaagtgcttaataagagtgttgctattatcaatatcctctgaaagaaaattatctctaaaggatgagagtccaatagaggcagaatgctcaagacactggagcaaacatataaacagaaccgtgtgtaggttccaagattcacatttccactattcctatcacacctccctttgtttcagcatggtttaaaggggcaattgcttattgctggaagaagggctataaccatacaatgctctgttggatgcccatagggcctcttctttcttaggacacagaagataattaagtctctgggtatggg

SEQ ID NO: 62425 - DNA, 1657 bp, Bovine  19866881468334
  misc_feature (1)..(1): n is a, c, g, or t
nactgggggtgtcgagggtcccttcccaagggtggccttatcccttctgtggcctccagaatatccttggccgcctagagtaggcttaccatgagaagatctgaagagcatattcctttttaaggcttcgtgtttcctatccctttgtatcacagatcctgggagatttgggctaatgaacccattatctgttcataagcctcaggcatatataaattatactcccagcctctctgtgtttcttcgttagcatttcattcaaggacagaaaggaaagagaagccaaagaaagctgggatgggctctggggaaaggggcaaagagaggttttggagactgtgacactcagatgtatgaaacaacaagatatgctgctgttgagcaaaggcctgtgaaagaaagcttgtcctgagagtgcgagtcaagagagcacatgtgaaagcaaaggacagtaagacttcagtgaatctatttattcgtcactatattaggactctgggtttctaataatagaaacctaacccaagctggcttaagcagaaagaagggattgatgataaaaaatacaaggcgtctcagaatctgagagcagaagtgtagctgagtgagcatcaggagtcagaattgagaggccagcaggagctctgggtgctctgggatgtctctgcttctctcagcctctttcctttcctgggaggaatagatttctcagctgccctttgcatgtggtggacacaaaatggctgcccaaaactcccaggatcacacatcacactttcagctccatgaagaaagtctcaccgcctagagtggtacatttgctctaccaaggatgagccatctgcagcttcaatcaactaacgcttgaattacagcacattgcacaaacagggctcccaggaacccacccacccataagcatgggaagggtagttaaggagggggtgagaatcatcataagctgaaagggagccctttaatgcatggcattgttggcatcatgaataatatacatggtaagtgcaaaataaagccaaggccaggagcatgagtgaaatgattgcctcttaactaattgaatgctccttatattggcctcacatataaatgccaaagttatttctcatttctcccaaatggttccaatagacctttcaaactggcgttctccactgtctaaagaatatgctgtgcagattaccatctctctggttattctgaatccctcagtgagaacacccttccacttattcttttcctatttgttgttgttcaattgctcagtcatgcccgactctttgcaaccccgtggactgcagcatgccaggcttccctgtccttcaccatctcctggagcttgctcaaacttatgtctgttgagtcagtgatgccatccaaccatcttgtcttctgtcatccccttctcctcctgccttcaatctttcccagcatcagggtcttttctattcttttcctatttattgtagactaaatgtttgtgtcccttcccatattcatacattaaaatcctaacacccaatgtggcagaatttggagatggggcctttgggaagtgattaggggtcatgtaggcagagccctcaggaatggaattagtgcccatatagaggctcagcaagctccctttccctttcca

SEQ ID NO: 62426 - DNA, 690 bp, Bovine  19866880353862
  misc_feature (1)..(1): n is a, c, g, or t
nccggtaaaaaaaaaattacaatttgaagaacacgtgcggctcgcgacgtgaaaaccgctgccccacgtaaatagttaaacgtttcaaatgaacccccccccccagccctcttcccccagcttgcagcgggatgcacctggcgtttggaattccgaatggctgggcattcaaagggttaaaccggatcaggagggggccagttgcgggcagtggagccaagaaagggttaaaaatatcaacacgtttaccccccagtttggttcataaggggcagcaacaggagtgggagagccagggagccccctcaaggaatgactttttaaaattctagaacttttaattccgaccaaaaacaaaaaaaaagtgtcccagttcgaaagttcttttaacctcttctttttttcattttttttttttttttctcgatttctcccgggctggtttataaaagtcgccctgtccttttgggttcgaggaaccaggttccccccacccccgctcccctccaggcagggcgcggggcgggggcgccgagaggaccccggcagttttctcccggggccgggttgggacgcgcggctggtgagtcccggctccgggcccctgaattggggggtccgcgtctgccccaaacgccgctttcttccgttttccatgtcatttcctgtactaataagatggtggtcaaa

SEQ ID NO: 62427 - DNA, 1573 bp, Bovine  19866880367786
  misc_feature (1)..(1): n is a, c, g, or t
ntggtgctggttttctatttaaatctccccatccatttggcccagtctggcttctctttgccaggaacagtcggtctccaggctccagctctggagtgaggctgggtccttgggcattgcaggccaggagtctccagtcgtcacgcttggtgggcacagagagtctgcatggttcagagacccaggtctgaggtccggcctgccaccccctgccatggaacctggggcgcgtgactcttctgtctgagctccagctttttcctgtgcgacacagaatttgcaccaggggtcctaccttgttccctcaagaagtgccctgtagccacgtgatcaacaccacggcttgggaaggcatctgaaacaagactgggagactctctgggagcccaagacaggcaagggctgggacaaatgcctggggtcagagggcagaaagtggtaattacctatagtgattatcccagggcccgaaagtaatcactgtagacaagaggtctggacaaggtaggcctttgagactatgcctcagcctcttccctctgtgggctgagttgggcctgaaacacagaagtaaggatgaagaggagctccactcagatcccctgagaactagttgggggtcaggcggtacaaagggggttgacatgaatagggcacatgacacacactttcagggaccttaccatttgaccctctcagtaatccaaggcaattggcatcattgctgttattgcagacagggacaccatgctcagagaggttaagaaacttacccgaagccgcacagctagattcacagccagatgtgtctgactccattgctccatgctctccacccttggacgacattggtttgtcgtccttctccataagacaactttttagcctaacagttggtaaaatatttccctggtttctcctttgtgcatttcacacaataggagctgaccagaactgtgcgatgggatgtcaggctcttcatgatcaccccctacaaaaaatttaccaacaatcccagtcacttccaggtccctgtgaggacactgacatgttctaagtgaatgaagctcagatcttcagaaagaaaagccaatctgagacctttctcatctactactgatacccaagtaaaacatttatgcaacgagctgcgatttaaatgccccctggatcactagagattcacttccacatttgctgtgaagcaaggaccagtgtttattgcatcaatcgatgacccttctgaaagccttgagggagaaatttcattcaggatttagtgcctgtaaaaaacagaccaaagatcaactgcatttccctcgaggagctggcaagcatctcccttgctaacaagaagagctgcataactgatcaggtctccctttttacgcaggttgccaggaagctcagggccagattccacccccgtccccaacaactttggcagttgctccctcctcattcctcctttcccacttctaatcctactaactcagctttgttttctctgccttttattaaagattcccccccacctttaaggcaagaaataaatatttaaaataaatccaca

SEQ ID NO: 62428 - DNA, 3625 bp, Bovine  19866880400675
  misc_feature (1)..(1): n is a, c, g, or t
nggtgcagctcagctctgtgtcctctttgctccctggcctgaggctgccatatatccccagccgtccacccttccacaccagcctcctagagccagggggctgggaggatcgctgtgcccagtgcccgccatggccgttccctggagtgctgcttctaaacccagcccgagctttgccccgtgttgggagaatggagggcaactgcagtgtcctgggctccttctcccattctgtggttctttgggggttcccgatccccaaaagtgaacactcccctgtctgacagcctgatggcttgactatattgcctggcattgccccaccctctgatgctggaatcaaagattgccttcccaagtatttttgttaagatggcaataaaaagaattgatctcacacttggaacacacttggtctccagcatctttctttggtgtatattctctttcttcgcttcctgtgaaaacctcaaggcccccgaagcaagggttagatgaccaagggaaaacatgttggtgagaggggcttgagtgcccctggcattctccaggtcccatcagctctcagacgccctgtgttcagcacccttaaaggaaaggaaaggaattgataggctgagggaggcaaagcatccacataagaaattgttttcactgtgtttaatttctctgctcatcaaaagtgagatgttgctcaatgaattttaccttttgtctcctaaaagtgtgttaggggtcctgggggagaaagccccaccatttctggcaggaaactctggaagggtcaggggctgtccatttgctagggtacctcagagccccctctgagacactcattttttttgctcacctgcccattgatctgggtgtctgactggcacaggtaaagcccttctcacccagctctgaggcttctcatgaagtgacttcctctggctcccctggggagtttcttcagcaggaaagggaccccctgacctatgcattgccctggcttatttccagtcacagggagagattctcccaggcaggaaatgcccaggtcctgaccaaggatccatccactttctggaagattccagcctgtctttgatctcttggaatctaggtcctcctctaccatttttgaccaaaaaagcagggtcatggaaatgaagactatccaatctccaggagatgcaaagatgctgtgaaaccaggcctgggggtctttcccaccaaggtcaaggtgctaagcggtgactggctggcctctccctctggccctggggagagaagagggcatgtaggaagcagaagggacacagagatgcagagacttgtcgacttcagatggaaaggttttccgcttctttttcttggcttcagtgggaatgtggggctagcaagttaaacaggaaggagaaactggtgccagtggatggaaatgaatgagcagccagtttcagcttttagatggggacatcgctcctaagagtctgaggcgtccagccgtgccgagggagggctggctgggtggtgttctcttaaagtctaggtgaggatctagggggtgaatgcctaacccaaagaccttcccagcccagaatacagagcagaatacagagcccagcctctccttagtcattcctttcctatctctgcctcggggactgggctgcttcctttccatcatagacagagcccctgggtgggagagtctgagcctggccttcatctatccctgccgacaaaatagatgccctgtagattgttttctctcttgagttgaaactgatagttcatttcctgagccagttagaaaatatggtgcacttgataagactcagtgggtgaggtctgaaaagtgttgtcttagagcttatctagccaatacccaaagtcagcagagttgagagtaaaaacaatccattgtcatcatgaaagtttcagtccagaaccaccccaccaccatcaccaccaccaccacccacccccttgattgcttcaaagggtttgaaaaaccgtcaaataagccctagtgttcacagatcagcctatgctgtgcattttctatcatccttctgacatactctgtgcttccagccaacgaggtagtgactggaaacaacaaatagattttcactccctggaagccttcggttccaggaagggcccttgttcacctgcagccgtgtaatggaacaggcgtgcttctgcatacaggggttgttgagtggggacagagggattctaggcgtggatccagccgtttgggtgttaccgcaaaatacttaaaagtgggagacctggctagaaatagttgatgttgggacttagctggctccatttagctttacttcaaaaatgatttaacataaacatcttttcatgggaatggattgtttatgattcactgagagctcccatgtgtatcttatttcaaatgccaactttcagaatcaccaagtacaacaggatgctgaaccagttttgatctttgaagatactttgtgatctatacaaagttttggagtcctcttcctaaatattttaataatttatttaattgaaatatagttcatttacagtgttgtgttgatttctactgtacagcaaagtcatccagttatacctacatatgtgtgtgtatgtatagctatatatattctttttcatattctttgccattatggtttatcacaggatatcgattatagttccctgtgctaaacagtgggcttccctagtggctcagctggtaaagaatccgcctgcaatgcaggagaccggggttcgatccctaggttgggaagatcccctgaagaagggaaaggctcagtaggacctctcttcccctaagtattgattcttgttgggttcggaaagtgtgaagaggtagaaagggaaatggacttgaatctttctaaacctgacatcttcaccaggttgctctttggaataaatgcctaatcgtttcgtgttcctcatctacttttttctcttcaagttgaatgtcagagaaaataattctatcttttagagccggatagctatttagaaactggaaaaaggaaagattgtgtacttttccccttgggctctgtgattcaagtgattcttgttagaacaaaacatgaatgaatggtttgccttctgggtcagggagtggagaagtttgatctgcctcagttctgctctgtgctgaccactaggctgattaattttggatgtcagatcccaggcttttgctaaaatggggactgggaaaagagtttgcacatttagaagaaatctcacgtatgaagaaaaaatagactcctacagttggggagttgagattatatgtgaggggcgctatgcctggggtaccacagatgtggattcccaaagccgctggccaccatgactgtccccactgacagcctgtactggaattggcatttgtactggaattggcttttttagggggtgggggagagggattaacagtaataattgcttattgaggaagacttggaaagtacagaaaattataaagaagtagaaccatctataaaggctaatcactgttaaaacattggtgtatttcaagtggtttaccaggcttgtttttaaagcatattagaaccacaatacatcagtc

SEQ ID NO: 62429 - DNA, 2006 bp, Bovine  19866880518582
  misc_feature (1)..(1): n is a, c, g, or t
ngcaagaggcccgaagataaacactcgtaaagcccccctctcagaataaagagcccttcccgcccctcatttgtaaagacctcttcccctgatggctcagttggtaaagaagctgcctgcaatgcaagagaccccgtttcgggaagatccactggaaaaggcataggctaccccctccagtattcttgggcttcccttgtggctcagctgtaaagaattcgcctgcaatgagggagacctgggttcaatccctgggttgggaagaccccctggagaagggaacagctacccactccagaattacccattctggcctggaaaattccatggactacagtccatggggtcacaaagagtcggacacgactgagagactttcacttcacttcacttcatcatttattactgttgtagccacacgttctgagaaactcactcagaagaacaatgcagatggtggagggcccaaggcagagtctcctcttggccaagggccatgaccgacttttgtgaaaaccttgtataccttaagtgtactgctcaagcccacatccccaaattccttaaacctagcctggaaagtgttaaagggagatgcaatcaagttacagccatgattcttaatcggaagggtcagctggttatatactgtagcctacaccaatgggtgccatccagattacaaaggcgattgacctcataggggagtattacattctttttggtgacgggaaatcttggtatggaatctggtgtttatcagtccaggaggccagtttggctgtaggtatgttatccccatggctaccaggcacatagtccaaagctcactgcaagtgcaagacggagtttccttctttttcaagatggagtcagctcggcccattcctttccttcctcataacaaaacacttcaacatccttgccagaacccctgcagagagcccgaacctgtcatctgtattccctgtgtcacaattaggcccaggacactgcctgggagaccccccacccccgctccaacctccctggacccaccactcgccccatcgccctcctcgaggtggctggccatctttgtgttttgttcagtgtgaacagcagtccatccgggtctgtatctctctttgcctttctgtgtttctttctctcttaccccagcgacttacatctgccttttgtctctccaggcgcccacccttttgtgctgctcccctccccccacccctgtctctatctcctctctgtctctgggtctctcccttttcctttctcctgagctgtctgtcttgtctgcctttctctccataattagcctcgctcctagcttttactcacaagccccatggggggagagggggggcagcaagaccaggaggacgctgtcttcccagcaagcagaaaatgggccaattaaagccacaaggctgctcaggcagcagaaccaggaggaagcaaaaatagccccaggcgggcctagctggaaagataaacagagaaagagggagaaagggcagaatgaaggcagagtcccgagtccccgggattcttggctagaccagagatgggagggggcggccccttcccacccaaacccgggctgccggttgagcttaggctgccgcctgccccgcatcccggcctccttctccagcgctgctggaaccttcctcccgccgggaggcagcctcccagggcctcctcctgagtgcgactgtcccacttcacacttcccagtggtggcagccacggccggccttcgggatgccgggagctgggaggcgggaggcggatgcccggctgaggcctgtctcctgccctccatccccaggaaaagcagggcctgctctgcccggggctgcaaagctggggtcggagcggatgtagaatgaagaccacagtctgtcttctcaggggctcacaggtcagcgggggaggcgggtaaacaggcagcaatgacacattgcggtcatgtagggagtggccccacgtgtgcgtgtgtgcgt

SEQ ID NO: 62430 - DNA, 794 bp, Bovine  19866880592854
  misc_feature (1)..(1): n is a, c, g, or t
ncccctaatgagcaaagcaggactgattacaggagtatgcgttgataggcaagagcagtgtggcttagagaagctcagtaaccagtgtggggttgcccagctggaacctggcatgctcggccttgaggccaggtcagtctgctggtaaagcccgcgttgtcctgctgctgccgtgggacataagtgcccggaagcacaggagctgtggtcagcaggcgcctttcctggtggacaccgctgggggagagtatgctttcactccccatctgctgcgatctcttctttgcctccttttcctctctttcccaggctcagaaaattgataaacattgacagccactctcagctggaaccaggctgttccccagcacactctgtaattagtgtgcagtttgggacttgtgtggaatcacagccggggcccctgggaagaggcgcccaacatgtgggtttcttcagctggtaacccagcttcctcaggagacggagggcctccccctccaggcctctggagtgtttggtgctgcccgcaaagggtggcagtccaacaggtagaagtctcaggcacctagcctgcctctaccctttcccctagaagaaaacttacccattcattccacaaaggtcttgtccggtttccaccacgtgccaggcagtgtgcctgaagctgagagctcaggagatgaggacaaagacccaccctcgtgactcactcatctcgatcatcgcactcactgtagccgtcactgttccacaaatacactcctgcatgcgcttggacccctggcctgttt

SEQ ID NO: 62431 - DNA, 2344 bp, Bovine  19866880663478
  misc_feature (1)..(1): n is a, c, g, or t
natttacccaggggctgaaaggtaaacccaagcttggaccgccgtgtggtccagaggggccccagggctctcaggggagagcttggccctgggcggctttcttctcctgctcaccctgcaggccaagggagatcaaatccctggccacaacaggccccattgagagtcggcaaatctgcccaaggtatggggttacattaccaggttcctggccaccatcaccaagcagagggtcaggctgacctccttccctccccgcaggcctccatccagaaccgacagggccgagccaggcagaaatctgatcgtccgctgccttcccaggcagcagcctcctctgggaaatcagtggacagcgggctgaagctgttgcaaaggctggagccatcccaggcggcccacgggaacacgggccctctgccctcagaggtgggtctggagctaacacagacaagagagcccaggataataacattcttgggactgttaccagcatcgtgcacattatacgtgttagttcacttggtcctcatggaagtgctacacacgccgccgtgagctgtttcacaaaggatgaaactaggcacagagggggttaagtcaatttcccagaaacaccaggatctgaaccaaggcacttggattccaaagtttacttatcacaacagccaggaggagacactgaaaaacacaccttttgagtaagggtagaaaaacccaagtgtgaaagaggacagactccaggggccatggctgttgtttccagccctctggggactggcagagggcaaggcagcagattttctctctggctaaagaagagatgaaggaatagctggagatcctcagggagacatttggttctgggcaaagcctcagtggacagactttaaatattgcacagcaatttttaaaaaatgcaactggctcccataacccagcggcagcacaagaataaaattagaattaagctaaatgtacagcagtaagagaatggctagataaatgataatcctctccactgatacactactgtgttcagttcagttcagtctctcacttgtgtcccacgctttgcgaccccatggactgcagcacgccaggcctccctgtccatcaccaactcccagagcttgctcaaacccatgtccatcgagttggtgatgccatccaaccatctcatcctttgtcatccccttctcctcctgccttcaatctttcccagcatcggggtcttttccaacgatttactacttgttgatttacaatgatttacagtgatacactattgtgtatcagtttaaaaaaaaaaaagataaaagaaaaaaattatggtaagctcactacataaaactatgactagatccaaagttaaatgagaaaagcaatttgcagatgaaaccgcttgttgaaatgtacatacgtacatatgtatgtacatgcgtatacacatgctataatggtacatgttcccataggctctgtgtgcaacgtacagacggagatctagaccaaagtaataacagcgatgataagccctgcggaggaggttggaatgctacggttatcgaggaaaatcatgtttcactttttaaataatacttgatttttttatagcaaaaatttttctgtatattctttatataattgaaatttagtaaaacaacataataaaaatacaaggagatgtcttgggaacagtgagctactggtccctggacgtgtgcaagcccatgcattggggtggaaggatttaccacaaggatggaggggtccagcccttctgaacctcacagcctcaccagaggaggaggagaaaagcccttactgtccccgcactgtgaatgtttttaaagcagcacggaatctcaggccctggaggagggagaggccaggagttggggaccctcacagggacaccggtgtgtcagaggcccacaggccagcttccgagtccacctcctgccaccagctccccgcccgcccccccgttctccttgccccagtaatgccgtcccggcccctctgtcccaacaaccctcagcccccagccagcatgtctgggatcaggcttagactctcaggatcggggccatgtctttgggaagacctcacactggggggcaggaatgcaggaaggaaggaaaaactgacttacaggctgaacgcacctgactgtaaactgagcccagacaagggcccaggccaccaggccacacgaagagccctgcctaatccaacagcctgagccccagcccgcagagccctagtcctggtcaggcacctagctcctgacactaacaagccgagatcagtgccgctctcacttcaggacagctaccgg

SEQ ID NO: 62432 - DNA, 1282 bp, Bovine  19866880848108
  misc_feature (1)..(1): n is a, c, g, or t
nacctgcctcctgtggggactctcgcttattttttgccctcagtggagttgttgaaattccaaacaaactcttgcaggaatctcaatggagagactctgtaaagctgcagacggtggggggtgggggaggggcaggtggctggacatgctggatgcttcttggaggcttcagcaaagcgcagttcctgggagtgtctgtggcatgttagctcccaccgtatgcctggcctttgttgacatggttggtcgttctgtaggccaagccaagccctgctcagcattagtgcgtcacattattgatgtgatcacatcacatctctcaaccctgcaggggctggaagggattcttttccagagtaatgccttgcaacatcccgctgctccaggaacctgatcagtcaatgcagtggttttcaaactagaactctagggttctgtgcaaagatgcctgagggggtcacaggtgatgaactgagaggaagtcctggccctctgtcctgcccgtatcctgaatggcatctctttgatctgtttggtacgttgggtttgaatacgagctgtttggaaaatcacgattgtggcgaatgaaagaaactcatattgaaacacatgctggcgtaggatctctctatgccctcctcccttctgcagccctgatgggtaagtgatttccaggatgcctcctggatacaactccagggtgaccccagcctcagcgatagtgacggggccagagggcatccctaagtgaggctgccctcctgcctccccgattctgtttcaggagccgtctgcggggacaggagaggtccttctctccatcagctacctcccggccgccaaccgcctcctagtcgtgctgattaaggccaagaacctccactctaaccagtccaaggagctcctggggaagggtgagtgaggtgtgagaggggagccagggcccctctagggatgtgcacagatggaggtgacgcttgggaggcagtggggatgggtgagcagggccctggaactcagtacctttgtagagtcagcctcagctgtgtcctccacccccaagctcacaaaccagttctgaaggacaccctcacttccctaaagtcatgtccattaactcccgggccagtcctacccgttagcgcccaggggtcagcttcctagggctcccaccttgcagatccattgtgagaagaacagcctgatccacggttcacaggaagcccaggatcagactgtagccagggagtggagaatctggctgtaggggaagctggcccca

SEQ ID NO: 62433 - DNA, 813 bp, Bovine  19866880961016
  misc_feature (1)..(1): n is a, c, g, or t
naacatgatttgttttatattctatttgtgaattagggtgtgtttacagtgaaagaatgatttagatgatgacgactcagctggaaatagaaaggcataattgaatctccaagtctattaaagactcttgtcttgtgtcttatgggttgacattttattacagaggccaacttggctcttgctttcagtttcttttcttcccttttgtatctttcaaatattagattttcccttctcccaaccagaaattaaaaaaataaataaaataaagaaaacctccaaggagagccaggatgtctgaaaagagcaccctggggaggtggcatcacgtggcaggttggcacagggactctgggcattggcactgtgcctggcaccctgcactgatgcccagtcaattgttaccctcagaacctctgccatccccagccctgccaccaacttgctctgtttcctagggcaaatcaggtcaatcctggggtccccttgttcctcctaccaacggagttcttgacagctaatagctccggcgaagcccagaaaagcaccacaagaggcataaaggccaatgatcaaaataacccaccccgattcctttgtagaaggataatatgtcactggcgactgctctcagtaagtgggtcttttttttttttctctgaagaggctggaacctgttccccagggctgctaaatcgggccttgttctgcggtctgatctgctggcgacctgtgtccactttactgaaactggccggggggccctggcaccgtcaggccacgtgggccgccaaatcgcaagccctttctttt

SEQ ID NO: 62434 - DNA, 514 bp, Bovine  19866881045477
  misc_feature (1)..(1): n is a, c, g, or t
nccccctgtccccgcggacaagagctgggtgtgtttcttttcagccctctaaattatatacaacagccttactccacatgaaacaagcatctgagaaagaagagaggtttaacatttttctccctgaagtcccagcccatcccgggggtggtctaagcccctatcgcccaacaacaccccgtacaagacacgagcaacttttccaccggcaccgaccagcgctcaagacaatctgtattctccttgcagccacttgcctggggcgtgctggccttgaccggagaaaggtcatcggccgccaagtgcctgcagaggagactaccttggggattgcgggggtgggaggtgggaatggggggtacactccggagagatttcccgaagagtctacaccgcacctgggatgcgaaacgtgttaaaagaaatgccgccggcgcgaccatatttaccgggaaatcgtgcaccccgttggaaagagggccccccaccgtaccccggcaggactcatgcctcc

SEQ ID NO: 62435 - DNA, 1420 bp, Bovine  19866881103343
  misc_feature (1)..(1): n is a, c, g, or t
ntatctggcagatgttgtagacacctggcccggcatcccctgtgacctttcaccctgttcatgctggaagatgggagctgggaaacagtgttgggctttgatatgctttcctttccaatagccagtgcctgggacttctcggaggactgctctgtcctctaacccctagaactgctttgctgaaaggcaggaaaatgtacatccctgggaaattcctgggaatttacatcctccagcctctccctcagctgcagttaaccctccactgatgccttctggggtatgaaagccccagcatccttaccccggggcataacttaacaccccagaggtcccctgccgccaccagctgaagctatcctgcacaggacatcgcctgaagtcacgtacttgcacttgcatgcattcttcacctctccttcctgttttcacaacagcttcaccttcttgataaatcacttgcacaggaatcctcacgtcaggtctacccttggggctctggccacaaacaccccacctctggaatgtcatttgcaccccacctgcgaggctgaccttttgtatcagtgacaccagcagagcctctggagagggatctgaaggaacaagggccccataatctcttctgggtgcctctgaaatccccccatttgagagtcattcccttgaaatgtgtccctctctcctcttaaaatggagttgctcctgggagatcagctttattactggcattaatactgcttcttggagtgaagtttcccagtaaatcagaaacctttttgctgttgcagctgctttggtggcaccagttggctgggttcaacccgctgggcctggacaaaatgacgcaggcaggaattactgcctttgccacggcctgcctcattgtgcagagaacttgccccctcctggctccttcccccacccctttctgagggcttatctcagctgtacttggaggctaatccactcaaggtttaaaataatggcatgataacaacgcaaatgatgataaggtgttattattttcggcgagttattattttcagtgatgtttccttttaaatgggatttctggaacatcaaaaatgaccatgggacccaaggggaagcttgagtggtagaattcaggcactgtgatccccagataagagtagtttggaatcctgccctgtacccttcaattaccgtcggggcacatggggctgcatgtagagcttctttgcacaaattaggaaaagatgccccctctgcataagtgaatgagaaaagggtgcctcttgggggcagacacagctccaaggctactcagtttggagggcgagaaccggatttcggccccacttactcctgccgagtgcctttgtgcagcgcacacactgcctggccctacaagacggcaccaaggaccctctagtag

SEQ ID NO: 62436 - DNA, 1335 bp, Bovine  19866881157878
  misc_feature (1)..(1): n is a, c, g, or t
ncttcccagtgccccacgctgtcactcgggtaataggaggagagtcggttgggggccaggccctaggacttggagagctccagggatgtgtttcagatccatcagtttttttttttgtttttttttttttgagatttttctttttttgatgtgggccatttttaaaggcttattgaatttgttacacattacttgtttcatatttcagttttttggctgcaaggcacgtggcatcttagctccccgaacaggggtcaaacccactcctctgcactgaaaggtgaagacttagccactggaccgccagggaagtccccaactccacccttcttgtggaaggccagccacccaccagggcctcacatgtttggagtgaccaccaagtatcctttggcaacaaggaaacctagattctcagccatggatcttacgctctgagactttgtcaggggcgggactctacgtggttgctttatccagctcccagctataaatttttctgtggacgcatttgcttatctgcacagctcacgagcagcacatcaggtaccaccctgttgatgtgagtctaatcaaggctggactgagtggcaaacgtccaccttccagtctttgttggtcccacaaactttcagagcagcagttctcaactctggtaccaatgaaaattaactgggaaccttagaaaatactgatgccccagccttctgctctgtgggaaggctccagggggaggcattttcaaagctccccaaggttgagagcatcgctttagagaaacccactggaataggctgtggaccctctgagcacggcaggtgtgcctcatgcatacccactcacatcagcctaatccaccctatcaaagcccacgaaacacaaatcaaaatgtgcctgctggccagagaacgggtctttgccaaatgcagctgagccttgtggacttgtgtcctggggtgagttctaactgtgtcagtgccattgtgacttcagagtcaccctggcctggcattattcctctgccatctcacccatgatagccgaagccccactgagacttttattgtctgtgttatactgttgaacaggagccttagatgcttgtggtcatgattttgaaatattaaattacaccaagcactaggggctatgttttctgttacaagacaggttaattgctgctcttcatctttaattttgagatttaagccggtttctcagttagctctaattggtagtgtttcgacagccctccctgacctcacaagcctttgatatggtttagaaatccttttatgggagccctttttttcttgtgccctgcacatttaatag

SEQ ID NO: 62437 - DNA, 1957 bp, Bovine  19866881304561
  misc_feature (1)..(1): n is a, c, g, or t
natccactcctgacattcatacataaataaacacttattgggtgcctattagatccagcaaggattggcctccagactttgggtcacatccagagaccttcatatctgtagcttcattccctacccccttcttccttcatgcctctactatagagttgagattcaatttcccagtctcttttacagctagagatggctcatatatgtatctgacaatctggcagggggagttagggccagcattagtgggaggtggattgatctttcaaggaatcctggtaaagatttcaaaaagctttgaaatcctggtaaaaaattaaaaccacattagtacataggttaacttctactctctttctgccttaaatacagacatgacttctggagttgcagcagccatcttgtgaccatgcgacttcaaacataagaatgaaaaccaataagctaagaatgttcaagaagaaggatgataattctgggttcctgatggcattgctgagacctgaactaccactccaatcacctactaaaaggtgaaaagaacaagcccctatttgtttaggggctaaactttaggccagtagttctcaaggtgtggcacttgcttgaacagcagcatgggcattacataagaacttattaggaaaccaaaattttgccctgcttccatgattcggacctgctaaagcggaaactctgagcaaaatgaatttttacaagccctctgggtgattctgatgcatactgaagtttaggaaccattgacctaagcacctcattgatctggtactcatttacttgtatcagagagtaaatcccactgacactatctctctgagcttttgctcaaagacttttccctgcctagaatgcccaatttgcccttctcttctaggatttttcattaaatgaattaattttaataagagaaacccagaatggcagaaaattcagctgctgcagcttggcaaggtgcacgattatcttctggatttggtctcagccgtctcagagggctggatataagcgcaaagctataaaattgtgccatttaagaaaatgtctggttccagccggaaaacctagaattggagtttgtctctcttctttttacatgagaccagaaggagtgatcagcgtgctccaacatccttcctttcagctccacaagttcccccaggcctcctctcagtgaggcctcgatccgagcccacatggtccgtagtgggcagctcggatgctgggctgatggtccaaggaggcaaaggcagaagctgaaagaccttctgagacctaggctccaaaactcacacaacctcacgttggccagattctacactcacaggccaggctgtattcaaagggatggagaaacaggcttttcctctggccgggacattcagtgcctcacgttgcgaaggggccagtgtcctgggatgggaggaaggtatggccagtacaccacttaccacaggctcttccttgtctctcactctgctttaatcttatagacagcttcatgtttcctctgagacattattgcaaatccactcttggttccaatttttctgcgagtcagagattctttagttgcaaggaatagaaacgactcaaaatagctcaaggaagctgggaagagtacagatatcgtggaaatgaaatggatttggacctggcagaacccggagctgggaggaaccaagaaagtacctttttctagattactttgcttcctctcttctttatctatgtggtcttgcttctacaattctcccttttctgtctacataccctgcatccttgtggcttctttccttccctgtcattttggtctcagatacgcaagctagagtctgctggtctgtggaggagggaatgtgaaaggcagctggcaagtttgtggtgtccagactggccccaattccacagtctgttatagacccagaaccccagttaa

SEQ ID NO: 62438 - DNA, 1114 bp, Bovine  19866881305816
  misc_feature (1)..(1): n is a, c, g, or t
ntcgattctgtttccccaactcagattgatggaaggatgttgtaaactgccgctggctcgataatagcagcaaataacaggtggtacttactaagtacttcatacgtgctagacgtgttttctacagtgtcccatgtaatccttcccgttagcacctgctctgtgaatgtgtggtgagaattagatgaataatatacacgctaatggtagcatgtggattattctctccatcttacaagtatagaccctgagcagcagataaatatagtgactcactcatcagataaatacagtgctcagcagaggcagagccaggctcctaacccacgtctgtctcagtccagggtctaagctctaacctacagtgtcgtctggcctcctggacaaaaccagtttcttccctgcttcctcctcatctccttcctagctgttctaatgatacgctatgaaagagcaatttctcttagaagaagaaggttggagagaggtgggaaggtgagtttatgtatggatcatagcctggtgggtgggggtggtccgtccaggctccatttaaaggaatcatttgaaagtggttaaaatattcgccagctcctagccccttgcctcttttggtcatcctcagccacgccagcacaaatgggtgagcccaggtcatttttccaacgggaccttccttgaactaaaaccacatatccaaagacccagagtccatctggccctgggaaccaaacctacacccaggcctcactatatcatgtttctgaccaaccttcttattgtaaataaagcttcatttggactatgaagagaaatgataaaaaaggagtgagaaggacccattggaatgacgctatcttcaaaatcaaaacagagcaaagcaaattgtgaacactgagaacacagctgctacctgacttggtaaaaggtatctggtgattggatgggcagtgagaagagacccaatagatacgctcatctcttgtcttctttggagctgggtgttgggcacatatttgccagttacacttgggaaggcatgtttccatgacatgattgcaatgatttccatttgatctccggagatgccatgatgaaaatgtctggaacagat

SEQ ID NO: 62439 - DNA, 1020 bp, Bovine  19866881342367
  misc_feature (1)..(1): n is a, c, g, or t
nttttgttttgcccgtgagcctgtcgtccccatttctattcctttgatctctaaatggaaaacaaaattcaaggaacctgagcccatggcccatggagagaggcctggagggtagagatcaacagggcctgagccaaaatgcagcatcaggtggcaaatcagagaaggccagacccagaagagcctcgaggggccagatgggaaagtgatcactggaggtcaacagtgagccagaggccacactgggactcctgctccctcagtttccttacccataaaatgggtatattagtatcttcctcacctgttgctgaggagaagtaacacaggtaaagtgcctggcacatgttcccccggatggtacttgctgtgactgcttttgtattatctgttctgaattattatttttttaattggagaataatttcttgacagcattgtgttgtttctgccgtgtattaacctgaatcagccacaggtatacgtatgtcctctgttgtgagttaggtgttcccaacttgcctcatcttcctaccacactggttctcaaacttgaacatgcatcagagtcacccagaaggcttgttgaaaaaggggcccacccccagagctgctgattcagtaggtctgcagcaggaccaggaatcagcacttccaacaaggtcccagaaggtgctgatgctgctggttcggggaccacactcagagaaccactcttctactgcacccagcggcctaacgacatacctgacgttgatctgggaaggcgaacgcaaaagaagagagctggaagagctctagcaaagcttcttacgggacaacttagacccgggggagaagcgcctttgcaggggtttcgggtggaagaggaactggggaaggtgtcacaaaagaagtaatacttgagtggaacttgaagagccaggagaaatttgccaggctggcaagacaaggagcatccccagcagagggaacagcaggtgcagaggtaagaaggcaggagaaaatacagcacgtgtg

SEQ ID NO: 62440 - DNA, 719 bp, Bovine  19866881430156
  misc_feature (1)..(1): n is a, c, g, or t
nccagagctcagacccgcatctccaaggctgagacttgcccctcggggagaggttgagtcatccaggacagaaggcaggtctcctctgcgaccagacaacctgaaaccaaatcctagctcctgtaagtcagggaacctctctgagcctcagtgtccccatccgtaatatggagctactagtccctggcctgaccatctcccggaagccctgtgaagctgtcaaatatgggcatgcatggatgtggcagtgctttggcagtggttaaaacttgtgtgctgtcagaagggcttgttcctctgcaactggtaggctctgctcgccaaaaatcacagcgtttgtgaaatctgcaccaaccaagtacacgtggctgcagattttagcttgtctccttctgctgtggatgagggagtggcggggtggcgggggcgggggcggtcctggcaaagcctacaggcaatccgagctgatagagagtaacggaggcttttgtgggggaaggaagggttgatcatcaagcagcacaaataaataatgacaaaaaaatgttattttgagcatttcctctgtgccatacactttacatctgatatcttttccagtcctcatcccaaccctatggcaaaggaaccatgcttttttcagatgaggacattaaggctcagagtgactcagtaactacttgcagctcaccacagctgggatgggatcccagcgctgt

SEQ ID NO: 62441 - DNA, 1663 bp, Bovine  19866880399944
  misc_feature (1)..(1): n is a, c, g, or t
ngcaaaaaaaaaaaaaaagtgcaatgttttgtttggatcatagatcatagttcctaagttatggctagagatctggatttatgttcagggtaatgatgtaagatttctttctgaagcagaaacacttaagtatatttctcattttagaatgagctgacttaaatacaactactaagtccataataaaggctcacaatccaccacggtagaggaggggtcttctagcctgggtgagtgagcagcacagcagtaggctccccattgtcccccaggagtcctttgaactcaatagggaaaagtggcctccctaggagccacctgggacccttcaacaggctgccttcatctcgcacgcatgctgggggggagctgagtctccactctcttgatttgaaccgtgaaggagacacttgggctcgtgagggcttgtccccacggctttcctcgtctctccctctgcccttgggtttcccagagctatacagctccctctggactcaggctttcaaactatcaccttcattcccgcggcagcaatgaagttaaagaacaaacagtacctgtttactcacctcggggttctgatgtactttgctccattaataatttagtgaggtggactgaattggattgattccccccccaaatcaatatacaaaatgattactgtttcagggtacttctgagtggttcagcaaggcggagggggagctttttgattgaaaattgaaactgcactccttattcaaaattactgtggagagggttatgtaaaccaaggggatgacctggcactaacatttttattgcagtaaaaagccttttttttttttttgaatggggcttttatagcatactatcactgttccaggcctataatttgaaaattactgttcaatactgaaggtaaaattattttactgctgcaggtctattaaagttggaagaaccagcggcggcctggagagtgtctaggtagatgcactttgctgcactgagcccattgccagtgtgcctgcagatgcggcaggcggggtccctgggctgcacagggtggagcagggctctgctctgcgctttgtgaggttctgggagggtagggatgctgggaaacacattaaatccagagcagccacttaggctggccacctcaccccacggagtccaggtggaaatgttgtcacaacttggaattttgccagttttagtactttaaaaagtacctatttatttatctggctatgccagttcttagctgtggtacgaaggaccctcggtcttcattgtggcatgcagggttgttttttttttttaagttgtagcatgcaaactcttacttgtggcatgtgagatctagttctctgaccaggaattgaacccaggtccccagcattgggagcatggcgtcttagccactggaacactgggcaagtccttattttcagtattttttatttgtggtcaaatgcctattacacaaaatttaccgttttaagcacttttaagtgcacagttcagtggcattaagtacagtcatgttgttgtataaccatcaccactctccatctccagaactttcattttcccaaagggaaactcttgttcatcaatgaatccctgttggttcctcctccccgagtccctagcaacgacctttctactt

SEQ ID NO: 62442 - DNA, 2108 bp, Bovine  19866880479879
  misc_feature (1)..(1): n is a, c, g, or t
nctctataaattactcaaagtcacacaggtggactttctctccagttctctctggctccaaagctggtgcttttcctcctgcactgcgtctgcctctggactccccatctcttccttatcctataaagaggctggacttgatgaagggagggggcaggaaagaggcccttcaccaaaaaagctgatctgtgcccctcacccacccaggggcttactgccattgccatcagagccactgtgcccagggggttccctaccaaggttgggtttgcaccaaggcttctaatctctggggtctgagtccagagcggccctgatctcggtgaggtagcaaagactggtggcatgaagcaagatcttaattccctacccaggaattgaacctgtgtagtctgcctgaaatggagaaggcaatggcaccccactccagtactcttgcctggaaaaccccatggacagaggagcctggtaggctgcagtccatggggtcactaagagtctgacacgactgagggagttcactttcacttttcactttcatgcattggagaaggcagtggcaacccactccagtgtttttgcctggagaatcccagggataagagagcctggtgggcttgccgtctatggggtcacacagagtcagacacgactgaagtgacttagcagcagcagcagcctttctgagggcttcccaggtggctcagtggtaaagaatccaccatccaaggcaggagacacatgggttcaatccctgggtcaggaagatcccctggagaaggaaatagcaacccactccagtcttcttgcctggagaatcccatggattgaggagcctggcgagctacagtccatggggtcacaaagagtcggacaggactgagcgacttaaccacagcaacaacaagcctttctgagacctccaacccttgggcaggaattctgcttccagtcctcggaccagagttgggggaggccagaggagcacagtggtaggtggggacgctgactatgtggggagttaggagaggactgctgtccttctggccttaagaacttccaaaggaacgggttgcccctcacgcatcttgtcacttggatgctgctcgatggtggggaaggaaggtctttttcattgagcaccagtgacctgcaggtgcttttgtaagttctgcggctgctctgaggatggtcccacaccagcctgtccaagggacgagggggtaggaggctctggaggtccactggacttcaaccagattctctgactgtacacggtgaaaccggtacccaccatgaggccaccccgttcccagcctccctcctgccaaagagaatgggccgtgaggtcagggagggagaggctgaggcctaggggatgagaaggagggccgtcagaaggggcacggcactcatcccctctgggagggtgagagcccccagctcaggaagggagggggcgctgcggcccaggctggcgcacgggaagccccgccagggaccaggaggagggcttcctctcagtgtcttcatgccacaagatgtaaaataatcccctcggctcagaaaaacacattttatggccatgtgactcatttcccacaaagctgggttcaaccccctccccccgccaaccacgtgtagagcttttgttttgaaaaataaaaagatatgttgaaaatttcaagatgacttttagacataaattgttcccttcctcacccccgtcccagacccccctcacctaatttcccaaacactggctgccagagcctcgggagcatccggtccaagtgggtgtggggtgactctgggcaacatggcccccaggtccaggccagagaatgtctgctgggcatggagatgggccgaggggccctccagggaggtgggcctccctggcatctgctgcagtgccccgatccttctggttttggggtcccctgtgggccccaacacccactccaagccctgctatatctccaggcctgggcccctctccagagttcccgggacgcaggtaaggtctggctggttcctccccttcccgaatctctaggccaagggttactcccaggtgatctcagacacccagctgggactcgccc

SEQ ID NO: 62443 - DNA, 1867 bp, Bovine  19866880487024
  misc_feature (1)..(1): n is a, c, g, or t
nactcagactcacatccatagagtcagtgatgccatccagccatctcatcctctgtcgtccccttctcctcctgcccccaatccctcccagcatcagagtcttttccaatgagtcaactcttcacatgaagtggccaaagtactggagtttcagctttagcatcattccttccaaagaaatcccagggctgatctccttcagaatggactggttggatctccttgcagtccaatggactctcaagagtcttctccaacaccacagttcaaaagcatcaattcttcggcgcttagctttcttcacagtccaactctcatatccataatggatgttaaatggttaccaaaagttttttctgtatctattgatatgattataagggttttattcttcaatttgttattatggtataacacactgattgagtgatttgcagatattgaatctctggaataaatcccatttgatcatggcatatgatccttcttaatatgctgctggatttggtttgttaatattttgctgagaatttttgcatctatgttcatcaatgatactggctttactggcctgtaatttttttgtgcgtgtgatagctttgtctagttttgttatcagggtgattgtgatctctagaatgagttcagaagtgttccttcctcttacatgcataaatattgaagacattatgccaagtgaaattagccagtcaaggaaaaatactatacaatgctgtataaaggacaagtagtacacaattccattatatgaagtatctaaagtagtcaaatttatagatatgggaagtagaatggtggttaccaggagctaaggataagaagccaagaggaactattgtttaatggatatagagttccagttttgcaagagaaaacattccagagatctgtttcacagcattataaatatacttaacactactgaactgtacttttaaaaatgtacagttaagaggatacattaaatgatatgtgagttttttgtgctttattattcagtcgtgtccaactctttgtgaccccatggacccagcctgacaggctcctctgtccatggaatttttcaggcaagaacactggagtgggttaccatttcctactccaggggatcttgccaacccagggatgaaacctgtgtctcttgtgtctcttgcgttggcaggtggattctttatgaccgtgccacctgggaagccccgtgtgattttttaccataatataaacaaacaatactctttagtttaaaaaaaaaacaaaacagatgatgctgagctctcgagctaatagaggagatatgtattcattgatttcaatatctacatcttatctgctatgtgccaggcactttgcttaatgttggggttagatggtgattaagaaatgatctctgctctcaagagttttcagcccagatggagacagagagaaataaacagtgtgacatgggctccacatagtataggtgccaaggaaacacaaagtaagggagcttcctctgggcttggagtggtggtcaggaaagccttcccatcttctttcctgagtaatgaagtaatggagtaatgaaggtaagtatgcattagccatgcaaatgtgcagaaggaaagaataggtggaggcatagtgaggaagccagggacagtgagaagcatggtgtgaccagagtttagggttggagaaggctgaggagactgaaaatggcggcctcctgaaggagtttggatctcatcttgagatcagtaagaagccaggaaagctttttaaggaggggaatcatgtgttcaaattggcatcttaaaaggattattctggcagctacagtgagaaacagattgatgaggaacaa

SEQ ID NO: 62444 - DNA, 2170 bp, Bovine  19866880509737
  misc_feature (1)..(1): n is a, c, g, or t
ntcgagaccccaaaacatgggcccaccgtctctggcagggtagggggacacctgggggactggtgcccagcaagtgtctgaaaagggagggcctgtgtctcatctccctctaccccttgggcccatcatctgctccctgtcagccccagaggctcagatcctggtggccaacccctcaccagtgcagtccagcaaggccccttggggtgtggaatcctagtgctcccctcttggagccgagatcatcggggcatggctgagcagccccttgggagccagggtaacgccccacatggaggggccacagggcccagccctggccaccctctctgggtgcaggtcccaccctgtcctcctggctttgttcgtcccagggccgctggccttggctggcacatggcctgcccccagctccaccctcgtaaggtggggcagggagcattgccagcctaggttcttgtgctcagtttgagcacccggtgccgttgctctgtggaggcccagtgggcaaggcggccgcgccccagtgacagtgaggctcctggaggctgcttcctgagggcctgaggctccagcccttcagggcctccctgggggccaggcggctccgaagagcctgcagtcctcagaactcggtgcctggggacgctctccatggtgacctttgccccagaaacatggggccgggatgagtttgattagagcccagagtttggacatctgggcaaccacagagatgctcacctggtgctggtagccacagggccacagacccctgccggtttgccggtgaggctgtggcagctgcaccttcaccccagaaacctttgctccccacagcagctccaaggatgattcagccccccatgtgggggtgtgcaaggacgcccctcccccacccccacccgagcctccgtctggggctcaccgaggctgccccgcatcagctcttgggggcacgtgcttttctcctcctgatgccaaagattttactgggctcccagggacggcggagcctggtgggctgctgtctctggggtcgcacagagtcggacacgactgaagcgacttagcagcagcagcagcctggccctgggagcagacaccacgggagctgggcccctgcgggtgaccgtgggtgagaggagcctagcccctagggcacagtggagagagaggaggggtctcaagtccagagctgtgctaagagagccctgccggggggcagcctgggccacatcggtcttgcccctcgcctcaggctccctggcctcagccagtgcaagggctccctgtgtcccccgcaaccttgccctgggaagctctggccaagctgccagaggccacagcttattgcagcctccttctgagccccaggtgtctggtggcccgacatgcaccgcctggccgaccgcatccacttggaggagctgacccgcatcggcctcctgaccggcagcgtggacgccatggtccaggtccacctgggagccgtgttcatgcctcacgggctcggccacctgatgggcctcgacgtgcacgacgtgggaggctaccctgaggtcagtgtgggcgcgtcggccccagcggcctgcctgtgggctgaagctgggcctggccctcccagggtggggtggggctccgggacattgccgcagtgtagggggacaggcaggatgagaaggactgggctcttggcaaggcctgctgcccctcctcccccttcactcaggggttgatcctgacccaggtcactgccccgatcccccccacacccaagggccctggtccttacatgagggcgtctcccctggtggccacctccacagaacctggcgggcaatgggtgtgctctgcacagggcctggggccgcacactgggggcagcacctgccttgaaagtgtgcagtgcacggggtccccagagggccatgggagccccgaagctgggtctcagtgatgggctggcagtgcacccgtcatgtcctgcctctggcttcattcatcaggtgtgatgaggctcctcaggctggtggccagtccatcctgagacgagctgagcccagcgccccttgcaagtcctgccccaccctctcctggtacagcttctgtccccctagatgcctgggccaacagggcccccatggcctcctcgtctccaggaggcatg

SEQ ID NO: 62445 - DNA, 1832 bp, Bovine  19866880523110
  misc_feature (1)..(1): n is a, c, g, or t
nttcctcgcctgcgcgccttggggaaggccgtgcacacggctctcttggccgggagtgggagtttctgcctgtgtgtggttagggttgtgacagtgattaaacctccaagcaacttggccccagtgtctggcccggatggtggttacgacacccacggccagggcaggggcccctgaaatgagtggaggttactgtccttgggctaggctgcaggggtgggcataggccagagggtctccctgcccgcctaaggccccaacgccccagctccttggcctctgcagcccgtgggcacctctgagcccacaggcctggccaggaggattggggttcccccgagcctactcacactagggatactgcacagggatcacactgcagagaccgggtcatctgccctgcctgccctcccaccaccagcaagcaccgaatctcatcctctcttcccaaaacctctcctgaccccgacgcctccatgggcccccacctctcctggacccctgccggtctcctccccactcctcacccccgctgcctcctgtacacggctgggacaccaggccatctctttggagcacgggtcagaccaggccagttcccaccccgagaactgagccccaagctccttggcctggcttccctctccagcttcacccccacccactcctgaggtgcccctgtgccttccacctgccgttctctcggctgggacacctcatcttcccagtctcactcccctgcctcccgtggacctctgtgtcgaggctttctccaggaagccctccccgattgcctcttcctctgctgcccgagctaggcacggaatggtctctgaaacctgagaaggcggggccaatgccctgctccaagtctgacaaccacatggcctgaccgggagccccagcctccctgtggctctctcgcagccagtgctatgacttgatggacccaggattcacgtgtgcccccaaccccactcctctgtgcactcaggcccagggtagcaaggcagcatctgcattttgcattgtaccacctgccttttgggtcagagggacctgagtcctggtgcctaggccccactacgtatcccaagcagcctcaagtcaccgactggtctttgtgcccacctggccccatcggaccacaccttcccctgatgggccgggagcctgctgggcgtgctgcctggcctggctcctgggagcctcagcagcatccatcatggctttgaggcctcctgcccagagtgtgacagcccttgggggctctgaggcccggagccgagccgggaaggcaggcggagagccccttgagctacatcctcacagcccatccagacaaagagctcacttcatccgaagacaatggccctcgggggatgaccgcgcgccaggccctgggggtgcaggagggaaggctcagggccggggtcccagggcaggccccgtgggctgcagggaagcatctggcaggccacactggcgcggggcggagggcttccagcccaccccgccacacagccctgcctgctgccaagacctcgtgggacccactcaccctgcagaagggcaggggcagcacgcgcctgggcagccggcgccacgatgctgagttaagcatgaccgccccacgcggtccccgtgtggtcccccaccccaaaccctggcagagaggccagggagggcgggaactcacccactgccctttggccagcagaggggcctctctcaggccagagggggacacagggccttcaccaagcacagtcctggctgtgctggtttctgccctagggcgcccctgtctgcacggcatgctgtcccaccat

SEQ ID NO: 62446 - DNA, 1740 bp, Bovine  19866880563689
  misc_feature (1)..(1): n is a, c, g, or t
nggaagcctggtgagctgcagtccatggggtcgcaaagagtatatgcaactgagcaagtgaacaaaaacaacacccaccaaaatttaccagactcttcaacaagctctcccctggaagctgcatgttcaatcggatttcagagttccaaaatgattgcttcagaccactccaactaactcaacagttgtttggatggaagaacaggttcctgtagcattctaccctcccatcttcaatgacactacccaccccttcctgtttttaatcaccttaacctcccacccccagcttctagaactcacccccctgcctcccactgttatgcctgggcaatctgtgggtaatgggctcatgctcaccaaggccccgctccagtgcacctccagtgatactccttgctctgctcaatcagaatgccctcctccctctattttctgccctccaaagtttattgcaacccctcactgctactcttccctggtttgtctttgtccttgttggttcatatctttgaaaattgctttactttcacggtggcagagttgggacagggaagagaagatgcctgaggtcaagccactgtgttgtgtttgtttgtttaaagtattcatttatttaggtgggagttcagtagttgtggccccactgcgtgtgggatctcagctccccgactagggatctaaccctcatcgtctgctttggaaagcggattcttaacccctgggccactagggaagtcccaagccgctggtttttaataggatctcactccaggtttggctcctgctaaaccccttgttccagcgcaaggaagcactgttactatttgactgctactgtgtccctttgtgtactgactatcatggtcggaagacatggtggaataggaagtttgcaagggtttgtccaagtaatggcaagatagtcaaccctgggttgcatttagggaaagatgggtcaaagcggagattcctgggaatattacaggaggggatgctgaatcttaagcgtgccagtatacagtcttgctggattccaaagcaacctgctactttggctttgttctgagtctaatctgcccttgaactgaatgcatgaataacaggcacctctgatgctattcatatatgtataaacctctagttgagaaaaacgctcagtttgaacatacatactaaatttattcataaacatatccatcagcaaaagctcattcaaggagaataagcagggcttccctggtggctcagacggtaaagaatctgcctccagtgcaggagacccaggttcaatccctggctacccactccagtattcttgcctggagaagtccatgggcagaggagcctggtgggctacgtatagtccatgggatcacaaacagttgcacacgactgagtgaacagtaacactttcactttcactgatgctaggagggtgcctgagtctttagggtttaaggggagtaagaggcctctcctctgagcggggctcaggcccccacacacttgcccatatctaactgcaaacaggtagcaatatcctcacaggtgaagtgaaagtacctcctttttctgttctttggtgtttaatactgagtttcagccccgctcatgatcacagctgctgtcagaggacctacaggaaaatccgtttttattgaagctgaaaaggtcaattttcttggacgtctccatggtgaaagtaataaacgcagcacattcagacccagtgtatat

SEQ ID NO: 62447 - DNA, 2585 bp, Bovine  19866880565398
  misc_feature (1)..(1): n is a, c, g, or t
ntgggaggcctgcacccgtcatgactaccctgaaggcaagggagccggaccaggccaccagacaggctgaggcagccatcatcctgtgacccaactgtgtgtacagggtcggggacaggggctgtgaaaacaccccacacacgcaccacaccacacacgccatagcacacagcacacacacgtcagttcccacaccaggaagtgccatgtgcagagcctcagccccagacacagctccctcctccctacaaaccccaggccagccacactctctcacgttcaagccagaggtctcagccaggggtgggagcagaacacagccaggctgctgaggtcctaggaggggtcccccaacctggcccagagtcgctcaccctccaaccgtgctgaagcttccccagggtgccaatttcccacctgctcagaggaccccagacagcccgggggccaaaactgccatcagctgagctggattctgacggaaatgaaaggaaacactctcacatcaaaaaaaccaccagacttgtacaagcaaaaatgccaaataaaaacaaaatagaagctactgcattcccgtccccacaacggcctggggtgaggaacagcctgagcccccagcttccacgggcccctcacatctgaagccttgatgacaggacaggctgtttacacaggaagcggcaaatgtgaagacgggggtgctgtttccctgggcgacttcggattgcagtatctgccagcaggattttcaaaagccatcagagagagactcagaaggaagctgaggagctgaaggtcaaatgttcaggctggtgggttttgatcgaaaaggccaggtaatcccgccagcctcgctcccgccctattgatcaggagtgtcagatcagctctgcacatcagactaggccgctccccactccagccccagacagcccaccccttccactgccctgttcccaacatgctgccttctctcccgaaggcttgggacacgcagactagtagaaggtcacaccagagcagagagaggggaaggctggatggggtaggcacggaagggagccaggtctgccagagacaaggggctagctctctgctgcggagccagaatgcccctggggaccggcctgctccatctggcctgcccagaccaactaaagcctttccaacagggagatgcaccctgcagacccatctgtaccctccaaaatccgtaccacacagtcagttgccctggcaaagcagggacagattagagaagaacttttaacagcagttctgaaacacagccatggtcaaagtgcagaagatcatccctgtattactgaagactatgctctagaacaggcaaccgctaacggctgctccctgaccagtaaggtctggagttttaaaccctcatattaggacatccctggtggtccagtggttaagactcggcactttcacttcaggggacaagggttagatccctagtcggggaactagatcccacatgtcatgccaagcagccaaaacaaaaccccccaaatgccatttggctgtggggaggcagggtgagacctgctcagctgtttggaggatccccagggaagaagccacagcctggaggatgtccactccaccccatggacaggcactccctgacttctggcaagagtcagccctgtgtaagcagcatcagtggtcagaagtggtgacaccttcagagccccgccacgcctcctgatggaaactcactactgtccacacccacgtctcatggggctgcatctctgacactatgggcgtctcagcacacctggggccaggaggcagggccatggggaggctgagagggtaggcaggccaaggccacgggggccgcccaggcacaggggccccggacatgccactggcaggaagggctgaggctacagctctgtgatcacctcagggtgcagggagggctctgggagaatcttctcacccagactagatctaaactctcaccaggaaactcctgcagtcaccagggctttgtgacaagccaccctgacccacagtggagtaaaaaaccatgtatcgtgctcacagaccctgacggtcagggctcgggacagactttcaagagggctgaggctccagcgggtggtgctggctggcagccaggctctgggccctccacacaggtaagtctgggttcctcaccacatggcagctgggctcgaggagcaagagcctggtggaaactacagcataatttacagtctagcctcagaagtcacaggcttccctggtggctcagatggtaaagaatccacctgccacgcagaagacctgggttcaattcctgggttgggtagatcccctggagaagggaatggctacccactccagtactctcgcctgggaaatcccatggacagaggagtctggagggctacagtccatggggtcacaaaaagtcagatacaactgagcaactaacactcacttcactcagaagtcacacagtgacccaggcacgtttatgcattgaggctgtgacccagatcctgaccgagtcaggcaggagggacacgattccaactctccatagggaa

SEQ ID NO: 62448 - DNA, 3273 bp, Bovine  19866880575403
  misc_feature (1)..(1): n is a, c, g, or t
ntctctaagcatctaagtgccacagtgttgaacaaaaaccaatttgaaagggacaggaattccgtctctcccggagatggatgtgcagaggcaagttctgagggagccgtggacaggaattcaataccctgggacccccaggacattccttccctacgccgcgacccagggatgcaaagggtaaaatccgggaacaacaggagggaggcaaaggaaagagctggttggaattacatattctcaggaggctcgatcaatacgtcttctcagagaaaccagagccgcgaagaaagaaaacagtggttgagctcagctgtgagttgagagtgcctgagaactgaccggggccaggcagtcgtgggccacgtgcggggagggctgggaccagggcctgacgccccgacatcctgtgtccagccttctggcccacagtaagccaggttctccctctaacctcaggtccccactttccactctgctttctggctgacttagggctaaatgcctactcattgggaggcaaagacagcaatcctaccggaatactttccatatacacaccagagaatctaggtcatcatccacataccctttctaatctgggacatgttacccaggatgcagaatcctggtgcacgtcggccccaaaccgtccacacctcactgtctcctgggcagtagaaacagaagggtctccccactgcctgatgaatacgcacgggccacctctgctgggtgtccagcactggcacaggactcaagctagcgtggtatcacttaaaacccgagaaggtgcgtgacgatggctgacatgcctgctcttttgtgacgcttccagaggtgctgaactgaaacccacagcacggagctattagacagcacagaggcatctccttttatttcctcatccaccttcagatcaatttaatcatccgccgaacaggaaagtagaaccacagcctaaattatggaagtgagacgtctgctcttattaagtttcaacttttgacctccatgttcccactgtaatacccagcgcaaggaaagaaatgatcagttatgatctcgtgtttgtgggggaagaagagtatgattacagtggaatttacaagaaatcaaaaaggtactgctcgagtgaatggaaaacaataaaagcagtcacagaaaggaaatgaatgacacccaaagggaagggaagcttctcctgtgctaggagaggcctccaaatcagactggctctggaaaggatcccaaatccccaggccagctgccacctaggagctggggtgcgtgtgggtggcacggtgtggttcttccaaccccaccttaccctggcctcacatgagatctattccaggggctctgagcaggttgggtggcgaagaatgaaccagctgatagtggctgacactcaggcagcacccgcacaccacaagaggctcctcagagccacatggggcggcatctgagcctggagccactggcctgggcttagctcccggctttttcttgggcaaatcacttccctgtgcctcagtctgcccacctgcagcatggggatgatcagaatcctaccttataacacaaataaaatgtctcttcaaatgaggtgaggggtggcacacaggaagcctcaaaaggtgccagctggtggtccaggggttaggaattcaccttccaacgcgtcggacgtgggctcactccctggttggggagctaagatcccacatgtgcgtgttcagttgctcagtcgtgtctggctctgtgcaaccctatggactgtagcccaccaggctcctctgtccatggggtttcccaggcaagaatgctggagtgggttgccacttcctcctccacaggatcctcccaaatcagaggctgaacctgcatctcctgcattggcagacagattctttatcactgtgtcacctgggaagccataatccccactcgctgggaggcagctaaggccgggtgccacacaactacagagcctgtgggctgccctgaggacccagtgcagccccaaaaaagcgactgccgttgttattaggatgtgttgtcatttgacttctgccctcagtctttgagccattcaccaagggagaccgcatctactttgcagtggaggaaactgaggtgtggtgtgttatacactaaatgctgtgttcccctcaaatttataggttgaaacctatctccaatgtgatggtatttgggggtagcacctttgcggggtgctttaggtcatgagggtggaaccctcacgaatggggcttagcacccttaagacaccctagaggactcctttaccccttctgccacttggggacacaacatgaagatgccgtctgtgaaccacagtgggtccgtgccttggccttgaacctcccagtcttcagaactgggggaaataaactttggttgcttataagccactcggtctgtggtaattgttaggcagcatgcatcttcacatccaagctgtgagtcaggcattacatccccattttacagatgaagaagctgaggctcacaaaagttaagtgacttcccagggggcaagggggcatatagggggtggctggggatagaatttggatatgcctgactggacactttttccatcaacgcaggtaacttctctccatggagccgagagaaagagggtggtaaaagcagccaggacacagggcccgaagacacatcaatgagccataatttaacaccacggaaggccagtctctcctgtaaatgaggggcctaccagccatcccacccagagtccttccgtcagtaaccagagaggagggcgagggtggtgactcccaaagagcctgccaagaatgaccgcagtcactacagaggccggaacccacgctgctaaacacacccctgaggccgtaagcatggtgtgacatttctaaaatagttccatggccatcaaatgccaagtaagtcctctctgctgaaggctttaataagaccaggaagtagtttatcagtgcaggatctacctcagagcagtggaaatgtcactagaattaaagtgcgcttgttccaaaattacaaactaatgacttgtccctcgggagatgtgaggtgcacaacccagccctggcctccaaagcatccggagtgtcagcagctgtgggggatgtcatgtggaggagtggacacggttcctgggcatccaggatttattcttctaccagctgcgggttacagaagggccgggcatgttacttcataaaaacaagaagagatgggggg

SEQ ID NO: 62449 - DNA, 2875 bp, Bovine  19866880588613
  misc_feature (1)..(1): n is a, c, g, or t
nactgcagccccctcttcgctgggctccctgctctgcagcagtcccagggccctccctggcctttgaggctctttacagtcaggactctgtgtatctccaaccccatctccctctttcaccctgctggccacatgggccttcccacagcgtcctggtcagcgtccatctctctcactcattcacattctgcactggaaagctccctccatgcttagttacagctcttctttcagggctcagggggagagtcacctcctccaggaagtcctccagggccggcggtctagggcagattactctatcgtaaatctctggtttgcaaccacacggatatttcctctacctgttcatcagggcctagaatcacacatgcgttggtgacctgtttagtaatagggccggctggcatggcatgaatcggtgcgtgatgagtggatggtgatggagtttctgttccaccagatgacaaaacctgcaagaggagggaccactcttagtttggcctttcccagagcctgatccagcaacagacaccaaatacacgcttgtgtttggtcactgaatggagggcgacaaggaatctgacactgggagtatgggacacagcattctttagctttaggtttcaacattaacagttctaatttaggtcaaataaatgtcgttgaccaggcccagctctagccttgagttggcagggacagggtgtcttgctctcagtcaccagtagcaagaagtaccgatttcccaggagtgcgtgaccttcaaggtggggagtggaaatgctgggacccaggccccctgcctacagacactctctgacttccccaaaggtggctttcacgatggaattttgcttctcgctgtcaacccacccggattgcacacaggccgctccagcctgccagtggctgaggatgcatctgtggccagcaggtgcaggctggagcaccagatcacaaatgacaggtagttttgtacagggtaaaagtcacaactttttcccacggccaatttgtaagtctcatcttctgtcgccgtgatttaccgaccgcagggtcacacatcctccagctggaaggaaatgagacggcgtctcctgtgtcctctgctacctgagctaatgtggctctgtcctccagctgcctgaactcaagagtttcctctgcctttgggcagccttttcccaggagggagggaacacagctgctctgccgtcagacgagctttggcagtggctccaaagagctggggagcctactgtcaccacaccgttagcacgctcttgcctgcccccagcaaacatccccaggctcccagatactgtggccacatacacatccagacaatcattcttgatcgcttttttatgtctcgttgtcccgtgtcacagtcacattgatctccttgggccagcactacataaatttcctgtttataactcattaccttttgattagctgaaaggctgggtactggtttcacagtgtttactgactctaattgccagttattcacgaaaaagctaccataatcttttgtccattttcttgcccatatgttccctccaagctccatgtttctcccacatggttcccacacatgggtaaaccaggaaggtgtggcaggtatggctaagacaggtgtctgagactctaggccaggcagcaggcaagagatcgggcaccacaccttcccccatcattcccccaaagatcccaggtgcctactgtatgtgccttcaaccagatgcatcagctagcaatgaatacaactcgcatctgttcgatcggcacaaccacaaacagcctatccggccaccactgacaccaaccagagtgatgagcagagaagcagcctgcacggcatttccaatcaggagaatctgatgttccttctttagaaggtgaattctgagatgagcccaccaggcatattttcccaacaaccatatggcaaaaaaaagtagttactgaactttctcagacttattagctttcataaacagagatttgaataaatgtttaaaaaatgaaattcccttgatactctgtaatcagtatatgttcattatggaaacacagcaaatatgtatgaaatttcccaagtgatatctggctacaagattaaaaaggcatctccaactgcaggctgagttacagagcatacttctccggtcaccattcaggacaactctgcgaagcccaagaggtcagacaaggctgtttctttcctagctgaagcagggaaaatcagaagatgctcccttttgcctgctcaggcaatctgggaagtgagcccctccccccactgattgattgatgtctctctataaataattaatctttgaccttgctttaagaaagccttgactttttaatttggggtctttttaaaaatcaatacagggggaacataattcactctcacggagtctgattccaggtaaataaataaatatgctgtgccttccctctgtcccagggtgaatgggccaggcaatggatggggtcagactttgccgggggggggggggggtttcttatcaactgctattggagtatcgatcatcctatgaggtttaattctcttcagagtttgaatgttatccctcctttgggtcacttcacagaggcaagtctgaccaagtctttggaatgcgcttcacgccggccaagggctccccacaacacgtcctgccatatgcagtgggctgtctggattaaaacagggcctcctccagggaccagaatgtcacccttcctggtggcctgtctgccttgctttggggacaggagcagagggtggctaggagaggctatggcagctgggaaattttaaagagggctctgccactcttgcctggaggctgca

SEQ ID NO: 62450 - DNA, 967 bp, Bovine  19866880598767
  misc_feature (1)..(1): n is a, c, g, or t
nacagggaggaggagaggcagccgggaccagactggggctggaggtgcccaccaccctttcgtgggaggggcacccatcagatgctgatggccctctcatcagaccagatgctggcttcctgcaggcctgcctagctagacagaccctgggacagggccgtgcctggcagtgaactctcaacgtggactggctggacagacagacaacagctgggtgacggtagagaagctctctgtcctctgggctggcttccgggcccagggaggcccctgccacccaccacccggctcactccacagcactgagatcttgcccacggtttctgtctccggagcagcgggcgggcagccctgggacatgcctacacaaggttccctggcggccgcacgccaagccaacgccagagccaggccaagagcagaagtctcggggcctgcccaccgcccacgtccctcccagccttctgcgcctgctccagcgcaagaccgcgagacccagccctgaccccccagagcccagagtcctatccacacactagcccccccatgcacctcaggacaggtgtcttcccctgcaggtcccaccctcagcagctgtccaggggtctttgcaaatgtcagtctggtcctgttcctggcctggccccccaaaggtgctccaggcccttgtatctgctgccctcctccccacagcgtcctgttgggttcagggtggcaaggccgcctccctgtccccatacttgttactctgcccatctctctgggctgtctctaaagcagcttgctcctgccccggggttccctctgggtctctgctcggctggcccttctcctcactcaggttcaggctctgctgcctcccaccccagggaccccttcctgaagtaacccccagtctctgtccagggacacgctggccatgcccccactgggctagactcccaggaatggccctgtccgggcctca

SEQ ID NO: 62451 - DNA, 1558 bp, Bovine  19866880734064
  misc_feature (1)..(1): n is a, c, g, or t
ntgtgtgaaggaaggggatgaccatgacctcaggtaattaaacaaactctgaacaactgggaaactatttccactgcatgaaatgtatgcttagcagcaagacctccaggtggtctgtggcgtgtggccccaccctcccctccagccgaagttcaccttgggccaggaggacaagtccgctgacgatgataatgaccacgatcaccatcttggccgccgtgaacatgttctggacatagctccccagccgcacgctcagcgcgttcaccgtggagatgagcactgggaagtcagaggtgggcactgttctgtgtctatgggctcaacatcaccctcctgtcttaaggccctggaaagagcctcctttccattcccaggccccgttccccgccagcctcccctctccactgccatatccatgcacctttgaaatccagccagggctgtccaaccccctccccaaactccacctctaagagcaatggagatgcagccagactccagccaagcgctgccctgtggggtagcctacagccagccctccccgatggctctgatggccccgcagagcggagaccgaacgtcaaagaccatcaggcttgggaccaaggccagccctggccctgctccctgccggcgcctccaggcccacctggcctctttcttgggtgtgcaggagcccagtttctccaccccccagctgtgccaggtcttttctgccccctgcctggtgttcctcacaggtactcacagatggcagcggcagccagggatttaacgacaacttggggagggctgcagcctgagtagaagggcgcacaaacgtactcggagaagctgaggcagatgatggcaaaggatgagggctttatgacgaacaggctgctccaggaaaagaggtatgccggaatggggccaaaggcctccatcaggtaggggtactcgccccccgacttggtgatcatcgtgccaagctccgcgaagcacagggcgcctggaatacagagagaaaagggggccccgggccccttgtgaggtctcgccctggtcaagggaccccctctccccaatgggggttgtgctcccagggcccaccacggtgcccctcatcctgagctctggcctttggacattccgtaaaccccagtttacacacatctgcacaaaagcattgaggggttctgggcagcgacacaaccccacacagacagagctccaacatcctgccccacatgcaacaggggatcattgccagggtgggcatctttgttacccagtgtcgcaagaaccccacacatggtccatatgatgagacagggtcccacggcttccatgttcctgagcacagacttgggggagatgaagatcccagagccaatgatggtacccacgatgatgcaggtgccactgaacaggcccagctgggttgtagagcgggggagagaagagttagtgccgctgcagggtgcagctcagaaggccgcacgcagccctcttccttccatcctcctccccttccatgctgggtacagccaggcagcccagagtcccaggcacc

SEQ ID NO: 62452 - DNA, 1644 bp, Bovine  19866880737103
  misc_feature (1)..(1): n is a, c, g, or t
ncccaactcttatagccccatggactgtagcctgccaaattcctctgtccatgggatttcccaggtatgaatgctgaagtgggttaccatttccttctccaggagatcttcccgacccaggaattgaacctgggtctcctgcattgcaggcattgtactgtatgtatgttctatttcaataaatagggttaccaaaaagaaagaaatactaaacaactctacacaaggcaggctgctgcagtatctaggcaagaagactgctgcacgtctcttgtcctgagtggccctcgtaccttctaaatttataggcatctcgggagccacaggctgacacagtaagatgaccatttgtgtgcttctagaatgattcccttggccagtgacagggagaaaatgaaaagttaagtgtaatttgggtaagcaccacccgggctgtctactaaggccgggacctgaatattgagtctattagaagcaattataaaagggacagcattttttttaatgtttctcgtttgacaggaaggtttttaaatatgggacattagttaataaaaagtccccagaagcctattataatatattacctaattcctatcagttcgtagtcactgaaataggtaaaaagggaatgcaaaattaatatatagttattattaaaattgccttataaattagttaagtcccctggaggtaccaagtgggcatcattattctaagaccgtctgaagggcctccgtgtgccccgtgtgtgtgagtgtgagtgtgagtgtgtgtgtgtgtgtgtgtgtgtgtgtgtgtgtgtgtggagtgggaatgcccagccaggacaggagcactccgtctccgtactttaaggataaaacccctgctcaccctggaagaggcgagaactagcagccagaccacagacatttcatagagaaatctcttctctagttggtgaagtttctggggaggctggcactttgtggcctcaccaagcctgtcctatgcccgagcgaggaaagccgggagagacgaccagattcaagtgatagaagtggttggaagccacatacaagtgtttgtgtagctccctaatccctgggatcgaccagttgtctcagaactggggtgggaggtgtaggcccaaacaattcccttaaagtatcctcccccagcacaccctgcttgtggcaggccaggggaagggtctgatggcatgctcccggccacagcagcagctggtacagcagagagggaccaggggcctctgggagacgtgtgtgcatttgactcaggcagtcgggggaccatctccaggctacaacgtgcagggagccccagcttcccacctttgccgtgcagcagtgtgttgcattggggatttagaagctatgaatggaaatccattcgactctgagctacttgctgaattcaagtgctctttccaggggcattaggtgaacgtcaggtcttccctggtggctcggacagtaaagaatctgcctgcaatgcaggagacgcaggttcaatccttgggtcaggaagatcccctggaggagggcatggcaacccactccagtattcttgtctggagaattccatggacagaggaacctggcaggctgcaatccataggattgcaaagagtctgacacg

SEQ ID NO: 62453 - DNA, 1191 bp, Bovine  19866880780979
  misc_feature (1)..(1): n is a, c, g, or t
nttgctctgggatggggctaggatgctttgatagtgaatttgtatctttcctatgtctctgcttgcgtcaaatcctccatccacagaaaggcatttgggggagggtgaggggcagggggtgtcctgagaagggagacagcgagagacttgcagagaaacaagaaagacctttcgaaggcgaggcaccggtggtttacttcatttgaagaagagtaaagccctgcccttcctgccatcgtaggaaggaacagaaggaatactgccttggccccggcacggacgcggccctgtgtcggtggaaggtctgtgggtgcttggaagttgagcttcgtggctgagcaatgccagggtttctgctcacccttgacctgctccatgagtggcctcctgcttcctccccactccccattttctcccaggaaatcgacagctctctgagaggagactggcaggttcctgcctgggaaggtgggggcgggagacctgggagtggcagacgctcctcagcagtcccagtggctcatcacaggtgtcagggccaaaccccgtattcacagattcccaggagatccaggagataagggtgacatggcgacactgctcaaccatcaggaggcatctggtgccaaggggtacctcccatctccttctgcccttgctccttccctggaggctggctcccccgaacagcgctctcaggggaccctgggctccagtgacctactgtggggctgaggtccctgtcacccctcataggagaggcagccagacatagtggacttggcccatggccgggtcttggtcaaaactgctgcctccaagaaaccttccctgggggcctctgctccactttgaacttccccttattgccctgtcgcccttgaagcgcatctcgggtccacaggactgttcgtgcctccccaatcccaccccccggcatacagtaggcatccaataaatacgtggggtgtgttctcatgccagactcttgaagtaagtcttcatgaaggctgcagtcaggaggggaaccatgagggccccttcaggaagcagtgggtggtaaggaccagctctccgtggggggcccctctgccttggcacagggcacatgccaggcaggttcaccccatgctcccctctccccccaagtgggttgctctgtctactggggaccctactgggggcctcatg

SEQ ID NO: 62454 - DNA, 713 bp, Bovine  19866880842295
  misc_feature (1)..(1): n is a, c, g, or t
nctttgtgatgacttttgtgatccaaccttgccctcccagatgagacctgtccaggggttactcagttcaggggctctgataggcctaggagtggggaaggagcaatccacaaagccagcccctgggccccaggcagcatcccctcactgagtccatcctcgtccccaggggtacaagaagcagatggcactgaagctggacgacatgaatcatcatctgacagagcagcaggaggactttgctagcaagtcagctcagtaccagcaggagatgaggcacctccatcggatgctcctggacaagcaggacatcctggacaaggcgctgcagcagaaaaggtctggccgccccagcccctgggtggtttgtggtttttgaatgtttggtaagatttttccagtaacatgctctggacctgttttttgttcatttgattgcttatttttgtttttacattttagttttgtctgattttaatgttggtcttgatattttaaaatactcttttatctgtggctgcaccgggtcttggttgcggtgcatgggcttctcgcccttgttatggaacgcaggcttgagggctcagtagtgtggcacacgggcctagctgccttgcagcaggtggggtctttccagaccagggatcaaacctgtgcgtctccttgactgccaggtggaatcttaaccactggaccactagggaaatcctgac

SEQ ID NO: 62455 - DNA, 1629 bp, Bovine  19866880854767
  misc_feature (1)..(1): n is a, c, g, or t
ntcttctctatccagccatcagtgcagaagaagagcaagaggcagccagaggatgatctcagacctgaagactagagggaagaagccagctcagcacccacagcagcagggcaataaggaacaggtgggcagcaagcaggcaagggaggagggatgacccctgggggacagggaggggagcaggtgaatggaggctggccctgtgaggggtttgggaagtgagtgtgtgtttaaaaatgggtgtttgtccagggaaaccagggcacctcaaagtctttgagggaaatcaatacagagcgagtcttgacagagagccttctggtcctttgaccccaaactgtaccacagagcccaaaccctagtgccgagaagtctatctggaccccgttcccaagccttgctttggtcctctgggctttctgctgccctcattatctttattggagcaagcatgaaagcactgagtgttcctagcttctgggaccccaaggtacaaggatgatggggagcaagagatggaccctgattttctgctcaagcccagcccttgattcctggctggggactttggctgttggcaaatgggtatcaggtggtgatgaaggtgatgggctcctgggtgggcaggaccactccacccacacccgatgatgttcacaacctcatctggcagtgccaacacttcacccgggcgaggcagaaacacagatctacctttagcaacagagggtacagagttttccaaggcatccaaagcaaaccttagactccaaataaggtgggagatcactcaccctggcaagctgcttgttctgatttcagggaccatgaaccctgcttcaagggttcttcaggctctgagggacttccctggtggctcaatggttaagaatcccccttctagtgcggggcatgcaggttcgattcccgggtggggaactaagatcccacacgccacagggcaactaagcctgcatgacacagctattgagctcgcatgctctggagcctgcacgctgcaactagagagaagctcaactagagagaaacctgcatgccgcaaggaaagattccacatggcaatgcatccaaagaaataaatctttttttaaaagaaggagggctctgaagttgcagcatcctctttccgtgccagaccgtagcttttgagcagtgcccccacccaaatctgcttggcttgttgctcacagtgggcgtgaagatccaatccaagtctgatctgggctttttctgtgcgctcacatttcctgggaggagagcctattggaaatgggcagagagggagcattttaattaacagagctggtctgaaacatgaggctgatgcaacttcgctccatgccaaggctgatcacagtttaacatcgggagaagaaagcaatgaaggaaatagatcagatgaggcaatatcgggagtttatgaatcctgtgcattttcttatggcttcccaggaatggcttttaaactggctgtcacccatgcacaaattatggcctcaaccagggaggatggggaggccgacaagacatacacccgtgcgtaggacacaggcactcaccagctcataattctttcttgtgctgcaaaagtggagagcactgtgatag

SEQ ID NO: 62456 - DNA, 1980 bp, Bovine  19866880859561
  misc_feature (1)..(1): n is a, c, g, or t
naacactgggatatatggatctttttgaattagagttttctcctcttctgaatatatgcccagtagtgggattgctggacgacataataactagcttttagtttttttaaggaccctccacaccattttccacagtggctacaccgatttacacttccaccagcagggttccctttcctccacaccctctccagggtttatttgtgatcagtcgctgtggtcacgtgcaggtcctacgagtgacaggccaccagttcacattctaaaacacgtgatgtgactgtaggggctgagcagaggtggacaaagcaaattctaactggccctctctccttgggatatgcaaaaagaccccataagctgcacagaaccatgtttttaaagcactgagaaaagaatacaagaccctccttttcaactcaaaacttagaggaaagggaagtctttgaatttttgttcatttttctactacacatcagcctgatattaagtttctaatttctgctgaaaagtagataaggttataaattaactctaccgagaagtttttaatttttaaactcccttgacatcacagaattaaaaagttaagtagaactatttccatgtctgcaaactggttactgtctattcattttacaaagtagaaagcaaatataagtgttttctaacccctcaatatattacattcattttaaactatgcaaaacatgagtttcttcatgttttaaaactattttttaaaaaaacattcaatagtaaagtgtacaatgacagaaaaaacaaaaaccaaaaaaaaaaagaaagaaaacaaactagaccatggaaaagaacacttaacagaagctttttcccccacaaatcacaaaagttgttttgaaattatggtagaaattctatttaaaaagaaaatccatttttaaaaaaacaattcttacctttaatttcagaacagaatgttttccatctgatgaaaacagagagagagaactttgtaaagcggagaaagacatctgacagctctgaagagtacaatcttaggcactcaccttctgcacacgagctgaaccagcccacggaccggcccagctctgaaactgcgctctcccccctgctcgttcctgaccgccttcagtggctcacacgactgcagagctcaggccgagctcctccgtgtgcctgggagctgcctgcctcccagcacccttgcccgcgccctccaccattccacctgccattccccacgggggcgaaggtgccactctccctgcctcctctgcctccagcagcagtccacttgctcagatgctggtacctcgaccaaaggatggcagtgtccaagcttcttggctgggtactgctagggtacagggtggctggcacctcaggctggtagccttgagacagtaaccatcagctggcatttatggaggatgttttgcttcgtgtgcctgcgtgcatgcttaactgttcagttaggtctgactctctgtgatcctgtgcactgtagcctgttatgctcctgtaggcaagaatactggagtgggttgccatgcccttgtccaggggattttcccaacccagggactgaacctgggtttcctgcattggcaggcggattctttactggctgagccaccagggaagccctgctgtgcttcactcacatgactgaatttaatccttctaagactcttaggagaggtgcactcaaacttagaagtggggttaaggaactggccaagtctcacgccacctgaaagtgacaatgtccaggagcttttaatgcccaccacaagccaaaaaccactctaggaacttcactctctcctaaccaccacctgtgctccaagttcatgttaccaagtgtgccagttaacactgcctttaacttccaaccccacctttactgcctgctcctgttactgcagcagctctcctttgtctggtggtgcaataataaacctcaccagtagaggg

SEQ ID NO: 62457 - DNA, 2063 bp, Bovine  19866880862268
  misc_feature (1)..(1): n is a, c, g, or t
naagtgacttagcagcagcagcagcacattggagaagtataagggtgggactcctagaaagacagacggacagcaaactgtactaccacccccagctccccatcttgacgctcatgagaaataaataagtccatcctcaaaaggaccccaggaagactctgttcccagatatctttgctgagagccctaaagacccattcccccatcccactccttgttcagaggaggaaatggagacccagagggaggcagaactgctctgggttccactgagggtgtctacaacccagacctacagacccctagtcctgcactgggctctaccagtgacttgaggtgccccaaacctctgtgcctttccacccctcagttgtcctcatctgcaaaatgggcgcattgggtcagaaggttgtagatacaccttctggcttcgatacctagagacttaggacccagccctccaagcctccgggaaatccagagtcccctcccttcctgtgctcttaccactcagcacctttttaaaaatcacctctgtcaattacaaaaggcatcccccaccggccttttaacctatttcaaacagcacagaagttatagggtagaagctagaagtgtctcccaccccagtccatctccaccaggagcccagggtctgtgcaaatgcaagcctgccctcaactatctctctaagcccttcttcctgcagagtcaaggaggggagcctggaatggctgagcctggggaaagccctgagcccagcccagcgatccagcacaccccagcccctgcccacaccagcccctggctgcacagccctctcctcccacgtctgtcccctgctcggagcccagggacaggggctcattatcccatcccgtctgccttggatgccgcagagtgacagctgttccacgtttaattactgatgggctgcggctatgccaacccatgaataaaattacagttgttctgcaatgcaaataccgcggcgctggtctgtgaggtgcttactttgattggctggcttttttaatgagaaaagttttattacattttaaagaacattagtaatgatgaaactcgcacacctaaagatttatatagcgccgcaaacaaggagcagggagaaaggatgttatttataacttcaaatactgctcctgctgtctgattgcattgtttttggaaacagggcatttttagctgataattgttttaatgataaatgtggaaactcaagaaccaaaatatatgtagtatctttaaaaggcaaaaacctcagctaagatctgggtgaagtgaccttacttaggggagagtgggagggcttacctagtggctcagcggtaaagaatctgcatacaatgcaggaaatgcaggttcaatctctgtgtcagaaagagcccctggagggggaaatggcaacccactccagtattcttgcctggagaagtccatgggcagaggagcctggagggctacagtccatggggtcactaagagttggatgggactgagtgatttagcagcagcagcagggtagggcgtgaagggaggggagcttgactttaccagggcatgtgaggataagatgttatgggacttcccttgtggtccagtggttaaaaatccatacgtggaatgcaggggacgtagtttcgatccccggtcagggaactaagatcccacatgaggcagggcttggcccccaaacaaaaagaagatgacgtccagactttgggctttgagagaagtttgtcatttgcaggagtccactgggcacaggttcagcctatggaagtgggaacagactgacctccttctgttggagccgccaccaggggatatctgtcctctgctgtggaggaacgtttcccttcagggtgactgaggtatctgagccacagctgggtgatagtacaaagttttgggtcaaggatctggattcatacaggtttgaacacagaccatctgattctacttccctttcacctagagaacggagtttccccggggaaggcgggcatttgcagatggatgaacctgggagatggcactta

SEQ ID NO: 62458 - DNA, 912 bp, Bovine  19866880899298
  misc_feature (1)..(1): n is a, c, g, or t
naaacaaaaacaaaagtgtgaaatgtatttcctcagggccacagatctcgtttggtggctcagtggtaaagaattcacctgtcaatgaaggagatgcaggttcgatccctgggttgggaagatcccctggagaaggaaatggcaacccactccaggattctcgcctgggaaatcccatgaacagagaagcctggaaggctactgtccatggggtcacaaagagttggacacgactgagcgattaaaacaacaaacaacaacacaaatctcatttaattgcaacctttgatttgtttcaggagacccccttaggaagagtgtcaccagccttcccaggacctgggtatcaagtcatttcctaagtggtccctcagggcatcctccacccaaagggctccatcgtctatcaccacccagtacctgtggcttttacagacaaggttccccaggtaccaggacccgggagtggtgaaattctgcatgaaatgctgcatgggaaacactgcatgaaatattgtatgagattcaggcctaagtccccagagactgtttacgagtaaaaggggagggcgatttagttgggttttgataaacacttcatatagcacatcctaagaggagcagaatccttgtcaagcatgcatctttatgagctgcccgcctataaaccttgcacgaaaggtccatgcttaatgttggtttggcagtaaattggcgcgatgcatgggtctgctgcatcaaattagcatcaacccataaaacgttactgaacgattcctcaaatctgccaagtcttcaaatcaatttggagaaagcgtcaaaggttttttttttttttaactttgataaacttttcatattagttatcacagaagagcataaacctttctaatctgtcttttcacaaaaaaa

SEQ ID NO: 62459 - DNA, 1464 bp, Bovine  19866880997705
  misc_feature (1)..(1): n is a, c, g, or t
nttttgtctctcctcttctgtctccaggggggcacccagaggaggaactgagcctagaacttgggctcaggcccctcggccactccacccagctctcatcttcatgctgctccctgccctgctcccttgctccagccagagcatcttgccctttgtcctggaactgccagcacccgttggggccactagcctggcctcctcccccagcctctgcagcccctgctcctcccccaggaggttggccagcgggctggaccgtggggaggccgcagagcctggacacgtgtcctggccccaggcagaagccgagcgctggccacagagccacactggccaggcccagctctgtcccctgaggctccccgagcaagtggagggcaaggctcctgcctaggcagtggaccccccactccactccaggttgggaaactgagcccagctggtgaaacaagatgtgtggtgacccccagcagaatcgaggtcagccagcgatggccctgtcgcccctctcagtgggatctcagggaagagcttttcctggaaggggcagtgagaaagaaggaccctctctcagctgtggatctttccaggttgggagctgactagcggatctccttcgggaggatagggaggagcatcttccagcctgggcagtcactgtcctggaggcccttattgtgatcagtgctgtcattcagtccagagactgctggcacccaccgccaggaagcccacctgggctgaaccagaagtgggaggaccccagatcaactggccttcttcctcactaagcacctggaccaggatttgtcctcatcatgttcgttaggctagaagttgcaggaacagggctgggccctctgctctgggaagatcttagcagtcatctcccattcttgggcctcaagaatgggctggtcactcagagccagggctgcattagagatgccccgacctgacatctcagaatacagggcaaggcccagcttctgatcactgatgggctggagtttgagcaggaccctagctgggaagccctcagtcctggctgggcccggagctgcaggttgctatggcagatgagcctggaaaatgtcaggagataccagcagctggaggaagggcaggtgggggtggtgatcagtgtctactatggctgcctgggtttgcatctgactctgctttcccatccaggagtgtgttgtgcctctataacgctgctgcctggcacaaacttagccttcaatccatggagccattagttctgttcaggtcaacatgctcagagggctggaaaattcgtcatttctgcagacctggccaagacctgtctccaggcaaagggaaaaactcctgactagatctcttctttcgggccccagtgtcctcaaggcacaaacaagcagttgtgtatatacacacacacactcatacacacacacacacacacacacacacacacac

SEQ ID NO: 62460 - DNA, 1236 bp, Bovine  19866881154889
  misc_feature (1)..(1): n is a, c, g, or t
ncagggtccctgttccagggagctagcaccctggctggggagacagatgttgcaggtaaatgggacaatggtgttgggatggatgatgccatggaggtgggcacggtagtgcaggaagccccacaaagggcccattcgcagtgagtctctacactggcacaggaggtggtgggagagaagcctactgcggggtgcagctggggtcatcacccccaggccagagctagactccccatttcctgctcatatgttccgtgtgtaatgtccgaaacatccaagtgtgtaatttcaaagtgatgttagcatgactagccttggcttttatttcatgagattgcctttgttctcttccagacgggccaagaagtgggacagtgcagctattcagtacttccagaacatcctgaaaggtaaggcaagtgcatgaccgcagctgcctgctttgaactgacacccaagggggtttcaccttcagttggggaaagggtttgacacgtgtgtgctttgctgtttgacctcctcccctcagggggattcataagtcacatggagctttttccactccaagtatcacagtgactttgtacccttggaatctgagggatggatgtggacatcagtaattgacaagagaaatcagcaaggaattgtgtaggtgaggcacccttacacggtgataacgcctctttcttagtctgtgtaaaaccgcagcactgcaaaataatttacatgcatttcattgaaccggcaatgatgaaaagcctattttttagcaggcaaagggtagtcagtgggtacctactgtgcggtccccgtccttgctaatgaagatgtatagaatgtctcagcacctgtttggtgtgctctctgtttaaatcgttggccgtaaattagactcttctgtggcatctgtcctaagccctggcagtctgagccaagtaactgggcagcgtctagggtcatgctgaggagtagtgggtgtgcagtggctgggctgcatcctgatgcccgttggggccctggcccctcttcttcactgccctgctgtctgggtgaaggagcagccagaggcattgttgctggagaaatgggaggtgggggcacctctggttttgtagtttgggcccttgtgagcccacaggggccctagagactcagacttggaggaggcagagtgtttgggttgggtaccgttctgctgcctctgagcagccttctgagagcctggtctcctcg

SEQ ID NO: 62461 - DNA, 716 bp, Bovine  19866881159778
  misc_feature (1)..(1): n is a, c, g, or t
nccgttgaagcactaggagtgttttcgatgccttagaaatagaaaactttcgtctgacaaaagctaggaaggaataaagtccattctatagctgttagatctgcctctcaggaaaaagtacttgttctttttgttcctggctttcctcagtttgtgagataactctatttttttaaatataattttatttctttcaatggatttgaaataaaaaaaaaaaaactttggaataatgcctgtatttcattgtgggtttctttgttagatgccaagaaagtaatccaagtttgttcgccagctctgaggagcaggcagatggatgcctgcagcctctatgtgctcagcccaaggcaggggtgaggcgggtgtgggggcacgcagaggcgcttttgtcccgtctctgctgtgctcagttgtgtccaactcttcgcaactccatggactgtagccctccaggcactgtccatgggattttccaggcaagaatactagagtggattaccatttccttctgtgggggatcttcctgacccaaggctcaaacccatgtctcttggatctcctgcattggcaggcaggagtttttactgttcagcaaccacgtctaggcttcccttaatgacgggaacacagttgtctctgaatttagagtgcctcttctgttacgttctctgtcacctaatgtaagtagtatataccagaacagagggagcaga

SEQ ID NO: 62462 - DNA, 1833 bp, Bovine  19866881161166
  misc_feature (1)..(1): n is a, c, g, or t
ncgcctacaatccccaagtgcctgctcgcactctgctctgctgcagcagtcgacagacccgctccacgctgacgaatgtagacccttcagtcgccgtaacaacacacccagggccgacaagcacggctccggttccttctaatgagccgccccctcctcaaggagggcctggggagtgtcagtgactcatcgtgctgtggtgcgtgcagctccggggccgggcttcagtcattctcagagcagttactgagcaaacaaggagggcctggggagatggagcatcggtgggaggggtgggttggtacacatccggggctcatcaaaaccttgacaaagtgtggggcttgtcagacagcagttaccctaaatcaattttttttaagaaagccatttttttaaggtaatttattttaaagaaataaagactctataccagggatgtccatcgtcatgatttataataatcattaggaataatgtaagtgcccacagaggaatgagtaaataaactatgccagctctgttaagagactaggacatggcgcaactctgtgctctgctgtcttttaactggtgaacctgggcagatgaagtcttaaggtttttattttattttactgtttattttggggcttcccaggtggctcagtggtaaagcatccacgtgtcaatgcaagagatgtgggaagagatgcggaaagagatgtgggtttgatcctggggtcgggaagatccctgcagaaggaaatggcaacccactcaagtatccttgcctgggaaatcccagaggagcctggcgggctacagtccatggggtcacagagtcggagtctactgagcaactgagcatgtgtgcacacagtgtttctttatttggctgcatcagatcttggttgcagcacacaggatcctcaccgcgtcatgcagagttcactgcggtgcacggaccctctggttgtggtgcgagggccctggagtacgcaggcccagtagttatggcgcgtgggcttgttgctctgcggcatgtgggatcttagtttcctgaccagggattgagcccacatcccctgcatttcaaggcaggttctggggccaccaggaagtccccctgaagctttttcactggtgaaacctgaatttgcagcactagtttcacgggaggttacatgagatgagtctgcagtgactgacgcaggccatgatcaaggtctccctggacgtttaccatccccctcagtagtgactggtaaaaatggcatgcttgaagaatatttaatgacaggaaataaacgaagcgcgtaacttcatatgatccaaatgtcattacagatctgtttttatgtgcataggtaaaaagtctcaggggatgggtttgtaggtgtattttatcttttttatagttttcagtatcttccaggttttctctgggagcctctcagtattaaaaagcatgtatattacatatgtcaaagcttatcaaaacatgagcttcaaataatgtgcagcatagaatatgtcagtgatggctccataatgcagttgaaacaacaaacaaatccctctaactctcaccctgtgtcagagtgtcagagtttagggtgggagcatggggagggggctcaaatacagtgggagctgccgtggccaagatgcagagtggactgaggggtggagccaggagaggaagcaggtggtctcaccagagtggcaggcacccttggatgtcatggcagatgcagtgtgatgggcatgttgccaggggaatgagggctgttagggggcagtagaggagggagtgaaccaacctgcctgggagagggcagggacccaagt

SEQ ID NO: 62463 - DNA, 749 bp, Bovine  19866881289966
  misc_feature (1)..(1): n is a, c, g, or t
ntcctagcggcggattccttaggttgacatgttgccctctcttgtcatcctctcttgagagaatgtccctaagccaagcgagtgctcccagcacccagatccttcagcttgagagaaagactatgagcagaggctctcagggagcgcgtggcaggtgattggaagattgcttgttgctgctgccctttcctctgagatgtatgccagctgcgaaacagcccaatatcatgtgtacaggcagcctgcaggtgacaggagtctctccctagcacaaagcaggtagtcctggaaaataagaagagggacagcctgcaattacagtcatcagctatttttggttaaggaataaacaaaatggcccaaagtgctgctgttatggattctagcaaaggagtggcgtgtaggaaagattaatgtacaattaaaatccatgtatgggtaaattacagggtgacagctatctaatgcaaacactgcagacgtgtaattaagaggagttacaggctctcgagggtggatttgctgaggaaagtgttagggagctgtcggtggagctggaagggcagggaggcttgctgggacggggggccatgcaggtagtgaagaggagcgcccccccacagcatctagggggcagcctgggatgtgatgacccccagatctttcaggcggcacagctgcccctccacggtccactggtttcctgttccaagcttccagcccttttctggagccattctgctctcccc

SEQ ID NO: 62464 - DNA, 904 bp, Bovine  19866881344589
  misc_feature (1)..(1): n is a, c, g, or t
ntcccggtggagagatgcatgctgccaggtgctgtggggctcctggacactcaaaaatgccacttgttcaggactgcctggagaagggcaagacctgctgctgtttctccatctctgctgtggccacccacaaggtttcaagcacacgttgcctttgccaggagggtctgagaaaatcttgagactaacactgcatctgggagattctgagagtgcctgtcctcagacaagtacacattgtaacagagcttagtgaccaccttgccttccagctctgtgggctcagacctatggctcttctagaaggtagtttttctagtctggttaagaaatcgccacttgagtgtcctctttgagtcacgtttctaagctcatcttatgatatattcccctcctccccaatcagggaagtctcagggtgcccctcctttcccaatggcatgctcccagtggcatctgataaatatttctagagtgttcctgtggaaatattttgttcagttcaaagcgatcctttcttttcaaaaatctccaaacccagttcttaatacgaagcattaaatttagaatagcattcaagttttcatccttttttaaaaaacgcctttagctatctcaggaactcagataatacttaagccccacttccttaccacataatggaaagagatgaagtgatccatgacttttgtggtaagggcacacaagctgatgatgctagagatgaaattctgccctcagagaccccactgcctctctcagatcccacagagccctgcatgagctgagtaacctacagccactctactccggggagccaccagtaggcacaagaaaggaagctgagttgtgccagtctgggcgacgccaggagtcctagagaatccgcaagctctcccaatca

SEQ ID NO: 62465 - DNA, 1684 bp, Bovine  19866881473217
  misc_feature (1)..(1): n is a, c, g, or t
ncttccttccaacctgatggatatctactccaagtttatcttcgtaatgaatatttcacaatttcccttgataatttatcatgttgcctattttttcttccagttgacaagtggcagttcactataatttgcaccacacttagcattaatagtgttactggccatctatactattgcctatctactggtctaaagtgaagtgtttactcaatttttaagaacttgtttaacacctctcctgggattatctcaacaatcaatgattatgttcatcttatttatcttctatataccaactgggttgttagtctttaaagctaatccctaatgaactcagagataacaataatctaaagaagtagagaccaggaaccaagtcgattctcatcctggctcgcacatccccgtcccactctggacacacccttccctctctgggcctccgtttccccctctgcaaaggagggatgtaaaatgccctctgacactgacactctaccatgaactccagtcaccaaaaacacttattacaggctccaaacttagtgaagttcatgcccgcttttgttctcaaagacaccagaacaaggaagggcactttcacctctgtctgactcatcttgccaaggtactgaactcagcagacaaggttttgaaaatgagtccttggcttgtaaaacaaacaggaatcatcaaactggtaaaatatgtaagaaagggaaactgggagattaaaaaaaaaaggagttatttttatttccccaaccaaagacaagccaagaaagcagtgctcaaggtgaagagttatccaccatggaaagggggtcaaagagctaactggggctaagacttactccaaacagattgccaattttattttttacactgagtaaaacagctaccttgaaatgctacatacagtttacagttctgcagtttacactgttatctgtgcttttgtttctttcacaaacatttaacgagcacctacaaaggaaaataagcttatttcaaatctggatgttcaaccctaaacgagaaagtctggctcctacgtggacaaatgcagttccaaagttcagtccacaggaagcagggcggcaccttgcttccttgctgtgaatccctctggcaggaggcagaaggaaaactgaaacgcagcagttcccaaaagcacggtccctgaaccagcggcatcagcatccccttggcagacatgcaaatgctcaggctgccccagacgcaggcaccagcagtctcagaacagggctaagcgctcgtcttgacaggagccgcaagcgactctggtgacactgacgtttcacagccactgccacaaaccaaccacagatcttcagaaagatggactgagtgggtaccatttttaaattcaaatttcttaaatcaagtgacattcattcaaatcagggatacactgaaaactcaaaatgttagaatgagtacagcaaaatcaaaattttctcaagtttcacttgggacaataaatgtctcaagcattttcctagccctcttgtcatttttttccatatatatacaatgagatattcctcctctcctccttcccaaataaatgtttaatttcaatatccccaatgaagatctacactccaaaatatccagatatttgtcccttgttccaaatctgttcaaatcattggtatta

SEQ ID NO: 62466 - DNA, 1232 bp, Bovine  19866881512445
  misc_feature (1)..(1): n is a, c, g, or t
ngcatggctcctcccgcggccgcaaagagtggtgctgagtcctgactgcccccgagccccaaaactgaagcacaggggccctctgttcccccaggtacatcagggctttccattaccccacaggcaccctggggctcggcctcccggctccctcttcctctgccattcctttaatttcccaacgaccttgagccgtgggcatcagtatctccatgtctcaggcaggaaacagagccccagacagcacgtgacccttgtcagctgaggaaaacctgagggcagacgagtgggcagcctcatggttcctgctgactcccagatagccgaggaagtgcaccagggtcggaagggcagggctgggtggaaggcccctggtttctggcatgtggcacagatatacctagagaacacccaccccgagagccagcctcccgtctttgccgggcaactagcgcattcaaggccctcgacacagcactcgggtggccacccacaccttcctgatcttcccagagggtggcctctggaagcttcctaagggtctccaaaggatgggcagcagcctgtagccaggcaggggcacccaccagcctgagcttccattgaacctgtagcccaagccgggcaggaacccgccactcttgggccgagcaactcagcccatgggctcaggctcctcagattcaggacgagacagagccactcattccctagcctctgcagcaagcctccttggggcccacgactgtgggccagagtgcacccagagcacactccccccaagagctgcccgcttctcatccattgtagcccacagtccacagtggggtgccaccagagttcatggttctccagggctctgggtccccacccaagagcaggaagcagccgtgggaagcagcagggggctggagtgtcttaccgtcaacggctcggcggagaagaccctggggttaaccaggggcaggcatggggggagtgtggactggggtcgtccaggctgacttgggccctgagcatcaggggaagggccagaggcgacctggacttccttaaccacaagaaaatgactcagctaaattgaggaagatttccgtttcggaaacactactttttccactatggtaagagtttttacccacaggctccagaggagctgataccccagagaggggcttagggagtttcgatttgaatagtcaatgctgattcttaatcattatttgaaaaag

SEQ ID NO: 62467 - DNA, 1777 bp, Bovine  19866881591484
  misc_feature (1)..(1): n is a, c, g, or t
naaggtcaaggtcccaaagggcaataatgttacaatgcggtttacaaaggcaggaggggcacactcaccaaaggagaggatctaagcatgggcgtctccccctgctctgacagcagtgcaagtcaggggcagccccttccgactgcctggactgcggacagactcagagccccggagtcaggggcagccccttccgactgcctggactgcggacagactcagagccccgggaggacagctgcatccctatcctggccacacactactggccaagcacagtgggaaaagattaaagctgcagggagttccctggtggcctagtggtgaggattccacgctttcactgccgtgacccgggttccatccttagttgggaaactaagatcccgcaaactgtgtgacacagccaataaataaataaaagtatagccagggcacctccaagtccatcccacaccacaggcctctcgcagcctggggcttttctgacagcagcatctgcagctgatgagggcctgcgagagggcctcctgacacgtgaaggcccagccgagcctgagagatagcctcctccgagcagctcagcagccacctcccaggtaccagacgcttccggcactgctaagggagctggtggctggaccatgctgtcccgcgatgtcaagccaggctgcggcagggggagtggtcgccactactgacctcgtctgtgtattggacatcatccacggcgtacttctccttgaagtgctccttggagtggatcctcaaaagaagcacaaggaaggccagggtcagggtttggccctggctgggccccggctgccttcccacccccagtctagggcccattcctaccctatccagcacttggcaccaagccagcccgcccaacacagactcggggaaggggggcaaaggacaatgggccacagagagaccgctgaaccccgcctgcctccctccacctctcccagccgacctctgctcttcctttgagtctgtgaccctcaccgcttgcagcaagtagctgaggacgaccctccctccgccctccagggagagtccatggggcagcccgccagcacaccctactctttggggagtgaaataagccgcctcccaggcccccacggagcctctttaaaagaaagtttaaaaatcaaaaattaacattttaaagaagtcaataacagtattactcactgtgatgagaaacactcaagcttcctcatcgtccctaaaaagtcagctggtgaggagacaaagacccagagcggaggcggctcagtcgcccccacccacctcacggccacgcgtgtgctgaccgtggtcacggctgtgctgggcagggctggcgggtccagcaagcaccaccccaccccccagcctcttgtgggaaaatgaatcaatgtcactgctggtgacacagctcacatcaggagcatcagccacccaggagaaagggtgtcccagccaagtctagtctcacacacacacactgccctgtgccatcccatgcctgggcactgcatcagctcagagggttcacccttctcctgcctgcgatgtggggtactctagtcaccaagtgtcagatccaaaggaggcctcagaggaagcagcagatggcttttagagtgtttcctgggctctcaaggatgagcagacaggcaggggggcggtgccaaggacagcgtgcctgggaggataaggcacgggggataagggagagagggcacttggagacaaccacctctgagagcaagccccacat

SEQ ID NO: 62468 - DNA, 782 bp, Bovine  19866881593665
  misc_feature (1)..(1): n is a, c, g, or t
natgatgaatgggtgtccctgcagagcagagcaaccacaagaacctgatcccaggacgagtcacactgaggaggacgaggaccaggccacctggcagcagagagggtgagtcagaaacagagtagcatcgacacacatgccccaccaggtgtaaaacagacggctagtgggggctgctgtgtaaagcagggcgctcagctccgtgctctgtgatgacctggcggggtgggatggcgggatgggaggcaggctcagtgggaaggacatcctgtatgcttatagctgattcacagcaatagcagaatctaacacaacattgtaaagcaattatcctccaattaacaataaaaaaaaagaaacaaactatctgtctgccagccaggtcactttcccactttgctaagagagctcaggcttagaagccacagggaggcaggatcaagggttgggcatttccccttctgcctctggagcccagcttcaagatccagataacaatgcagacagtagtgctgcatggctcctagtgggacccggggttgaaggaccctcaagtggggctggcatcatcaaggtttcttctgctatggcaagaggacactctagcatcacctcttcttttagatccaggctccttccacctctccccagccaggatcagatcaaatcagccagcgagtcagtaagtctccaccaagcccctctgagagccaagataggagtctagccacagggagacccgggtcagaggagagaagaggcacagtgtctaggagaaggag

SEQ ID NO: 62469 - DNA, 782 bp, Bovine  19866881669982
  misc_feature (1)..(1): n is a, c, g, or t
nggaacttttcctgcctggagtgggttgggggcgggagccagccggagccgggatcaggatgcgcggcaggaggcagttgctagaatgactcctgtctcccctttgtgtcttctcggacccagcagggcaggcctcagcagcccagggtgatgtgtctggggagggccgagggacccatccagccctgccagagcttttctgtccacctttccagggccttgtgtgcgggagaggggaagcaaggggttaaatcctctagccacatggctcctttatttaccatgatgaaggagggaggccattatctaagcccggggtcattgggggacaccctatggtgtcgtcagtgaaggctctgtaatcccagaaggtttgttgaagccactgaaatgacaaagtaaaaaaaagaagcctgttcactttagggtgcactctcctctgcccccaagaatctaggagctggggtcaggcccctgccttagctgcgtgagcagatctcagtaagcttcatggcccctagagtgcccactccccaatctgtcagtgtggtcccgtgctcctgagtgcctggcttcccctggggtgcaaggcaaggcacagaccctttggcctcccccaaggccctccccgcccagcagagcctgggtgtcctgccagggggcagctggctctcttcttcaccagacccctgggctacagggctgacccctgtagagatgttctctgcttcccttggcatcgttgatgttggggaagggggcaccctgaacctcaggaagtt

SEQ ID NO: 62470 - DNA, 1110 bp, Bovine  19866881854240
  misc_feature (1)..(1): n is a, c, g, or t
nattcttagtctttgagccctcaggttggaaggagccagcctgttctgagaaatccagggacagtaatgctggactagtaaaaatcaagaatgtggtggtcaaccctggagccagctcagaaaagccatctttgtcccacaggacacccaggggatatctgccaggctccatatgacctcaacttcaaaaggactcagctggctctagggtacaagcattcctccccttcctccctcctcttcctaacctttcatcactcaccacacattgcccaaatacctcctctgtgccaggcacttttgccagctgggaacacaaaggcaagtcctctgggggcagcacagggagagggattccctggaaggaagccagccctccttgccattctctcctcctctggagtctatggattgccatttgcaacttggcagcagctgcaccctgccaggggccagggcattctgggtttactcatacactcctttctgtccatattataccccaactctcaattttgagaagtaaatatgcaattttttcctccctgtaattttccctgctgtggctgttggatgtcagagcagctggaaaatgtgaacagctcagtgctttctaaaagtaaaaggaggccgtgcagcttcatacatcgtctgctgctcttggcaaaatccgacagctctgctgggagggaagatgctctccaggctgtactgtcaggggaacttttaacccaaataatccacatccccgcctaccattagcaatgagataattgccaaaaagtaagcgtatgtgtgtgcgtgcacaggcacgtgtgtgtgtgttgcagagatgttagtagaggtgaaacaaaggtatctgcttatgcagtcaaactttctgcttgttcctcaggagactttcaaaccctcgtgtctcagtaactgaaggtcaggacagtctgatctacgcttttgtttggaagaagcgagtcaaagagatccagggtggcttatttactgtgtaaccttgacaatgtttagtctctctgggtcttaattttatcatttgtaaaacagagcagaggacttggagatatgcttcctcgagccccttgcaggaaggacgta

SEQ ID NO: 62471 - DNA, 948 bp, Bovine  19866881909055
  misc_feature (1)..(1): n is a, c, g, or t
ntccccctatgctggctttgcttaacaaccctggcaagaatcccaggccgggcactgagggggcctgtgtgcacagggcaggcctgggccgggggacagctcatcccctggggagaagcagtggcccgggctgtggatgagcagggccgaggagtactctagaagtggccaaaaaggctggcgtctttgaagagattcccagtggccacagggaaacagacacagaccctgatgtgttcccatcacaccccggccttggagacgtggagtgactgggtcttccaggctttgcatttacaggagtgacaccccagccaaactcaagcctcagttccaccatctaatctcctcaccccgcttccttctgcacatccccgaagcttgagcatcctgctcctccctctcctgctgagatggccccgagggcccgggggaaaacctgctctgggcttagtgccagcctggcctcaagccacccctgcaggacagacaggacacctctgccacctcacagatgactgggccatgccctccagtcccagggctcccctccctggcaggcctgaggtgatagacagcctcacaagcccatgaaagaggcccaggtctgggtagccagccccagagacccacacccacatgttcacatgcatttgacccatacatgtgcacacatagactcacacatgtatttgcacacctgcacatctcacacacatgccctccacacctacacacacatgtgctcacaaacgcacatacacgtgtcattcatacctgctcaggttgggtgcacacacatacacaagcacattgtgtgttcacacacacgtacacacacatctggtcactgtacttgtcacagatactcacatgcacaccatcacacatgcagtgcgtgcaggcccacatcgagtcactctgacacccccgcgcacacgtacctga

SEQ ID NO: 62472 - DNA, 1758 bp, Bovine  19866882055049
  misc_feature (1)..(1): n is a, c, g, or t
nttcattaaggccaggagggggtcccctggcagaagcaggattttaggtgactcagaggagagtcagcaccataagctgtaacactgtaaatgtctcttgcttcctggggctatttggacagattccaagccgccacctgatgatacagagcattggctttagcctgatcaccacttcctcctttggcccaggagtctcatgacgcaaaggctaccttggaggtggccataaaggacagcagaaccgcaggtgcagtgcagctcagccagacccagcatcagactgagtgtctgcagagcaggcagcaacggttgccagccgggcgcgagctctcctgcctgcagcaccaggaacaggaagagatgcaggtccccctggccttgctagtcagaaaatttttttgccttagaacattccgtttctgttggattctaagaagagaaaaggacaggggatcaaaaactgccacttcagaagtagtttctttttctccagtattactgtattagaaacataactggaattccctggtgattcagtggttagaactctttgctttcactactgagaggagccaggttagatccctggcccttgaactaggatcctatatggcaatggacaaaaacaagcaacaaaaaaagtaacaaattgttttgaagaaaggtaattacaggagtgtacaaaatacgcacataccagccccggtctaggtaagaactgtaaactaataatgagtatatcctgtgtgtgtgttagtcgctcagtcgtgtctgacctcatggactgtagcccgccaggcttctttggtccatgaaattctccaggcaagaatactgacgtgggtagcctttcccttctccaggcgatctttccgacccagagatccaacccatgtctcctgcatttcaggtagattctttaccatctaagccatcagggaatacatcctaccagttgaaataaatgggtcattagttgggtctgaaaatatatttgactcacagaaattgttgtgatcacgaatctttgtagagtggcacacactttgtacccacacaataggtgtctatagatttgtaaaagtgactgaataatctcattcaggattatagctacatttcggttcatactgtggcccctaaccccgtgcggatggatggggatgctggagggaggcgcccggcagagatcgtggaagggcaggaggcctctttacaagtgccaagttcacgttttaatttttatggacgtggaagaggtagattctgttcatccaaactgccctgaatctccagtgtggtgaaaagttaaattagatgtattttttgtgtattgtagggtatcgcatgctatttctgtgcttgctggttgtcagtttctggctaacttataaacaaacaattgtgctttccagagcttggtggttgagtgagggattgcgtaatcctaggaaggagtgagaaagtgagaaaggcagagaaaataacttcacgcactagagaggcagccaaaagcaccccgtcttccatgccctgtgtgagggtctctaatcaggagaccctgcatggtcacccttcactcagtctcactcctgacctggaaaccccaagttcacactgtgccctcaatttgctgaaaacatatctgcatgtgtgagttttatctttggctgtgtggaagaagggcctcactggttctctggggggtggggggagccaggtgccatgcactgcctagagcaagtccccaccctc

SEQ ID NO: 62473 - DNA, 1071 bp, Bovine  19866882127734
  misc_feature (1)..(1): n is a, c, g, or t
nctcctgctggccctgcccgggtgcggggctggagcagggagggaggggcggggggtagccggctcttggcaattaggattcagcagaaacccaggagactggagacctgggaacatttccatgtattcagcctgaggtcaaggtcttaacagggaggaaccggtggagggggtggaggagggagtaaaggagagagaagcacaaggcagctaggaccccatgggtcgcccagggctgtgtgcttgcctgtccacccctcacccaccagcgatgggccactccacttgccacaggagccaaggagccacgaggggccagccagcccacaggagagccagacgctgctgctctgatgtccaggaggaagcgagtttggaagtcagccccaccaaacgccctttgcccccctcaacaagtccagagtgcacacgggcctcaagggccccgagtcacccaacgagccacaggcctggctgtcagcaggaataaccaactgcatctcctctggcacttagcatgccatttcttcctaaaggacagggatagttaagtttgaatagtacttatttttcatgttttggggccaattctagtaaaaatcatttaaatggcaccgtaagagataagtgtgccaggctaccatgtcaagccagccaccagagggactgacaggaaaaggaccggcacgtccacaggaaccctgcaggagaggtccctgggcaactccatgcccactgagcgctgggctggctgcggccacacagagaggtgcacgctgccctgactgcagtctggagcccagcagggcagctctggccagatcccgtcgtatgggagatccaagtggcagcaactggatgcgagagactgggccagcagggaagccaaccccaccccagaaactctcccttcaaaaggaaggggcgacctgaatctcccacaacattgttaatcagctatacctcaatgcaaaatatttttggtaataaaaaattaataataaaaaaattaaaaaaaaatttacaaaaaaggaaggggaagctctggcaggagagaggaggcagggcccc

SEQ ID NO: 62474 - DNA, 4491 bp, Bovine  19866880400801
  misc_feature (1)..(1): n is a, c, g, or t
nactgtgagggcgccggcctcagaggcctcagcggggctgcctgctggggtggagaggagacggggcggaaacctgggtgcgggagggagctccacgaggtgccggcttccctccttagtgccttacgtatttagtcttgagtgcagatgtttacataaggacgtttggaaaatacagggagagagcaaacaagttaaaaatcacttgcattcctgtaggtgaaactgatctgagagccctgagcaggaacagtgggcggggtagggatggggtgagacgggcgctggaacccaggttagcaccgtgtccctgaagacagcgtagacctgaggagtgggtggacggagttggagggtctccgtaaggaaaggcgggggcgcagaggaagaggagccgaccgatgctcacagtgggcctctggtgggtgttccatagaagggcacggccgcgtgatttcctttcccaagttaggagcatagctgggcctgggcttcagaggggaagagatgaagtcagcctgaaacccagtactgtccaagcgcagggacctgggacatgcgtggaggctgagaagtgcatccttgcagaggagggtggagggaggcgcaggctcaggaagacacccttgagtggggagacaggaggcttcagagtgagcagagatgctagcgggggcgggcggggcagctctaggagccagggggtcaggccccacgaggtttcatcgctggggccagtgggggcacgcggaatgtcagcttgagtccctctgcccggctcagtgctgcgggcagggggcttggctgtggctgcatgcgggcttggcctgcatgcacctccagctctgggttgagaaagctacaggtgaggtcagcgtgggggagagcggggaccccgggaagaacctgagaggcagctggggttgacgggcgggtgtcaaggaaggtggcccagccggccgggggctttccaggtgtgcacttcaccgcggggggtgggctggggccctggtggacaaaacagcggatttagcgagatggctgacaagggttttatggccctgaagcagattgatcaggtgtgctgttcagaccccagacccttcgtgcgaccttcactgtgatggaagtggtttttgtgggtccatcgctcactgcacttgctctcaccgtccgtcattcgtggcgaaggcagctctgcttcatcagagtcgatggctcagccaagagtgaggaaagctcaaagcacgctggggacactaactctggctgctgacactcgctcgctcagttgtgagatggataccaagtgtctgtccagcatgcagctgcaggacccgcccaccacgcctgtgcgggtgctttgtgaggcgggagacaggttcccctcaggtggggacacagggtgtgggtggcaccggggtaggggcagcgtgggtaacctgcccaagcagcctctgcagcacgggcacatgcaggcgggcaggcggggctgcaccacgggcacacgcacacgcaggcgggcaggcgggctccgccgccgcggagggactgttgttggcggttctcagtgaccttctgtcttttcccgtcagggtgttgagatgctggagctcttgttggaggcttccagagcgctccagggagaggtagggaagggcgcttgtgccggcagaagttgggaagcacagacatcacccgccttctcccgagccggtgttgacgcaggctgcggccgcggttgtcgtgtgctgggtaggtggtgggcaggtccctgtgtgtgagagcctgccagggcctgactgcactctgggaggccctttccatctgtatctcaatcaacaaagaatttcttgactgcctaccctgtgcctcgcactgtactaggccccagccgaggttctgaggtcaggacaggcctcgcacccgaggcgctcctccctggtcggcgggctgagagctcgtgcgcaagagggacgaagaggggctcacggagctgcaccccaggagtgtctcggctggaggcctggagagggggccgtcctggtgcagagggaggcctttccccgcgggggcgcagcgagaagcaccctctactcagggcggagggggctcagtgccccttgggggcagcttgctgtgggagtgcaggggccaggggcgctgagctgagagggtagtggcccagggtcagggccagctgcctgggcgggggtgcagcgagggggcagccgcgcacaggtcggggtggaggtggggtgcccgagacactctggaagcgctcagatctgagcccgatgggtcgaggagacgtccaggctcttttagctgagctgatagattactttaggaagattgctgttttaaaaaagaagagcatttttttccccagttataaatgcttttgaaaatttggaaaatacagaaaagtataaaaatgaaaattaaaatgtccccatgaccccgtcaccactaggtagctattgttagcagtttcgtgtggaaagagcattctccatcacactggtagagattcattggacgagctggtgcagatatgttcacgtcacttaatgcgaacgcaggttgatgaagactgattccaggaagttttccaagttgatacaagttagagtttgggggcttggtccatgcagggccttgcctcccccatgcagcgttctttcaacagcagcttgctgtgctctgttgaaacccagccagggtccaggccgtaggctggaggactagtcagtgaactaaaaataataaagccacgtctagattggggtttttatttcatttgtaataaagattatataacgatttattagagttgtatgttttatcatgtaattaaatctcaccaccaaatgctgcaggatatgtttttgtggaagtcactattaaaaataacaccttctgatcaagtttcctgaaatgtgtcactgactaaagacatacaaaataatgattttaaggtgactttgtaaaattattgtgttcttgttagtattcacagagtagtatggaatgcaaaataatttctagaaatatttgtaaaatagagagtagatacaggatgttagattttcggcaatctgaataatgacagttaaaaagaaaaaattttgttaaacttaaaaaaaattagcttgagacaaagttcagaattcttaactataattcacaatttatagtaagttacctaaaattgacttcagtgattatcttagaattaacacctttgttttccttaaatgtttcttttgactttcagatgataaagttttattttttagaaattgtttttagtaggacctgcccttagcgaagcagtctagagcagtgggaagcacagtttggagtcagacctgggcttaggcagacctaggttttacagtgatcagcactgacttctgtgagttcgtgcgtcctctgctgggtcgcagggacgaggagcccttggcacagttcctggcacatagtaggcaggcaataaatggagctgttggttctggagtgaaagcctctgtcacagcataagccatcgcatctgcgtctcagcttcatcacttgcgtgcgcaagcataggaattacgccttttatgcttgcctcattttctgtgtgcttggtaattatgttttcccctgagcttatacgccactgtatttttgtcttttatttttaattcatttcataataagcatttatttgttatccattaattcttaaggaatcctttgaatatgatctttatactactgtattgaaacatgttaaaaaatgactgagttggaagatggagtgtggggtactagttctgtttccctgtcatctcggtatgtaatgaagtaatcctctactcagcccctagagtgtagacgtaagtattttttagtttatttggtgacaaggcaaaaaaggtgatgtttataaaacttaagatagaagtaaaagtttactgtaacaagcacatagctgaaagctcatctgtttttcccactaatatgcttgggttaatgacatttaagaaggaaaagagtagatgagcacagtggttatgatgtcacataaagtgggcaggcaagtcggtgagtgtgatggaagcgtgatttctggttcccgccaggtgtcgcctgaggaccgaagcgccctgtgggcgatgctcaccttccacgggggcggctgccagctgaacctcaacaggaagtgcacgcacctggttgttcccgagccaaagggggtaagcgacccatgtacgttctccttttaaatgtcttctaagcatttccagtcatcgcatgtcttctttgaacttcttttaaattaactggattctgtttgcaaaagttgataatgtgagtttatgtcacttgtaaaacagctttattccacaatggatgggagatgacgaattttactttgaaccggatgtgacttttaaatacaaagaaatttgggtttatttcatggtgaagattggacag

SEQ ID NO: 62475 - DNA, 1536 bp, Bovine  19866880410275
  misc_feature (1)..(1): n is a, c, g, or t
natccttgatttaaaaccctgtaatcgcctcatattcgcagtgctcatattctaatcaatgaataatcttatttatttttccaagtcaggcctgctaaagaccatgtcactatgaccttgacccttgaaaacagccacaggactccctgcctcagcttcttcctctcttgtctggacagtgggctctgaatcatgaatccagagatccaatcagtacaaatataattaaatgcaaattttacattttagccacagtatattgtttacgcatgaggagtaataataataaaatgttttcattttaaaaactttcctgatgcttattataaatttggaacatacagagaagtataaagaaaacaataaaaattgcatgcaaccacagtacccattttaaaaaggtttccattttagccaattttaaaaatcatcatcatataaatttacatttattacaaagatgtgaaaaacactgaaaaacacaaataccaacaaaatttctattcttaaggaaaaaagccaacttttcaaggatctctattaaatcgaaatagcaaaaacaaaaaagagaggattttataattttaaagaacttccagaatttacaaaaaacacaaaatcactcgacatactgtctgggcagagaaggggttgtggggacaccacctgtacaaaaagctgagtctgtctgataatccagggtattaaactgatgttacccggttccagccttctgtcacaaagctgtaagaaggcaggattctaatcaaagtccttttagtctcacctaacatcctggacaccctgttctcgaaggtctcctcagagatggggagacccgaagtgtcatgataagagcctcagacggaatgaggtcctcacgctacagaaacagatcgggctaaccaagcctcctcctgcccagtggctacgcctgaccccgaggaagctcgaacaccaccagcctgacttttcataaaagctgtttacagactgagggtttccggctagggactgagaggacagaccgggacggaacgacactgaacacgcaccgctccaaaatccatcaatgccaatgtcttggtcccccttcagatgtttcttttttcccggatatttcttacatattttatttcgttgatgtaatactgtacataactatgttatatcctgctttgtcccccatttaaaaaattacccatatgtctgcatacgtttataaaacaaaattcaaaactggctagatagctagattattatgtattaataatggaccagaatagtttcttaaacatttccaaatcgtggatgatctgcttatttccaattttaccctctcataaataatgctgcctttatgcatcaatctgccgttatctctatcaatttgggataaacgtctaaacacatgagacctgcaaggaaaacaacagagtctcctccggctctgacatggcccgacttttctagaaaactgctcaccgatgtgcactgcctgtgggggtggggaagccggccacagctcggccacca

SEQ ID NO: 62476 - DNA, 768 bp, Bovine  19866880526907
  misc_feature (1)..(1): n is a, c, g, or t
ngggtcgcccgctcctgttctcggcccctgagtgagtagctccctcccgctcactcgctggtctggtcgtgggggaacctggagcccaagcgctgcagtttcaggagcccctgtcttgccctgacccggtggcaggcgctccaaggggagtgagaccccatagcgcgtagatgctgctcccagaacgctggtcgcctgctcagagggacacagcgctggagacaacaccccacactctcccaccaggacccgccccgcctgggtgacccccagaagcagctgtgcccgggggcccctgtccttggcggggcagggagagcttgtgacagccaagcctggcaccgagggggtcccagcagggagacaggcagggagacagcgcccccagacctcccctgtaggggaagccggcgggcccctcgcagggctgggactgagggtcttgcccgaggtgaccgctcctgcccgccctccccgcagcgccagcacagtgggcagcttcaaccggcagtgcctgtcctgtgacctggtggacaactgcacctacttcagcgcctccttcagccccggtgccgacttcttcctgctcaagtgcgaaggtgagttcccaccgccatgggggcgtgggtcgtttttagccgctttgaggagctccgggacccccaggacaggaagggccgccggccgaggacatcggctcacggagcaatgttcctggatcacctctgtctggagcattgttgatgttttacatcttataaagggtta

SEQ ID NO: 62477 - DNA, 1643 bp, Bovine  19866880541469
  misc_feature (1)..(1): n is a, c, g, or t
ntcttgcggtagaaggttccataatctgctcatctgtgtgtcccactccaaaaaattctagaatgttctaaagattgtgtgtacttgcacaagtatagcaggagaaacgattcagagagaagcttcatgtgcagttatatggaaaggaactgaatatatttcaccgtatttaatggatccttcaacgaaacacaggatatatttttgttggagctggtcagttcattttacctaaatgtctatcaagagctaatgagttccttggtgtttcatgtttcttttttatctcctctcttgtagataaagaattcatctaccgagagcagaaaggaagtgtgatactgcggaatgttgaaacaaatacttctacggtgttaatagaaggcaaaaaaattgtaagtactccctttaatgaccaggataatttcagttttcccgccttcgagtcagtaaagcagaaaatgattttaggtttcaacttttagtatagccaagcagaagcaataaatttataatactacagactgagcagctaaagataatgtgagactgaaaccacactaatttaataagatgaaagcatggtttctctaagtgtacagaaagtttctctgcaggtgttggaaacaagtgttgcataccacttataattgaaagacagtcctaaggctttgcacatttacagaacaattgggggtaatgcagagaatacttcaggatggcttgctcgatctcattttttaaaaatcgcatcctcacatgcacagggaatattaatttaggcactgacagtacttactctataatgacattaagtgatgtttatgctttggaacaaggatggagtcgatatgaatgccagtacttcatcattgggaatacctgttttcccaaagataatggcattaagatctggagctcttgtacagttaatggtatttattgaagaattgactgaagttatgtaccagaaatcaatttaaagagcatcaactcttttttttttttttcacatatgttcacgctcatttttagaaggaatcaatcttcagctttagggagcctatccttttctcgtacaatatgctgaaaggaagtcacgggaagaaactaaggcaagtctgttaaaagagagacttgaaacagaccaagaatttgcagtcagaacaatcataacaggcatccggtgtgaatgagaaacacaaggaatcctggaattctgggatctggggattagagcccatggtggtggtgttgggagggggtggcaggggaagagctgcctagatttacagctaaggatcctgagcccagtaagggagtgagcttgagatccctgggtgaggactcaggctggtccctggagcctccatcccagacaagaaaggatgagaggaccactccatctctgtgctgccccacccgccacccacacaaatgctgccacaccttctccagaacacgaagcttgccttttgaacactcttcatttcttttcggtgtagtgacaccttgttctttaaaagtaagcattttagtggtgtttagaaagaaatggatcccgccctttacagagactgtttgcggatgtgagggaggcctggaatggctgtatgacggtataattcccaaaacgacaggtt

SEQ ID NO: 62478 - DNA, 2368 bp, Bovine  19866880546200
  misc_feature (1)..(1): n is a, c, g, or t
naactgggccccggccccttctccattgtgcctgtgtttcccacgtagctcagtcggtaaagaatttgcctgcaatgcaggagacctgggttcgattcctgggttgggaagatcccctggagaaggaaatggcaatccactccagtattctggcctggagaatcccatggacagagaagcctggtgggctacagtccaaggggtcacaaaagctggacatgacttagcaattaaatgaccacctccatctcttcccagccctgctccacgggtcaggtccctctgccaccccagtctcggagcccctacggagagactctgacactcccacaacatcaagagattttgtgtatcgtctagcaacttttaattttctgatcaattctatgcctttattctccttttgtgggctacactcccaatgcaaagatgcagtctactagggagatgccgaagacatatgctctgtccatggaatgcagttatgcagttatgaatttctgaatggcagagcagtccaggggggtatcaacatcacttccgtgcattgtcacacacacaataagctgtcacaacacagcctggtgctgccttaattgtcacagataatgatgatgatatacggcttccattaactccgccgtgtcaagcagtgttccccccccacacactcccactcagcaattcctatatatggaaaaggaaatcaaaatcacatcttcatgaaacagttctgtttaaagctgaaggaaacacatctaggtctccaaggaagtttgcagagctttcttgtgaatgagagcagtgacttcaattcctcacacagcaagctggaaatgtgctcgcagataaggtttgcaaagaagcaaatggttcttggaaatactgatgcaggaattatgtgactacttgaagtcttttgtgtgtggggttggggggggggtggaggtagaaggtggcattacagaaggatacagggagcaaaggaggaggagaatcagcatcccgtcctggtctggtacagatcttccctggagaaaaacagagcttaagctcctaccagcatctctgccttccctggatactaagaactgtcccccattgcccgactgtagaggaccaatcactggggtgactgtcctaaactccagactcagaaacaagaaccttgtccctggggccaacatccatctgctgtgtcttactccccagtagtgtgaccgcacatctacacgtcatctgctcactaatttcaccaagtgatcacacagaaaattatcttgtcatttttcagtcaagaagcataagaagaaaaaacaacaaaaagcaaaaaacccacaacttaagccaggttgagggagggtcttgtacactgcacttaggagatgtttgttagtgaccagtcagaaagagatggaactgcatatcagtatggaagtgatgctacttaaaagcaatcagatccccacaatttttgaaagtctttattgaatgtgttacaatattgcttctgttttatgtgttgtttttttggccatgagacatacgggatcttaactccccaactagggagtgaagctgcaccacccgccttggaaggcaaagtcttaagcacaaagttttaaccaccagggaagtccgcatccccagaattttagggccagagagaaccttggagtcaaacaagaactcagtttacaatagttttatacaactgaccctcttcgtgaacctgctcttcattcgtaccatggacaagctactgtgaccacatctaaatgatcacacatttcaactgggggggtatgtctaccctcagtgaactttgagaacttttcagatcttacctgagttataccaggcaagccaaacattagcaaaatctccacagtacacctcgatcagaaagtattctgaatacgtgcttagatgctaagcattgtaactagcgatataacaccaattttgcattctctttagtttaactgatgtcctaattctgcataacagtggatgctggcatcaaatgaaaaaaataatcattccaaatgacttagcattcaaagtatatccccaaacagtctcctgaggaagaatcatggctttgtcccagcgtcatcgccagaaagctgtgagcaagggctgggcagagaggacatttttcaagtggtagaaatagctcctttctgatagaattttagattttgtgttgagctttgcactttaaatattgactgcagcgactagggccagaaattttacacacacacacacacacacacacaggatttctgagtcctaaggacacaaacacacaccaataagcataaataggaagtatgtcgatgttttctaaataaccaaggat

SEQ ID NO: 62479 - DNA, 1081 bp, Bovine  19866880652041
  misc_feature (1)..(1): n is a, c, g, or t
nttgggatctcctgcattgcaggcggatcctttaccaaatgagctatcagggaagcccgagccttaaaagggaccagtctaatacaaaaaatcacatgcattttgtgcaccacaaagcagtaagttatcacagatgagtgggggcttcccagggggctcagtggtaaagaatcctcctgccaaggtaggagacctgggctcaatccccctgggtcgggaagacccccctggaggaggaaatggcaaccccactccagtattcttgcctggaaaatcccacatacagaggagcctggtgggctacagtccactggggtatcaaagagtcagacatgactgagcgaccgagcgagcatgcatgcacgggaggacattctggaggagacaagctgtatgggcagaaatgacctcagtggctgccagcagtgggggattttgtcatgcataagctatcctgtagctgcaggacagccctgcctgatggcaatgttaggcagagcatggcccgtggttccctacccgggacccccctccctcaacccctcccactggatcccattagtgattcccaccagcctaattcaaccagaagccggaggcaatagagcccctgtgacaggtacggtggtggggcgggtggtgccctggggaaagttacaggaagagaaatagaccaactcagtagttcggcaagacttccgaaggcctggcatttggcttcgaacctccatcaaggattccacagagcgaagcagagactacagagtctgcaaattaaatctgtacatgtccaccgaaatccgagttgtcatttttgcaaaggtgctaagtaggctttgaggaagagggttgttatataatagatgcaggataagaaggctgactccaaagggaatggatttcagcgtgattgctgagaattactgaattcagcagcaaaacacacagccctcttagaatatttcattttcaaaagcctctgaaaaagcatttgggcgaagctttcctaaagactagaaagaaatatgatgtcgagcatatattttaactcagttctgctaagagtgggtaagcatctcag

SEQ ID NO: 62480 - DNA, 3233 bp, Bovine  19866880764359
  misc_feature (1)..(1): n is a, c, g, or t
nggaagattccatagtacattttcacctactcgaatctgaaaggttaaggttaagatatagtgacttaagtgatagaactgtttgggttccatttttcaagactccagaattatgggaattccctggcggtctagtggttaggactcagtgctttcactgtggttgtccaggttcaatacctggtcagggaactaagatcccacaatctatgccatgtgggtccccacccccctcaaaaaaaagtccaaaatcagaactggataaaatgtattatgaaattggaactatttcatcgactcttggcctgaggctgtgttgcttgttcctctgtttgggacctgaactgggcccttctcgtgggacaccaggggtgccgtgcatgactctcaagcctcagtacctggctgactccacctggcctgcctcccgccagccaccagcaggagtgccggggggtgcttcccatgtggataattaaacccctggctccattccttctataggtcaagccaaacaaccccagttttatttaaaattgtacaaaatgatgtgggttttttggtttgtattcaaggagaacaaagtgtaacattagtttaaaaataaaagatgtaaagttagtttaaatatctgatggctggtaaatctaggaaagggaatggtttgaatatcgcgttaatgatccccacgaggcagtcgcgtcgtctctgctggcgtgctcagaccctgccgtcttgtctctccccgcagctgtggtcggcctgctgtacccctgcatcgacagtcaccttggagagccacacaagttcaagcgcgagtgggccagcgtgatgcgctgcgtggccgtcttcgttggcatcaaccacgctagtgctgtatcctaagacgttactgttaatgcgtgtctgtcacgtcctgggtcagttgagctgatctcttacaagcatgatttcaaaccacgttgctcactttcctctcagcagagctttcaaagtgatcctgaaaagtcctttcagttcatttcaggagacagttaaaatgaccctgggaacagagtggatatctttagtctgtccctttcttggtcactacctgttggatcctccgagttggtttggtaaattccccgtccatttctgcctcccatccttccacggtgcagacctggttcctgtggtgcagtgagacgttgcgggagcttcactcttcttggctgacccttccagaaggcagagcagaagcccgtctgcttctccgccctccccggtcatgaccagggaaggcccagcgctgatcagaggaggtggcctcaggaatagggttcccagtggaggtcacattcaaggtcaggttctggcgtccaccagtgggctgcctggcaaaacacggtgcagttttcaggaagacgggccatggtttaccaggcgtcaagacatttatagtttctttctgacagcgagattatatttttaaattctggagaaagctgtttttagagtttctgctgcttaaatctgctttaccctgattttaatgataagaatgtcaagaaaaggtattacaagagagcctggctctgacacatttgttttgtcccctgttggtaaagtagtgttgtgaaggaggccagctgtgtccccatcagctgtgaccgtgtcgtgttgaatgccattccaatgaggtgtctccttgcagacacagagtaaagactgtgcttgctcagttcaaactgctaataagaacaggaaataaaagtgggactgtggatgacttactagaatatagttgtttcgtggttgaaatgaatccaagcagggttttatgcatagtttttaatacattgactggtaaagtcaagttttcgacgcagggatcccagagatgccccaggtcatcctgatcaagtagccttgtatccagcacatgctctctgcagctcactgggcagcatctgaggctggagaattaggtggtgcacacgtgtaggctccggggctcgcttgtgtgtctttgaccgtgttagaaattgttgtacttttccttaactttgcgtcaccagaaactggattttgccaataacgttcagctctccttgacattagcagcgctgtctctgggcctctggtggacatttgaccgttcaagaagtggcctggggctgggcatcaccatcgccttcctcgccaccctgatcacgcagctgctggtgtacaacggagtctatcagtaagcacgtgcccccaagtgtcacctctgcccgggagctgtcactccagttttgctcagaatacccatgaagctgagatgccgtgttgtttgtaattacatggcatgagcttagacgtgaaatctttaaaagcacttcttattgttgattcacataaaaatgcaccatctgtaatttaaggacagccaagccacggtggagagctttgcattgtccttcagcctcttaagctgtgtccaggtccttgtgacccacgctgggctgcagcacactgggcttccttgtcctccaccatctcctggagctcactcaaactcatgtgcgtcgagttggtgatgccatccagccatctcatcctctgcagtccccttttcctcctgcccccaatccttcccagcatcagagtcttttccaatgagtcaactctttgcaataaggatatgctatataacacagggaattatagctactgtcataataatctacaataaagtataatctgcaaaaatactgaatcattatgctgtacacctgaaactaatataatattataaatcaactatgcttcaataaaacacttttaaaataaaaaattgtgaaagaacacaatgaataaagcactggaaataatatgcaaagaaaaaaaaatccaaaacaaaaacacagcaattgctgttttgccttttacttgcattttgcatcacaaaactgaaattaacttcatgggcggggcaattttttaatacattcaattaacacagacttttcattttcacagtatacttcctttctctttgacattcatctattaataaaaatgaaaccataccaatttgaactctaaaaatctaaacctcagataatgcagggtacttttaattatttcaaaataagatcgctgccctcctttagaaagaatgatcaaaattcttttctcttcttcactgtgtttgcggaaaatcatttttcctaggaatgccctgggtatgcacagtcttttaaaaa

SEQ ID NO: 62481 - DNA, 2874 bp, Bovine  19866880809349
  misc_feature (1)..(1): n is a, c, g, or t
ntctaaacatgctgtccgaaacaattacatattgacaacaaaagagcaatttaaagcaaggatacatttcagcctgaaatgggagacaatctgactccaggaactcggggaggctggaggcagttttagaggagagggttgtgatgtcagggcctgaaggatcggaaggatttggacacagtcgcacggtcagcggcacctacgtttctggcgtgttgtggggatggggtaaaggatagagcgagcgaagacgggaccaccttctgtctgcgtgcagtggcggcgcatcactggtcctccagggaagactgcttcctgcaactggaaggcatcacgtgcatccttctcccacccccctcactgcgggcgagacgcatggatcacagcgtcctcccccaaagagcacaggcacactttaaactcagagctccaggaagccattagaattgatcagagctggcacagagtatgaaatttactttctgtccagaggcagggaaattgtggggagagtgattaattagatttggctgcataatgggaggccttggttcccccacgaaggaagcctgtaggactttctgcacaccgaaagaggtatttacacgcaccatttcaatatcctacagaactccataacctttccatgaaccccatgagtcaagcattttatttccattatatagacagagtaatagtgcccagagaagcaaagtaactcttccatgattacacaggtaaagaggctgacgggggatttattctcacatcgatttgattctaaagctcattcttttgatagtgcttgctaactgcttgtaattcaggggaagaagggagagaagcagggagacttcgccgggagggagcaggagaagcagcttaactaagatccagctccgcaggcctcggagctgtctgcagtgctgacatgctgcgcctgccagtaacggtaggatcctgccctttccgagagagagtttagtctctaagtcgtgtctgactcttccgtgaccccgtggactgtaatctaccaagctcctctgtccatgggatttcccaggcaagaatactggaatgggtagtcatttccttctccaggggatcttcctgacccaggaatcgaacttgcatctcctgcattggcaggcagatgctttaccacggggccacctgggaagtcttgcaggccttgctagaggcacgtagaatgccactctaaggacgctctttctcttatatttcagcctcatgttggcccttcctaaagatacacagacaatcctgttggtgcaacccctggcagctctgcagagtgaacgtgtccagcggcagcgtcctggaggaggaggtgttgggccgctgacactgctggggattctcagcgccaccctcgcaaactcgctgccttgaatctcctcacgcatcaggctcaactcacaaaaggcacaggctcccgaagatttaatgtgaggggcatggaacataaactcttgaaacccgccttcactctctgagaggatgccacacgcccaccatcacagtcaggtggtttctccactgagccctccctcactgcaggcctgccctgctccccgccaggccccctaactgactccaagccctactcaccccttccctgccctccgctctacacacacacacaaaactaacctaagcctgctgtttgcaccgagtctctcttaggcttggtgttcagcgtgttcttcctgtaaagacccacggcactcagctggggattaggtcttccacaccccaggctcaccccagacccccccaatcccgtctttccccatgcagagtcccaggagaacagccctgctccggcctggcctggcaccccactaattccaggaagacgctggctcactgaaaaggtcaagctcatttaatgattcacccgacctggaatatctcctctcagtctccatctattaaaccaaacaaaataaaacttactcgactataaggctttgctcaagccagacttcctttttgagattctttatggcatctcttcttttgtgttcattgtttaaaatacccatttgaggcatttaattttatattgttatataagcaaggagttccaaccagtccatcctaaaggaaatcagtactgaatattcactggaaggactgatgctgaagctgaaactccaatactttgaccacctgatgcaaaaaactgactcattggaaaagaccctgagctggaaaagattgaaggtggaaggagaaggggacgacagaggatgagatggttggatggcatcaccaactcaatggacatgagtctgagtaaacgccaggagttggtgatagacagggaggcctggtgtgctgcagtccacggggtcgcaaagagtcagacatgactgagcaactgaactgaactcaactgatatgtcctgagtcccttccttttcaagaagattttgaactccttaaggatagaaaccatgctttgttgctcaatacagcacttcactgttgacttatcttttctgcttccactgaaagcaaaacaagaaagccttagaaattaattgcagcaagtcaggttgagatgagattaaaaaaagaacttattgagcactgagaattgtagatcgttgaggctacagacattacttttaagagagaaattaaaatcacaagggcattttaatcacctgagtgtcatggaacaggtcttatctttgaaaaaattttaaagggaattttattatggtaggggttatatcattcctctccttgtaacagaaaggatttgagctggctagaaagtacagtctgataaaatttaattatgagactacaaatacatattggggacatattacaatacga

SEQ ID NO: 62482 - DNA, 1187 bp, Bovine  19866880895249
  misc_feature (1)..(1): n is a, c, g, or t
ncagaataataaaatatgcactttactcatccagataagtgtgtggctgctgtgagggcaggaatctgcagagtcagtggggctcgtggcctgatgtcacagacggccttgagggcacgtttcccagtgtgggggccgcttcagtgagttagggggtttcctatggagtgcatgtaaacctcggctcgagggatgggggctcctggcactcccctgcatgtcctcctcctcttcctcagcccttgatattctgaaacgttcaacatgttcaaaagatcctttctggtaaacaaaacaaatcaatatggcatctgactgccaacaagcctatgggccgtggagtagcttagaatttacgtaagctctgcttctcagaactaacatctctgagtgagtcaggcaccctgcaaacgctttcagggtatttttttcctctaatgttgccccctaccgttttttaaaaggagcatttggaggtgaagcagttaagtcacagatgagaaaaaagcagccttcagagtttactttcccattattaaaaaggagctgagattccttgcaggctccaggagtcgaagcatcagtgtatataaccttccagggaacagcactcagcagactgagctgtacatcaaccatgattgatttagaatattggggccctgttatcacaccaacacaattccctgtaaatgccctaaagaaacatttcttttcaaccaatctgctcaagcagaagcttaccttgaattgcaaggcaatgagttcttttattaggaagatactaaaaaagatattctcaatttcctggtgatggagttttaaagaagattattcctagagcgggttgaggctcttcctgctgggaccccagtgccccgcccctcgctgggggccatgggattgttgccctgacccctctgccacctgtagggttgtctgtcgcaggacagcagaagcgtggtggatactgtccgttttgtcccgtgacaccctcgggtgagcccaatgaaacctcaaggtagattctcctggggcccggaatgcagctcagacccagacccatgggtgctctgagcagtggtgaccacgatggaataaacatgaggcttccggggagaccacagggagggggacggttgtgatgagtgctccagcgttcagccaggaagccagctgcacagaat

SEQ ID NO: 62483 - DNA, 661 bp, Bovine  19866881107712
  misc_feature (1)..(1): n is a, c, g, or t
nctttccgccctgctgcatgctgggagcgaaactgcggagattaagggcttcgctgttacaacagcacttccactctctaaatgtaaacagcctcagccccatccagcagaggcgatcacagctgtcgaatccatcaccagctgcaggccctggttggctgagcttctttagggggaaaaagactgtcctgcgatgaacaaaaccagaaggtgtgagcccgaggatgggattctccgttctgggaaggggagaccagcaccctgtgttcagagtctcagagtgagtctggaggactcagaagaaaccacagtgccctgacacccacgtctatgctctttgctggcccaggaaggtcctgacaaggttgcagatggtggcacctctgtgccaagggaggctggagttctagccgagatggcctgatgactcctgaggggcctggctctgtgttcccacagcctcacctgcagactgacccgctgacctgagaacagggtctgcgttattccactactttctggatgaggggagccccagtcagcagccttcccggggcagacggcccagcccatgctccttaccacacagcagggatgcagcaagagtggggtagagaccccagaaacctgtgcaccattctgctgaaaacaccattgctgt

SEQ ID NO: 62484 - DNA, 1569 bp, Bovine  19866881245549
  misc_feature (1)..(1): n is a, c, g, or t
ncagagcagcccagagccaaggggacccttttgacccccccagaacttgttaaaggagttagaggacagagtgccccagcgtgagcagtgtgagtttctgtcaccacggaagtcacaagggaggtgatgtatatcggttgggattgaagcttggacaaatgactaacggtagttccgtcatttaaaaaaaagtaaacctgctgacagattcagctccgcaaagatgggaatttaatgcagtgtaatgggacacaattaatcccccctgtttactgccttgctcgcagcacgggtgagagccacggctccacgagggggtggggagcctatgaacgtatgcagaggctgtcccggcgtggcttcccgcctaccttggggtagtggtagggctttgcggtggggtagatggagccggtgtaggtgggcagctccatgaccggcacgcgtgagtcattgatggtggcgtaggcgagccgtgtaccgtccggagaccaccagtgggcaatgtgggtcttcaggatctcctctaaggaaacagacaaagcagagacgtgtgaaggcacgggggagggcacccgggagccccccggggacaaatgcctcctcacagcctctgaggaggcctccccgtgcccgggtgcaccgtcattctggacatacctgggctgaccaccgaaccccagcacagcaaacccagtcaatcaaggcccgaccgagcagaggcgaaccatccaaaaagcactctcctttttttgcacaatttgagcacgatgagcctatgaggtcctttctgagttgacttactattgctgtgtgtgggttattactttaaggggatcagaaaaccaaaatgagaggagatccattcgtctcaagcagggagcccccagcaggaccaagtgaggacataactgtttggagcttgaatcccaggaaatcaatgagcacgggactccaagggctcaggcccgcactgaggccccaggcacacggccgtgtgggaggcgctgctcagagcccggcgggcccttcaccctgacggaaggaggcgatcgcattccctgcggcagagacccagaatggccccctctccagggagaccgagatggaaacagcgacgggcccagcctccaccgggcactcccacggctcctcctcgtcacggagtctgggttaactagtgagctcactggggaggagtcccataggatctgacgtctgttccggaaagcatgatcccaccttgccttctgaacaagccgagagagggcacctcccaggggccactcatcagagcgctggggttggagaagcacctcggggctaaacagctctgaggctggggtcctccttggacaccgtgtgtgtgttttattaatgaattcccctggattcgtttttaaaataatggtcagcacagctctacaaccccccagcgtgagtcccattccaaggtcattatttggggtagaccacaaactggctctgagagcccgcagggacagaaaggcagtcgaacagctgaagtcacacagaggaagcagaatgagggactcagactccggggga

SEQ ID NO: 62485 - DNA, 1272 bp, Bovine  19866881330461
  misc_feature (1)..(1): n is a, c, g, or t
ncccctatgttctgcctctagcacgtgtaggtctggccgcatggcctgtctctccgccagctcacaactcccttgaggaaagggtgccattcactcactcactcgaggtttcatccacttaatacttacttactgagcacgtatcacatgtacatgcacatcacatgtatgcacgtcacgtgacatcaatctttctaaacacaagagagaaaacgttctgaacagtcagtagagtgaaatctcctaaacctcagagcgcagtcgtgacggctcatgggccgggacgtcacgctgtcttacggcccttcagtccgcgacactggtccacctgggcactgtatcgcactctccaaggcccagggtccagcaccgtgcacccggatctcaaggaggacgaccgccgtgcccatgccactcccgtccctgcagcacctgagcccgtgcgtctcacgcctctcccatgtgaagtctgccgcgtgtgcagtaaactcggaagacccaaccttggccaatgcgcccgcaggccagtgagcggcataggtccctgacggctctcattccggggcggcgataacatccagtcaacacctctgctcctcggccccttctgtccctggagagtctactagccctgcctccgtgagcaggacgtgagagagccataaaacatgcggagtggggcttccaacctgcctgctgcactcctttctcaggaaggaggtgactggctacatggctcaccttctctctccctctccctgccctccccccatgatcagtggccaaggtccgtgaccacagcatcgggaacccacaaagacccacatcacggtctctgcaccttgttgcaatcagcaaagcagaaaggccaccagccgtgcagcgactaggaccctggtctttgggagcatatggctggcaggaattcactggggaatcaccagagacttctgggggtgccagcaaagcgcaggcagaatgtgtgcaccaccaggaaacaagaccacgatgcaacccgggtagagatgagaccccccaaccccattccaacagcgcccctggggtgctcaccgcacggcctccatctggtccttctcctccagggagcccagcctccgcctcacctcatgcagcagcctggtgccctggaagccgctgccgcggccatcacacttgaccaccacggccccatggctgctcaccattaccgtctcccaggtcactgcaaactttctcggccacactctggctcccccgggggtgccgtccctg

SEQ ID NO: 62486 - DNA, 451 bp, Bovine  19866881610672
  misc_feature (1)..(1): n is a, c, g, or t
ntggtcgcacagcttcttcctgaataattatcccgcacagcactgtcaacccatcagcaaggctgcccaggcgaggagcaggaacagaaaggctcactcctcccctccctggaagtcccagcgcccgaaacagacagatggggagccacacgccttgcttggatcaccctgtgacagataataaaacacactttgttggaattttctacaacaagcctttattactttaataaatcacggggggcaatcatcaggaaaagagctgtgcttttccagccagacttctaagaggaacatttggcttcttttgttattatggggccaaatattgttgctaaattagtctgttttgaatactaaggaagctttctccctcctagaagtgagctcgtctctggctgaaaagctctcaaaattacacctttgtttttaatttgaattattatcactg

SEQ ID NO: 62487 - DNA, 1277 bp, Bovine  19866881620637
  misc_feature (1)..(1): n is a, c, g, or t
nctctggacactgaggtccaggaaagcccctgcacttggcgagccgggagcttcctgcactcactggggtcgcagagacgcggttccccccagttctctgggagtcctgacccccgcaggcccggccacggcctctgtagtccctgagcctggatccgtgttgcggatccgaacaagcagagccagatgtgcagagtctactaaacagggtgtcgtccgattccttccctgatactctgaggacaccctgtgccgtcggagctaagggtccggccgcgtgggcggccgggggtccccgcgtctcccgggcgcccggcccacacgggggcggtggccacgtggctgagtcctctgcccctttcagatctacccggacgagagccactacttcagcagcgccgccctccagcagcacctgcaccgctccatcctgggcttctttgtggagtgcttcaggatccaggacaagctccccgcagtcacagcgagagaggacgaggaggaggactgagccccacgacgcaccgcctggcccctcctgggacagggcacgctgccccgggcaccccgcggcctgtcccacagaggtggggcgcctccttcatcgcatgtgtgtctcgggtctgaaggcatttctgctccagaaacaagctccttgccaagtggaggtgtgtcgccactcatgaggggcttcctcggagcctggaaccaccacctcctcccctccacagcgtgaccggggcctccccatgaccctcccccaaggaacaaagcggagcctggatggcagagcagaagctggccctggaactggagctggcgagcggcagcgtgggacccggcctccccctgagtcccacgcccacccgggagcatcacccccctcgtgacggtcaccgcgccatggacctaccagagcacaattattttcacagtacctgtccccagattggcctgctcccgtctgtaattaggagattccgcattttaaggggctgtacaaagtgtcactgtagctgatgctaatggttaaccttctggaatttgtttgtatttttctatggtttttacctgacactgtctctggtcacggggttgttttgctgtgtgctttttttttttttttgctttgctttgttttgcttggtttcgttcagtcagtatgtaggctttgcacttgtttggattaaaaaaaaccagatcagaagtaacgctttctcctcaaggtcgtctctagacttgtggggacatttcaaaaatacgcaaacgacatccag

SEQ ID NO: 62488 - DNA, 2871 bp, Bovine  19866880234641
  misc_feature (1)..(1): n is a, c, g, or t
nagtcttctccacaccacagttcaaaagcatcaattcttcagcgctaagctttcttcacagtccaactctcacatccatacatgaccactggaaaaaccatagccttgactagacggacctttcttgacaaagtaatgtctctgcttttgaatatgctgtctaggttggtcataactttctttccaaggagtaagcgtcttttaatttcatggctgcagtcaccatctgcagtgattttggagccccaaaaaataaagtctgacactgtttccactttttccccacctatttcccatgaagtgatgggaccagatgccatgatcttcgttttctgaatgttgagctttaagccaactttttcactctccactttcactttcatcaagaggctttttagttcctcttcactttctgccataagggtggtgtcatctgcatatctgaggttattgatatttctcccggcaatcttgattccagcttgtgtttcctccagtccagcatttctcatgatgtactctgcatataagttaaataagcagagtggcaatatgcagccatgaaaagcctacatgcaggtaaactttatgtggcagtgtcgtggggctgcagcgcccaggtatctgatcaaacactgcatatttctgtgcaggtgtctctggacaaggcagacattccacaggggggacgctgagtaaagcagactgccctccagaaagcgagtgtgccccatccactcgctcttgggttctggacttgcctctgcagccacatgagctgattctttaattaaatctctttccacacacacttcctgttggctctgtttctctggagaatcctgactaatatacctaagagcgggcctcctcttggctctgggacatgacctttgtttgactgaggtcgtgttgttgccatgaaagaacatctcagacacatcctccctctggctggcacctccctctggcactggggaaagtggcccttggcagacaccaagggaaccaccctttcggcttggcagatccttcccctccatggggtccccacctgggcggctgcaggaggcagatgtgttgactgagggtgctggtcactgtcgctgaactctggggggtgatgagtttggggccccctggagaggacactgtgggaggcagggagggatggctgtcgggaagggtcagcttggcccctgagcagctccccagccccctcaagcccctgcatggtgtgagcttatggtctagggagtcaggagctagagccaggaaatggcgatggtctggccggggatgcagccagattagggcagagcagaaagagcacatgggaagcacacgtggatagcagtcgcctccaactcaggaagatgtgaccggctgcaggaacacacggtgctgggtcctagaaaaaggcgaaggtcgatcgatatattggtaaattgggaggtgccctgcaaggtaggcagttatgtatcagagaagcctggctggcttctatgatctctgctcgtcaataggaacattgtgttggaagggagtcacaataaaaagcttctggagatatttaatctttatttgtgtttggaatgctgctgagtcataatcccagagctgagattcccacggcagaacatccccgtctcccttcatttcttcggagggagataccgtctgcattaagatacgaatcaaagcgctcagggcttgcctaagtggactctgctcatcaaagtacctaacttggtcattgctgtggaatttcatctggactgcaacaaagtccagaggggagaaggggggctgggaagagcgtggcggctggggagggagcacgccggatgaaggcaaatttcacacacggatattcagtgagggtgcatacatgtctgtataaatactcaggctaccccagtttccctgacctcctggttctgtagtttcttttagctcaatattgtcatatatcctttgggaacaaatgtgaggagggaaaagcatatatatgacatatatgtaagggcttcctggtggctcagtggtcaagaatgtgactgcaatgcaggagattcccgggtttgatacccgggttgggaaaatcccctggagaaggaaaatggcaacctgctccagtattcttgcctggaaaatgccatggacagatgaacctggagggttacagcccatggggtcgcaaagagtcggacacaacttaaccactaaacaaccaccacagacatacgtaaaatctcgttcttccttattttttaaaagccacaatacttgtggctgggcagaattttgacagtttgcttcccatctcaggctggcactggtagacgtctgtggggcagtgagagctctgactggaggagcccactccttcacccgccctcggccacacggagggaatgtccagacaaatgccatcctggtctggctgggctcctcggcatctccgtgtggatgacgtgccaatgccgtgcagagcagggccccagcagatggcgggcggccagtgggcgggcaaggccatgtgacgtctgggcagcctggcccctcaccttcccagaggtgacagctggaaaccaaccctgtactttccaaggttggggggtcagcccctccaggtcgggactgacagatttccctgggaaagtgccttggttctccttgggataaatgcttgttttctttgaaaatgcattttcatagtctggttaacatttattcaaagctaaggactgtaagaggcggagagaaaaaggaaaaggaagacgtgggctgtggggaggctgtgcactggtagagtctgaaccttttcactccggcttccaggaagccaatttcacagcaagatcagtt

SEQ ID NO: 62489 - DNA, 1734 bp, Bovine  19866880488123
  misc_feature (1)..(1): n is a, c, g, or t
ngagaaacaaagagtccgtctcctagcagcttgtacatgaatgttccagcagcattatccaaaagaggcagaaagtgcagacagtccagatgtccatcctctgatgcagggctgaccaggtgctcacagtggaatgttacgtggccatacaagtgagcgagttactgatctgtactactacacggagaaatcttgaaaacatgatggtgagatgaaagaagccagacacagaaggctgcgtactgtatgattccacttgtgtgaaggggccagaaaaggcagatctgtagagagtgggtaagtggctgcctagggcgggatgggggacgggtggtgagagggagtggggaccgctgatggcacagggtctctttcttgggtgatgaaaatattccactcctgattgtggtgatggttggacaactccgtgaatatattgaaaaccatggaaaatgtacactttaaatgggtgaattctataatatgtgagttacatctcaataaagctgttaccagaaaaagtaaggaaacccaaataggtgaacacctcggccttcagtcatgtggccagatgtgtagaagctgaggttcaaacccaggccacaccgcactagcgtctgtggtcacagtctctgttctgtgccatgttcttttcatcaaaatctcagtttccttaggctagttgctttagcactgaaggtccagaggtaaagggtatgaacacagatttgcattttcagtccaatgttttggtaaggaggccagttagggggcttttggacgcacagactggttcctgagatggagagaggaggattccttaagggtagtcaccccaggattgagaagtcagttaactgtgtttgctcttcatcagcttccagttacctgtcctgagcagttaaccgtctcagctgttcatggggttcgggttacctgtcctaagatagtcggttaactgtcttctctgttcatcgggttccggttccctgtcctgagatttctcttttttcaccgcaccggggctgtttcccagattgcccagcacaatgagagggataccctgagtactgtctcctgaatgcctgtttccctgaatgcctgttttcctgaacttcttctcatcccagaaggagaatggacaaagcaacaaaggtaaatcatctagattaaccgtttttaaataacaacttcgccaactcaagttttaagtaatgaaatggagagaattccacagacttggcgaaagagggcttggaaagtctaaatacttatgaagtgctttcgcagtcctttttgtctgcattccttgaggcccgcttctcagggtggctggtactgttagctttgtctggtatgtcagatgactaagacggggagaatccactcaggtgccagaaaatgtcagggcagcagcaggtagacggcccagtgcagcacaagtggggagagagttatttccgtgtctttcacctttaccttgaactagtctagtctaactgggtcttatctcagcagcttgtggagtgtccattcttataaagtgtttccatttttcacattcaaagtaggaattccagtcttaaatttttagcataaactgatggtttttccatgatgagtcatttttaccagaccccttcatttttcagaaagatgagaaaaattttagttaacgtggtggccgcaagtggggttctttgtaggagctttgtctctgatactacatgatta

SEQ ID NO: 62490 - DNA, 795 bp, Bovine  19866880804288
  misc_feature (1)..(1): n is a, c, g, or t
ntgtgaggagatatctcattgtggttttgatttgcatttctctaataatgagtgatgttgagcatcttttcatgtacacagtggagtattactcagctatgaaaaggaactcactggagtcagttctagtgaggcagatgaacctggagcctgttatacaggatgaagtaattcataaggagaaagacaaatactgtacattaatgcatatatattaacacatatatatggaatttggaaagacagtaccgacgatcctacatgcagggcagcaaggaagacacagatgtagaagacagacttttgaactcagtgggagaaggcaggggtgggagaatagcatttgcgagaatagcactgagacacatacattaccatatgtaaaataaatgaccagtgccagttcgatgcatgaaacagggcaccgaaagccagtgctctgggaccaccgggaggtggggggaggtcaagatggggggaacacatatatacctgcagctgattcatgttgatgtatggcaaaaaccatcacaatattgcaggtaattatcctccaattaaaataaataattaaaaatattaatatctgtggaataaacaagttaatggcttttagatttgagatgcctgctgagaaagaaactgctgagcacatgattgtcactttcatggcaaccagcaagtaaatgttcatggctgagctaacctggtctttcaatctactttgttaagagggaacaatatttatcttaaaatcaatcttctggattagcacagaaaggcctttcatctcca

SEQ ID NO: 62491 - DNA, 1925 bp, Bovine  19866881048733
  misc_feature (1)..(1): n is a, c, g, or t
naaaaaataacatctggccttgggggaagctgagtgaaatatagacgtgctcattccttgtcagggttgtcctggctaatcctccacagcgagagtcaggaccaagggggaggataagcccagaatatgctgacttgagctcatcacaaagagtcaagttttggccccaaatgacaggtcctttctttataattttccaactaaaccctttcaaggatcttctgaaaattctagttatcacaacaaatattttcacacactatcttctttcttttctatttaaaacaaaaaaagtttatttatgtgtctgcactgggtcttagttgtggcatgtgggatctagttctctgaccagggatcaaacctggggcccctgcattgggagtgcgagggaagtccccatacactatcttcctaaaataaaaatctgcacagaatggcaaaaagttcagaaagctaaaagatctctctgttctctaatttacagtagactataactgtagttctatagttatagtctactatcactttttaattgtagttatagtctactaaaactataacttagctatcgtctactctaacttccacagggaaattgcaaaagttgaaattccaccattaacagaatagtcgaaccaaatgaaatttcccacgcagtacaaaaacaaaagggttaatagtaagaaaagaaaacgaccccaaagagataacagggggaacaaaaccagatctttagggaagctttatgtggacaaaaagttattggaatgaaataattaagatgttaactcaaaatataaaacggtgctgaaggcccaggcacacagatggtattttgtcatagggctgagaagccccagtgagtccgggagctgagtcctctccggggttggcaaacagcgggcctgtgggccaaggtgtctgttgttgtaaggccagtaaactaagaatggttttcacattttaaaatatttgaaaaaatattaatgacccaaaaattatatgaaattcaaactttaggacacactgaaaaaagatttatgggaacacagccgcgttcatgcatttatttattgtccatggctactttgtgttacaatggtccatctgggtgaatgaaactgtgtggcctgcaaagctaaaatattcacaagtttcctccttgtagaaaaggtctgccgatgcctgttctaaaccagattttactgccatcaactccgtgtgacctgaggctggcctcctgccttatctggatgcacctttgaaaggaaggggcctggagaaggtgctggcccggccgccagaactgcagggagcaggagcacccactggcgccacctacagcccattaggaaaatggcaggcaggaggctggctgcagtgggacactctctcacaggtctgtccccatctttggtggagccgccctcttaggttgagggctcttaaatgaactctctcccccaactaatgccatcaatgaacaaaaaacctcgcctttacacaccttttaaacagacagcccacaactccaaatagcaatacatcttccagcattcatttcaggaataaatgtgccccacaaaatagaagaaaagcacttatttccacagagaacttattaccacatctggctttttagttctgaaggaaaaataatgaaaaagctctgcagctcatgagtcaccattctcacccacaccacttcacaaggcccgctcagactcctgaaccttcatgccctaaaaaacacaggtgagcagacctcacagctgaggaaacccacaacaaaggaatgcaaatgactgggccaaggggtttgtctgccggctctgaaccaattctccctgggccaaggttcccgcccatgagggagacaggccagactctcaccccttcagagcaaacaacccggctcaaga

SEQ ID NO: 62492 - DNA, 1177 bp, Bovine  19866881241143
  misc_feature (1)..(1): n is a, c, g, or t
nttggaaagtccccaatctcttctaagtattcactgaaaaatatcacccatcccttagattgtcactgggaacaaataagcacagaacagtggctaagaaccccccaaggtgatctcatgggagccaccgtgacctattgcatggtcagcacctgaggctgaacttctgcagggccccaagaacattctcccgggtgatgacatccttgtcttcctccttcagcctttcctccagcatccgcagcacctttgtgctctgggcgaggtagcggcgacctggtaatatgacaagagatgaacaagtaagagattcatcttgtgttaagtttctgctctgaagccactttctatgaaaactgtgcatataacacatgtagagtttgggattcctttggtggctcagtggtaaagaatctgcctgccaatgcaggagatgcgggtttgatccctgtgtcggaaagatcctctggagaaggaaatggcaacccactccagtattcttgcctgggaaatcccagggacaggggagcctggcgggctacagttagtggggttgcaaagagtcagacacaacttagtgactaaacacaacaagaatgcaggtggttttatgttctagaaaacttagtaaagcatatttaatctgcaagttggtttcattcaaccaactaatgaatagaaaaccactttttctgtcatctgaacatgattcatcactgtgttcttgtggggagcactgtcttttatttacccacgatcttgagcccaaaagtcaaatcacaaggcgatgatggatctgtgttttatgagccctttagtcttaacattagaggcagccaagtagtactttctggacataccaatggcctggagaagttaggaaccacacttgggaccctattataagccttgaattgtcattagcctatggtaaacttgtatcttgatatagattacattaatttcagacataaatttcaacaatattatatcaatggtctctggcacatacgctggctaatcataaaatgtttgctaaatggatggaagaacaaacaaatgagaaaatttttggagtatcatatagtcacaatctaaaactccctttatttcatgttaaaaagagctcaaacaaatgagaatttattgaagataatggcattttgtaaaatcattt

SEQ ID NO: 62493 - DNA, 980 bp, Bovine  19866882086528
  misc_feature (1)..(1): n is a, c, g, or t
ngatccaagatctggagacagtcgcttacctggaagagttctttaaatgacgggtgcgccatggggttgggaacaaaaggcagggcatagaaaggcaggaactccgtggtctggctcagggccgcccctttggtctccaggaaggttttgaaataagaaatcctttcatccaggtcctctttgtcctgcaaggaagagaggatgtctgagatctccggcttgacgccagctcaccggttcacctgtcctccccccaaggctccctcagttccagccacgtcgctgccatcctcctcgcctggcccagcctgcgagctgtctgcagtcatccgaacatcaccccctgtttcaccccttcatgaaattgccagaatatcagagaactgcatgtataatatatatagtccaagtgctgccttttcactttatcattaccattttctgatatccttaaattcatcaatgtctttcttaatggcatgacaaaacctcatcttgtgggtctatcataatttatttaaccaatcccccattattagatatgtacatcgctttcatagtacagatagaaaaaaatatttgtctgcattcctctgatttccttaggaaaggtttttaagggtgaatagtttttttttttttttttttaatatggaacgctttcaaatttgcatgtcatccttgcacaggggccatgctaatcttcactgtgtcgttccgctgttttttttaagagtatatgtgctgccaaagcaagcacttaagggtgaacagttttttcaaacagccgtttccatatcattattcccttcttttattaagctaaccaggaattgaccttgccagcttcactacttcccgggtgtaaccccaggcaagtcgggttcccacccccaccccgatgggtctccacctccccctgggcctcagtgaagaaagtcttccctggcctcacctgttaggtccctcacagcctcata

SEQ ID NO: 62494 - DNA, 1317 bp, Bovine  19866880083650
  misc_feature (1)..(1): n is a, c, g, or t
nactttatttttggggctccaaatcactgcagatggtgattgcagccatgaaattaaaagacacttactccttggaagaaaagttatgaccaacctagatagcatattcaaaagcagagacattactttgccaacaaaggtccgtctagtcaaggctatggtttttcctgtggtcatgtatggatgtgagagttggactgtgaagaaggctgagcgccaaagaattgatgcttttgaactgtggtgttggagaagactcttgaaagtcccttggactgcaaggagatccaaccagtccattctgaagatcagccctgggtgttctttggaaggaatgatgctaaagctgaaactccagtactttgcccacctcatgtgaagagttgactcattggaaaagactctgatgctgggagggattgggggcaggaggagaaggggacgacagaggatgagatggctggatggcatcaccaactcaatggacgtgagtgtgagtgaactccgggaggtggtgatggacagggaggcctggcgtgctgtgattcatggggtcgcagacagtcggacacgactgagcgattgaactgaactgaatgctttaaaaacacacaaacatacaaacaaactcacaaagaaagagatcagatttgtaattaccagaggaaggggcggggaggagagggaactggaggaaagtagtcaagaagcacaatctccagtgataaggtgaatactggggatgtcatggacaacattacaagtgccattagccctgctgtatgttatatactaaagttcctgagagagcaaatcctaagagttattacacacacacacactcacaaacatttctatttctttaattttgggtctatatgagatgatggatgttcactacacttaatgtgacagtcacttcatgatgtaagtcaaatcattatgctgtacactataaacatacaatgctgtatgtcgattatgtctcaataaaattggaagaaaaaaaagaacttaaaatatacatgttactccatattaccaccatccttcatttggagagggaatgttatatataaatcggacataatcattctctgggaattcgctctttgacatcctcttacccgttcctgtagaagctccaccacctgctggacacagtcatttacatcacaggagtctgttttcagcactaattcaggggcctctggcttttcatattcagaatcaatcccagtgaaacctataaaaggtaacagatgatagagagggtggaaattaaaataggttgtttcttcagcgcaagtctctgct

SEQ ID NO: 62495 - DNA, 3173 bp, Bovine  19866880180909
  misc_feature (1)..(1): n is a, c, g, or t
ntttcctatttggacccagtctgttgtcccatgtccagttctaactgttgcttcctgacctgcatataggtttctcaagaggcaggtcaggtggtctggtattcccatctcttgaagaattttccacagtttattgtgatccacagtcaaaggtgcttttctctaattcataaataagcaaaaaaaggaacaaaaggaaaatgcatgaaacaaactgatattatgcctagtatcttcttaatactactgttttactccataaatttagttctaattgtttctcattaggcctacatttgttaaactctactgtttggtaggcagagcactaggttggaaatatgtacacgaatcacacacatatcctgtctttaatcatcttccagtccagtggaatagacaggcacagataatttcattttgttggggagcagtagcagatgaaccagaaacaaataactacgaattgaacaattttgaaattagattttcttgaatgttttgaagatgcaatgatttgtatacatgtagtgtaaactgtattttccatcaattaagtgttttcctaatttttgtgatggcactaaatgatggtgtgggggaggtgtaccagctgtaaaaccgggcttaaatctctgctcatgagcagagtgaatttttgagtttcaccttcttcatctgcattactagggtgataatgctttctatgcaggattgttgagaaagaaactgcgtgtaaagtgccagcacttgcttgcagatgtagaaatcttctttgctacatctcagttgagtgataatataataacacttttggatagtctaatgatgaggaataaattttctggtgacaaagtagtaatgattagaaataagtagggactcaaatgccaataattatgggttgcgctataatgtggggccatattattgctagggaacttgccaacttccaagtaaaaagttttcaaacctgtggtgattgatatatcactattttatcctccttatcattacttcctctgtgtattgtctcaggatattacaaactgagctagaatgtgctataggggtcatctcgtgttgcctcctctattttggaactgggaatgggaggccccagtctttctgttcattagtaataggcctaggagaactcacgtgtgttgagatcacagatcttttcactatcccacctgtcctcctaactgtgctttctgcaggtgacctcctggtcatttgtgtgcacacaaacacttttctgcagtctacctggtgccttacacatcaggcttctgggtgacactgatactattactctggttggttactctctttatatttcctttccccagaacttattttcttaatttttcaaatcaatgtcaaaccatttgacagatgttttccaaagtggccttttattgcttacttagagtgaaaatattaatgcttgtaacaaagctgtgctcatgttttcagtagactcattccccgactatcctgcccttaacagctggctttgtttcttccagtcctagactttaaaaagcacgttccttttcacttgttttgtgttaatatgtttcagaagtgttcattaaatggatcaatttttccacccctttcaacactagaaaacaaaacaagttgaatcatgtcaaaaacaagtagtctacagggatgaaataagtatcatggcctttctggatataatttaaaaatttgaggccatatcattttgtgaattctatagagactagttaaataccactagggaggaaaagtttgttatatagaaaaacaaatacttttttttttttttttatagctttgaatccctaagctttgaagaatttattatgaaagtgacccagtgatccatagactgggatttttatactacattgtcaggttatgaataaaataccctgttatataagacaaaagtattttaagatttattgcttttaaaatgcataagatgctttataccaatatatgatatggattccctcacaacatatattattgctattaacaatattaactattgttaattatgttaaaatatgctattaacatattttggcatgtaggatgtttgtaacctcagtattacaaaatacctcattgcccagatgtggctgctcattaagcatttcttgaggaacagagttgtctagaaagagcctcagaaatcacatgagaattttggatcaagatggagaagtgagaagatgtagggcccacaaacccatcaaaaatacatcaacatgaggatcaattcttattgaaaacctactggtggagggactcctgtacaaccaaggctgtaagaaggatacatccatgatcggcttggaaggagagaaagtcaatcaggttaggacctatgcccctgaggggactcagaagaaagggtgaatgcatgggcagacaccagccctgcggagtgactggtttaagctgcacatcggatgccctgatcctgaggtcttatccggagaagacaaacccttggaaggcctgctgagaccagcagaagggctgtgggagcttggactgcacttgtgaggagcacatgtgtgatggcttgcacaaaaagtaggacggagagaggtctgccctagtggctggtgggtttcccacgactgtctccccccagccccagcggagccaaggctctggccccgctccctctgcgtcacagcgtggcactggatctgagaaaaccataacgggaaaagatgaccatgggacgcagggcccacctggtcctgaactgaaagcctgctaaggccccccattgtttcatcacacctcacctctggggcaagagtcgagtgtgaagacagggtaaagcacaccttccctggtggttcagatgataaagaatctgcctgcaatgcaggagacacagctttgatccctggattgggcagatcccctggagaaggggagaaagaaatggcaacccactccagtattcttgtctgagagatcccttgtagagaggagcctggagggctgtagtccacggggtcacaaaagagtcacacatgactttgtgtattagggtttcccttgtggttcagttggtaaagaatctgcctgacctgggtcaggaagatcccctgagaaggaaaggcaacccattccagtattcttgc

SEQ ID NO: 62496 - DNA, 1253 bp, Bovine  19866880270623
  misc_feature (1)..(1): n is a, c, g, or t
nttggcttaaagctcaacattcagaaaactaagatcatggcatctggtcccatcacttaagggcaaatagatggggaaacagtggaaacagtgtcaaactttattttggggggcttcaaaatcactgcagttggtgactgcagccatgaaattaaaagacacttactccttggaaggaatgttatgaccaacctagatagcatattcaaaagcagagacattactttgccaacaaaggtctgtctagtcaaggctatggtttttccagtggtcatgtatggatgcgagagttggactgtgaagaaagccgagcaccaaagaattgatgcttttgaactgtggtgttggagaagactcttgagagtcccttggactgcaaagagatccaaccagtccatcctaaaggagatcagtcctgggtgttcattggaaggactgatgttgaagctaaactccaatactttcgccacctcatacaaagagttactcatggaaaagaccctgatgctgggagggattgggggcaggaggagaaggggtcgacagaggatgagatggctggatggcatcactgactcccatggacgtgagtctgagtggacgccgggagttggtgatggacagggaggcctggcgtgctgcgattcatggggtcgcaaagagtcggacacgactgagcgactgaactgaactgaactgaactgatactatgtaaggtccacaaggacaggggtgttttttcccctggcaaagtccatagtacaaaactactgcataaaaacccaaagaaatgagagaaaagtagcccaaaataaaactttacacagtatagtgtttcatttcttcacaagcttcaaactaaccctttcattgctaaattaaaccagagtgttttagtcccagtcactaattaaaaccaagtggcaaaaacagtacagtggttttacccattcattatgaacccacttaaaattcaatgaaatgtaaacagaaaatactgtggtagtgagaccacaggccctcagtgtgaccttttcaactcacctggctttcatcctgatattattagaactacttaatacaaggatgcattaactgaatatgacttacctaaatcttagtcagctgagagactgaaaacattttctacagtaccatgtttttgttttctggatctatagcacgagaggtggattaagaaatacctgtatgcaaacatgtatatttacctccctgaggggtaaacaattcaa

SEQ ID NO: 62497 - DNA, 2192 bp, Bovine  19866880403095
  misc_feature (1)..(1): n is a, c, g, or t
ncctgatcctgcagcaggccatcgccaacccatgcttctcccagagactcctggacattcgtaggcaagctggggcagtctcctgtggggtcactgctcctttctcctgggtcctggtgtgcacaagattttgtttgtgccctccaagagtctgtttccccagttttgtgcaagttctggtggctctatggtggtgttaatggtgacctcctccaagagggtttaatgccatacccaggtctgctgcacccagagcccctgcccctgtggcaggccactgatgacccttaactctgcaggagaacactcaaacacagttctggctcagtctctgtggggtctctgggtcctggtgtgcaaggttcatttgagccctctgagcatctctggcaggtatggggtttgactctaaatgaaatttcgccccttcttccatcttgctggggcttatcctttgccattggatgtgaggtatcttattttggtgggatccaacattctcctgtcgatggttgttcaccagtgagttgtaattttggagttcttgcaagagaagatgagtgcactctgccatcttagtcagatggaagttatatcaccctaaaaaatcataaactttacagaagtaatgactagaaaaccatgtcttaaagttcttataattcttacttgagtgcagaacagacatacatatccactgaataaatgttgaataactaacaacaaatgaacagagggatgatggatcagatcagatcagatcagtcgctcagtcatgtccaactctttgcgatcccatgaatcgcagcacgccaggcctccctgtccatcactaactcctggagttcacccagactcacgtccaccgagtcagtaatgccatccagccatctcatcctctgtcatccccttctcctcctgcccccaatccctcccagcatcagagtcttttccagtgagtcaactcttcacatgaggtggccaaagtacttggagtttcagctttagcatcaggatacacttctctatttaatattttgatttctaagtaaatgacatggaacttaaggagcaagtgagagagagagagaatctgtgatgacagcacattggcccctggaattattaaaatgtttaatcagatagaagatttggggcccctaaataaaggccaggagcataggtaatcagcacagtcttagcagcaggagaaaaccaaatcaaaccaaaccccacttcattctcccatccccatgcccatacacacttgcacagttggaagcgagaggcaatttactggcacccagtacaagtcctttctggaagtgattattgtcacaaatccacttttagtcaaaggtgttaaaaaatgagatggagaccatccaattcttacttactttttgtgaggaactgttaaagagtgatacaagtggatagaaaagaaggtgggaagggaaagagacagaatagactacaggagaccaaataaaaagttcaaagtggaaagcaaaagtaacacttcatcattcccaatttcctcttgggctctgttgactaactggagtttcatcattacctgatgagaggccagctttgaagagctcagaggattcctttaaagtctttggatctcatctcaagttgaaggatgcacaagtgaagctcccaaccatcttgatgtgtttacaaggttctactaaacctgtcctaatgaaaatgtcagctgaccttgaatgtttaccagatctcagtaagcatatattggaaattcagaagaaatacactatagccaaaagagactacacaaaagacagaagccagagtcttatgaactgttccttctttgaagccctttctaaaaagaaggaagtcaagggcatctctgtctactcttaccaacatccacttaactatgtagagtcaaagtaaaaaatatgagtgttctgtggagaataagcccctctccactgtgaatgctattaagtgtagagtctttagttaagcagataaactaagcccactcattctcagattcttcatcattcttatctctgcagaaaagaccccctggaacttcctactgttctcccaggttaatttgcctcatctcatccttcaaatttcccagaggcatctttgtagcagaaactcccagtgagtttataaattatctttcccttaacctgaca

SEQ ID NO: 62498 - DNA, 1949 bp, Bovine  19866880416916
  misc_feature (1)..(1): n is a, c, g, or t
ncagcatcaggccacacaccccccttcctgacaatgcatgctaacttacttcctgcggcagtacctggcccaacttctcttgtggcctggagtcaaactggcatcccagatcaaggttttgacaagtgtagggaagaggatctaagccttggaaagtacatacttgctttttatttctgtagcaaagcattcttgtactctgggaaagggaggaatgtgccttgcttttagatagcagagggttgagatgccaaagactaacatgtggaatggaaaaaatgattaaggcctagaagagggtcaattttaagtgtctgccagatagaaatgaatatttgatcatcctctcatactttccattttggttttgaatctgacagaaacttttctggttaaggagggatctactcaagttagcaaagaattgggtgttttgattatggaggagcctacctcaaagggctgaaaattattttactatttctaagtaattatccacatatcactatgtcatatcaaaagccaagagacattttacgttagtatggattttttttttttctattttggactgctgctgctgctgctaagtcgcttcagtcgtgtccaactctgtgcaattcataaataattaaatataaagatggagagacaggaaataactaactaactgaagaacctcactttccttccctatattaaccttgccaaactttaaccaacagtgttcccgacccacaatatccataaagatcttcttgaactgggtttattcatggttcaaagatgcttagtaaatgcattgcattggctatatgctgattaaaatcatcttcctaagttttaatcttttaaagattccaggccaaagaaaaaagaatctgatgtataaaggatagttagaatactcttaaaatcacacaaaaggaaaataactttaatggcctttaggaaggatggttaaattgcatttggaaaggatgactttcaccccgtggtaacctttatatgtcacatatatccatttgacatatattctctaattattttttacattagaagtttgggaaatgttttaaaaactaaaaaagtattgaatcatgcctagaatttcagaatgccaccatcattacaattctccacatgactttaaaatttcatttttgccattcacttttatttcccgggagaaggaaacattctaagccagaacacaattagtatagctctcaccatggcaatgttctttaaaaatatctttcatctaaacttacataaaagcagaaatagatcagttacctgaagaggcactctatgcagaaatgtgtcataccagttgctgtaaaataaaaaaaaaaaaaaaagaaagaaagatcagtaaatatctaactaatagagactctcccaggtaactgtgtataaataatatctccacagaaggcttttcttttcttgccaaaatccatttatgtctcaaaaatccaccccagctgtgaaatgcagacattcacacaggctataggaagtgttttgtattattggaggatggaagaactttatggagggcttcccaagtggtgctattggtaaagaatctgtctgccagtgaggagacacaggggacttgggttcgatccctgggtcgggaagacaccctggataaggaaacagcaacccactccagtattcttgcctggagaattccatggacagaggagcctggtgggctacagtccacaggtctcaaagagttggacatgactgagcacacagcacagaactttacagaggtctgtactaatgtcaacaaaattgagttagaattacatttcccagaatcccttgactgtgtgtttctggtgtagacatggccaaaagagaactgtgtgtgagatctgaagggctgagatgaagctgcagatgtgaagctctgaaggttgagcggggca

SEQ ID NO: 62499 - DNA, 1337 bp, Bovine  19866880425077
  misc_feature (1)..(1): n is a, c, g, or t
ntatatcatgaaggcaaacaaaggtattcttgaggtttatgttgtagaaacaagtcacagggctcaaagttctctactttcaagcttgggtaaatggaagaaaatatccctagcttttgagaaaaatcttaaaatcttgaacatctcttgttaaagccaagagggacaattgacagttactctgtccaagtaaagaacaagaatttgcaaactccatccccctgtttttcctattagattcaatgtgttatttgaatttcattgtgtaagtaaccatgcatttccacatattcttatttaatttgcataaaattctgtgatataggtttaccactacttttcttttatggatgaagaaatgaagttcagagaattggaaatgaattacctaaggtcagcaagctttagaatcagactcagactgagtccctccaggccaccctgctgtatgccagagtcctggcaacaattctattaatattatatttcatcaaccatcgtgccatcctctgttgttgcccaaaggttgtaactgttttcagagcctcttgaactttggtaccctgagcatattctgtgcttagatgacaaaatgactgaggtttgttaatttatcactgcagagttttgaataaagtcatatggaaaagtcaacaaacagtattcttgctccataaaagtacgtgatgaatttatttcaagagtacactaagagaaactaggcttattgaaatgttagttggaggggggcatgtggtagacaatatcttagggaatagcttgatgtgagtattattttacaaaaagcaaaaggcaagtaaaatgcaaaaaagaaacaagatgggttcacggatttttccttgtgaaacagattgccttaaatggatacagctttaaaatttgactatatctggcaacattcggaacttaaaagtctcttatagaatgtgactctaaatggagaaccctttaaatatatggagagatagcacttagattaatagatcttcagaaaagctcattctttgatgatggggtttttaataggcatcagtctgttgtgcacagcactcactttttcccagagcaaaatggtttatcacacatgctggagtctactagaatatcagcctgccattctgggcactggcgaggtcctgaccatatgttcaaaaatgaaaaagatcaaagagctaataggtagtggtcaacatgtctctagtcagtacagaagaagaaacaaaacagggcagcagcccttcagttcagcaactgtggtaggaagcgccccaaatcactaccacagcacgaacggcaagtgacactgggaacagggg

SEQ ID NO: 62500 - DNA, 3388 bp, Bovine  19866880443228
  misc_feature (1)..(1): n is a, c, g, or t
nacataaatgactccactgtctattccaattttactacataagccagatcaaaagagaaataagccaatccagagatgccagaaccaaaaatactcttcatcctaaaataccctttgtagagcaccctaaaaatatttttttctcagtgaaaatcgattctatatattagcaatgataaaataaaaatttgtattataaagcatccacctgcaacacgggagacctgggtttgatccctgggttgggaagatcctctggagaagggcatggcaactcactccagcattcctgcctggaaaatcccatggacagaaaagcctggcaggctacggtccatgaggtcacaaagaagtgacacaagcgactttgcacatttgaccccaataaaaattttccatttctttcttagatggactgattaattttttgttggtagtagagaatactgaagaaacaatacctggtagaattcacttcgttaagtctctccaataccaagcagcagatagaaaaaaattccacccatcaccaggggaggcagcacttctcaatcttggaacaaataacttcaccttcctgaatttgttttctcatcagtaaaacgaggaaaattacaactactttccagaatcttacaaattcaatgcaataatgctactgaagcgactaccaaaggcttttgcacatggtaagagtcctcgcaggagttcttgttgcagatttccacctctgtccatgccatctccttccactcacaattacattcttacacgtaatgctggtcaacacagacccaccaataaatcttcacatccccactcacacactctataaacctatggagatgtggttactattctttgctttaaaataccactgtattcaacatattcattctttccactcccaatctatatttgtgacatttggccacctgatgcagagagttaactcattggaaaaggccctgatgctgagaaagattgagggcaggaggagaaagggatgacagaggatgagatggttggatggcatcacaggctcaatgaacatgagtttgagcaaactccaggagatagtgaaggcacagggaagcctggaatactacagtccacagggtcacaaagagtcaaacacaactgagcgactgaacaacaacccacctttggaaaccctaacaaatggctttgtgatgacaatgaagttcaactgcactggctactcctggatcaccatgtagaaagtttgttagaaaaagtgcacattatagtaagtcaccttgtgatcagggtgctgcaggcaagcaaactccttgcatcaccataaacttcgagctgaatttcaagtattcactggtttccccatgtgccctaatgctcatttgagattcaacttcgtgagaaagtcaatcaaaagagaacaaacatcagaagagaagtacttatgtatgtgtgtgaatttctttcttgaattttttaaaaattctatctcatgttataaaagaaaagaatttatacagtcattctagcttataattataaataatggttctaagaaccaaatatccaaaaataaaggttgtaaggaacaaagctagtggaggtgatggaattctagctgagctatttcaaatcctataagaggatattaaagtactatactctatatgccagcaaatatggaaaacagcagtgaccacaagactggaaaaggtcagttttcattccaatcccaaagaagggcaatgccaaagaatgttaaaactaccacacaactgcactcatttcacatactagcaaggtaatgctcaaaattctccaagttaggcttcaacagtacctaaaccgagaaattctagatgttcaagctggatttagaaaaggcagaggaaccagagatcaaatcgccaacatcctttggatcatagaaaaagctagagaattccagaaaaacatctacttctccctcactgactatgcttcacagcctttgactgtgtggtggtggtttagaagctaagtcgtgtacaactcttgcgaccccatagactgtagcctgccaggctcctctgtccttgattctccaggcaagaatcctggagtgggttgccatttccttgcactgtgtgtatcacaacaaactgtggaaaattctgaaagagatgggaataccagaccaccttacctgcctcctgagaaacctgtatgcagttcaagaagcaacagatagaactggacatgaaacaatggactggttccaaatcaggaaaggagtacgtcaaggctctatattgtcaccctgcttatttaacttatatgcagagtacatcatgcgaaatgccaggctggatgaagcacaagctggaatcaagattgcagggagaaatatcaataacctcagatatgcagatgacaccacactcatggcagaaagtgaagaggaattaaagagcctgtagatgaaagtgaaagaggagagtgaaaaagccggcttaaaactcaacattcaaaaaatgaagatcatggtatctggtcccatcacttcatggcaaatagatggggaaaaaatggaaacagtgacagactttattttcttgggctccaaaatcactgtagatagtgactgcagccatgaaattaaaagacacttgctccctggaaggacaaacctagactgtgtattaaaaaccagagacattactttgccaacaacaaagctatggttcttccagtagccttggatgtgagacttggaccataaaaaaggctgaagttggtgcttttgagctgtgtgttggagaagactcttgagagtcgcttggactgcaaggagaccaaaccagtcaatcgtaaaggaaatcaatcttgaatattggaagaactgatgctgaagctgaagctccaatactctggccacctgatgtgaagagccaactaagtagaaacgaccttgatgatgggaaagattgaaggcaggaggagaaggggacgaaagaggatgagatggttggatggcatcactgactcaatagacgtgagtttgagcaagctctgggagatcatgaaggacagggagcctggcgtgctgcagtccatgggggtctcgaagagtaggacacaactgagcaattgaacaacaaaggaccaaaaattaaggttcatgaggcaggaatgtgtactgtgtaattcactgccacacacacagtggtttgcacggtgcctagtatgtacggcaccgagtatctgctaaattaatttacaggatcgatcagtacaagcagaaatacatactttcaaatgtgaagtgaaataatttccttaggaaagcatataattgaaatccttccccaaaagagggtggtacctaaaaagcaacgcgtcaagaaag

SEQ ID NO: 62501 - DNA, 2394 bp, Bovine  19866880462098
  misc_feature (1)..(1): n is a, c, g, or t
nctagaaatcaaataccacgtatttcaattcccaccagaggttcagttagaaatagaatccttctttgcttcctgccctacgccggcatgctgttacagggcatgcactgttttaacagctgcagagtcttagctcaggggtgacggaattgcgctggtgatgttgatccctatatggagctaaagctaagaggaaacttgatcatttgcagaatgatttaggaattgaaggtgagttatgctctctgtatgaggataatgagttaagaaagttgaaagaatgtgaagtcttagtaccagttttgcttagtaaacctagtataggactttctctttttagaccaagaatgaacagcagagacaaaaatgtgcaaatagtaaattttaaacaattaaaatatgaacattcaaatatacatctgagcatctggaacaatcaaatggcaagatgtcatttgcttattttctttttctgtagttttctatcctccttttctagctctgcttctattactgttttcacctcacatgtaagaactaagtgagaagacatctgctccttatatccatgtattcctgtagtccactaaaagttttgtcttgtatcaagagcaaacttgatcatgcgttatgaacaccaagaaggtccaatgtaacacagatggctagagccccactcccagaatttctgattcagtaggtctagggtagagctccagaatttacatttgtaaggtattcccagatgacacttttgctgctggtcgagggaccacaccagacaagcactgttgtcagttaaggccttgctgaaaggcttggcaaaagcaagccacctagagggaaaagggtaatgcaaatgaattgtttggggaaaacatggggaagggaaagactggctccctcagtctgagttgtgaaaggttcgtcattattcttgtctctgaagtctcctccgccaaccctgcttcattcttctgaatctggggctagaggttactcttcaaagcaagagggaagctgtgtttattgaatttgaattcattgattaagtgtattcatggctttgagaatattaataaagagtaagttttaacacctgggttttaaatgtttggtggcgttgtgagaaatgtaaatacagcattcattaaatatatataatgaacctaggacatgatggcaggaaagatggtgacctggcctcattttcatttgttcagaatattgcatggttaaagagggcattttttcattggcatgttacttgaattctgctgtgtgtcaaagtattcagttttttttttctcctgcctgcagatgatgccttttagttaatatttcttttcatatacttactacatgtaatctgtatttattttcttctttttgccagagtctccttcaatctcctcatattctttacttctaatttcacatattactacctttactttgctcatttttagtgctctagtgattttttctgttaccacttcaactttttttttcgcttccactcacacctttttcagtatcttttaaaatatagtgggatatgtgattatttctctttggctagaaccactttgttttataaaacattttggaatatctttccgtgatatacacaaaacccagaaatacatgcatacaataaaaagccaaggccatgaaaaatatagaagaaaaaagcaaactcagaaaatttgtaattaagaaatgtatactataaagaccttagtaataacatacctctaattaatacaattaactctgagcttcttggcagttgaagcaaaaaagagatgtgattagtttagaggaattgtattatcacttaaggagaagacatgttacttgtttgtaaggtcaggctcaaaggcccacgtcttgagtgggtctttgtacagaggattctggttaatatagtggatgacattttaatagcgttattgagtaactgtagtagcccatttcataaagcattttcagggcacccattaatgtaagccagggggataatgtcaaagtacaacaaagaaagtatcttgtcagaggttaagtaaatatcacagcatgattcaggggttaaaaattaggatgtctagagagaggcatacacttcatttttttcaaaacaatctctagaaatgaaattcctttcaaatgacttctgatagaagtcagctagcaaacaatttggaagtatgttctctggtaataaataattctttgttacttattaaggacagactcagtattttaaaaataaaccgactgaacaggagggttgacaactttttgtggaaaccagatcgaaacttaacactactttttgaatagatgactgcccaatttccacattgaagtgggccaacggaataaacaggt

SEQ ID NO: 62502 - DNA, 2208 bp, Bovine  19866880503649
  misc_feature (1)..(1): n is a, c, g, or t
ntaaatattttgctccttatagtctcatggaaattttcaatattaaaggtaaaaattactcatatttttatgctattatagtctactgccttgtcattattgatcttttcagatatttataacaacatctagcattatttaatgatcagttaattgggatcttgtgtttccagctatactttcttccttcagcaaatatggctttctaacttggggcatacacttttgttttatgggcctgaacaagcccatagacataatatttcaacttgtgcatggttggcacatatagtgttttttccacccccaaagcaattctgacttgcaacagtgttttagagctgcccactttatgtggggcatcatttctccacgttgtcattctcataatagctccctattctagccattaatgttcacttttttcattcaggaggtgtatttgtggccttaggcctgtcctcttcatgcctttaagatatgtgcttgatccctggtcgagagtaagagagagagctagaatagtggagaatgagactattgaaaggatggaaaagtagtccttttatatttacacaggttcctatagttttcatctcagattatggatttaatattcttaattcttaaagaagaagaacgaagcagttgtatttgtcttaacttagtacctatttctccaagagattggaactgaataagggaacagataaacctgcattattcaactaatggaagaaagatttaatcaaaaggaaagttggtaaaaggcaactttctatgggaaaagaggctagagggtagagaagacctattttctttttctcttccattagttggaggcaaaatcttgctgttcccttaaactttaaattaagtttaaatttaagttcttgcctttgtcgtggtgagacatttacctagagaaaaatctgttagtaccatagctagtgattcagtatgcacagaaattactatggagaacataggttcccttttaatgaatatacacgggcaataggtaaaagcaaagtatgtgaaatgatatacagtgttttattttacatttacctcagataagaggaaactaggaaggctcagaaaaattttgttcttagactgctcatttctttctccattaatttgtatttcctttgagcaaagtggataactttgcattatgaaacgtattgtgtttgtagaagcagtactctttgtaggcccatctggtgggggaacttgttcccttttgtaaaaaaccttgcctgtgtcttatgacatcattccttataaaggtagagatagattattgtgcacatataacataatgaatttatatgagatatagtgactatcccatgagtgagggaacaagacataatttggagttggagcctagagtgatttatgaaggtcattgtcttacaagttcagatgctttccatatggcgttggagaaacccccttatgtactgtatgtataaaacatatgtagcaaattagtttcacttacattttttccccctaaatatgttttggtttaaaaatgacagtgtcttttgtttatctgtaaaatgctatatcttttttttttttttttctaagagagggattattaataagaaatgagagtttttaaatgaggctgacagaatcaagtgtgagcccctttgacactgggccttgctgtggcttgggtgccaaagtttcccatctcattggatttatggcttaacttctgtatcacgcttaacttgagtgtgctcagcaatgtgaccttgtctgggaagaggaaaaatggatggttcattttccagctgtagtgtattatatttccatctaattgcattttcaaatagatgtgaagatgcaactacttccacttaaaaggaaattgcactacttagagaaacatggagaatggattgggagtaataatcagaatcgaaagtattttatgcctaaaagaataagcttttgtttgacctaagcagcaatcctattgatggatttggggtttttttgttttgttttgtctttgtctcattgttttagttgtgaagacttaaagggtgcatgccctcagacttttgtccagttttttctaaacctttaggaattgtctgattttataaaccttcacccactaaaatctatagtctacgtattcctttttaatactaaaaagcatgagtgcttttgcaaatt

SEQ ID NO: 62503 - DNA, 4039 bp, Bovine  19866880531067
  misc_feature (1)..(1): n is a, c, g, or t
ntaataaaagcatctttgtttttcttggtgaaattacctgcgccccattgccctgctcttagttcatgtgacttcagagtggacacaggacccagaccttgaaactcagcattctatccttggccgcagaagctgattcttagtgtcaaggtgaggcatttgctggaaacagtggaatgagaagttctcctgccaagatttcttaatttgcaagaggtaagataggggagggcttccctggtggctcagtcagtaagcgtctgcctgcaatacaggaaacctgggtttgatccctgcaacaggaagatcccctggagaaggaaatggtaacccactctagtattcttgcctgggaaatcccatggacagaggagactggtaggctacaggccatggggttgcaggagttggacatgactgagcgactaaacctacttacctacctaagatacaaaagcacctactcaagaaagaaggctcttcaaggggaaaactgagtcaagagacagagaaaggttactagttacagtttgagccaaatctgaagtctaatataagaggacctgttatgagaactgacaaactttcctttttgtctaagttatttcaaggtagaggattttgccatgcaggtcaaaagagccttataacaaaatacactgaatttggaataaacagttaaaattttccagcctagaaacaaatagagaacatttgttacttgagcaaataagtatactttccattaagtttaagcttagcacaaactagagttcaggtttaactagggccaaaatgtttgagaatttactacagaactatcatcctatgtgatagataccaaaattgcttatgattttctaatatggaaatataccttaagattaaaaagttctttttcagattgaaatgtattttattattcacatactttggatctggtaattttatatgaaatggaactgtaaggagaatctcttaaactcttttgatttataatgcctattatatattattaaatttataaatactttttgattttaaataactctcaggattattaagggcttccctagtggctcagatggtaaagaatctgcctgcaacacagaagacccaggttttgatccctgggttgggaagatcccctggagaagggaatggctacccactctagtattcttgcctggagaattccatggacaaaggagcctggcgggctacagtccatggggtcatatagagtcagacatgactgagcaactaaactttcactttcaggataattaggttgcaataaataaaaatttacccaagtttgcatagaaagtttgaagcacatgagagaagaaatttgatggcacctgaggataagactgcacatggtgactgcagccatgaaattaaaagacgcttactccttggaaagaaagttatgaccaacctagacagcatattgaaaagcagagacattactttgccaacaaaagtctgtctagtcaaggctatggtttttcctgtggtcatgtatggatgtgaaagttggactgtgaagaaagctgagcactgaaaaattgatgcttttgaactgtggtgttggagaagactcttgagagtcccttggactgcaaggagatccaaccagtccattctgaaggagatcagccctgggacttctttggaaggaatgatgctaaagctgaaactccagtcctttggccacctcatgcgaagagttgactcattagaaaagactctgatgctgggagggattgggggcaggaggagaaggggatgacagaggatgagatggctggatggcatcactgactcgatggacgtgaaatctgagtgaactccgggagttggtgatagacagggaggcctggcgtgctgcgattcatggggtcgcaaagagttggacacgactgagcgactgaactgaactgaactaagacacagaagcacaattcagcttgatcacactggcctaggcctgataactgagaaccctctgtttttcatgagactccccgcttcctgttcttgcctacctttgtgctactgcttaattctgctgtttttgtttttgtttttctgaaaaccacacttctttgctgacttgttgcagtcttctctttataactggatttggctttttttttttggagagccaacttccagtaatatctctttgttatcttgggactcagtttttcttagcaggatgaatcagtcagtttgatttttctaaattccaaattcctggtcaagagaatctgcttggttccctttgggggcagggtcatctggtacaaagaatctacctggattcaccatttcccatagtggaagcatccagtggggacaggtacttttcaggaggaaggcagggattaatttttctactgcagagagtaatatataaataatcttgattaccacaaaaataattacattctttctcactaggggaacataaagagatagccttacaaaatgatttgaatcattaattcataatttcagggtactattgcatggtttgtgttccacacagagcactttggtttctattaagagtaaattaaaatatacataagttagaagactctttagacatgttcaaaattattctgtccattatgttttagaaagttggaaatcaacagtattgcctctatagcattcattaatgtatggtatatttctgaacaaaagaaagattttagaaacaacccagacattaattcactctgataattgtttagagaagttggtttcactggaaaattgaggagggacaaaggaaatgaaaaaaaaaatcaatgactaacctacaagatcaattgaaaaattcaaaattgtttctgatgttacaactgacctaatttctcaaaacatcataaaataatttaaaacatattcatatagctatagataatatttatctaaagcaaagaaattgtaaccatacaaaatcaaatgcgtctgatttcgttttagggaatctttatgacctaatatgcaaagcaattttggaggaaactaaagtaaaaaatttaatctctcagagatctgatatttttttctgaaatgtgacatattgaaataatctctactaaaaggagtactgatgaggcaattgagcaaacgatattagttcaaaagatgaaagaagcaaatgacatattagcaatcaacaatataaatatataaaataaaaaatatacaatacttgctgtaactgtttagggtttctctactgcttgatatttcaagctcataaaggtgatttgatgatttttcactaatgaagcaatctggacatgaaattatgcttatgtttaactacagaaaaaaattaagaaagagattgattaaaggaactgccaggagaaatatcaataacctcagatatgcagatgacaccaccctatggcagaaagtgaagaagaactaaagagcctcttgatgaaagtgaaagaggagagtgcaaaaggcttaaagctcaacattcaaaaactaagatcatggcatccggtctcgtcacttcatggaaaatagatggagaaacagtggaaacagtggcagactttatttctggggcctccaaaatcatggcagatgatgactgcagccatgaaattaaaagacgcttactctttggaaggaaagttatgaccaacctacacagcatatcaaaaagcagagacattactttgtcaacaaaggtccgtctagtcaaggctatggtttttccagttgtcatatatagatgtgagagttggactataaagaaagatgagtgcagaagaattgatgcttttgaactgtggtgttggagaagactcttgagagtcccttggactgcaaggagatccaaccagttaatcctaaaggaaatcagtcctaagtgttctttggaaggactgattatttaaataatcactattagaaacaaaacaagaatggtttaaattgttacaatctaattccagaggaagaagacaaatttttcctaataaagccacatgtt

SEQ ID NO: 62504 - DNA, 2572 bp, Bovine  19866880673259
  misc_feature (1)..(1): n is a, c, g, or t
nagttagacatgacttagcaacaacaaaaaaaaaagattagatgctccaactgaaagacacaaactggctcaatggatacaaaaacaaacccctatatatgctgtctacaagagacccacctcagatctagggacacacatagactgaaaataagatgggaaaatgtattccatgcaaatagaaatctgaacagcaataatcatgcaaaaagaaaacttgaatagcagtaatcatatcacataaaatagattttaagcagttataagagaccaagaaagacactctgtaatgatcaagggatcaatccaagaagaaaatataacacttataaacatatatgcacccaatagagaagcacctcaatatataaggcaaatactaatagccttaaggaataaattgacagtaacacaataatagtggggggttttcacatcccacttttatcaatgcagagatcatacagacagaaaatcaataaggaaatgcaacccttaaatgatacattaaaccagatggttgtaattgatattgttgtaattgatagagcatttcatccaaaagcagaatacacagtcttatgaagtgcacatggaacattttccagaactgatcacatgctgtgccacagagcaagccttggcaaattcaagaaaatctaaatcatatcaagcaccttttctaaccacaacactctgagattagaaatcaacaacaagaaaaaaactgtaaagatcacaaacacatggaggtgaaacaatacactactaaacaaccaatggctcactgaagaaatcaaagaggaaataaaaaaatccctagagacaaatgaaaatgaaagcacgatacagcaaaagtagttctaaaagggaagtttatagcaatacaaggaaacaagaaaagtctccaataaacaatctaaccttatgtctcagcatctaaagaaagaagagcaaacaaaacccaaagttagtagaagaaaagaaatcatgcagagcagagataaatggagacaaagaaaacaatataaaagatcaatgaaactaaaagctggctcttctaaaatggataaacttccagccagactcatcaagaaaaagagtgaaagggctcaaatcggtaaaacgagaaaaggaaaagacttgattggaccattccctctcgtaagtttaaggacaattacacagttccacctccccctagttcttgtacaaattgtggatgatgtcacagaacttcaatgtgttattacttttatttttttggacagtgaaagaagagggtctcagaaaataaggaatctctttccttgtaaaatatctttctcacatttcagaataatagtaatattatttatcaggaaaaaacgaacagccttggtcatagatttctttcagttgcccatgatacatgtttatagaggccagataagtgaagtttgctgtttctctttcctctcttgctgaatcagcatgggaaaggcaatgtaagaaagagtaccatactagtctcacagttggaacaccaagattttcatgcttattccttcttatctttctactacagatagatgaatatctctatacctcttacaacctagtacatgaaataaaaggtagaccaaaaacttttgttgtctaactgcatgaatatacattaatgtacaataataatcatgaagccttaataaaaatctctaaacattcagacatatgaactacatatttacaatcaatcaggcagcaaaataaatcaaattgacgtgagactgtaacactgtgaacaagggaacatcaacatatatgatttgaagttgaaagagacgatgtttcacacaataacacagatatttgctatgaggaacctaaaagcacaactaagaaaggtatgatctggatttcctaatttctgcaagaccaaaagtcttagaattaacaaatggaaaactaatcttcagtttgattctgcttgtacccatcctcccagtttcatgcacgttccccatccctgcactgcacaagcctcaagcatctgcctgtcatctgtcattcctcccactgcccatgctgtgccatccctgctcatgtgatgtttccctttagtggaagataaaagcacttcctggtagatgaaacacgttcctagaactaaaatgaatggttccaaagccaaaagctgcagcgcactgatgctttcattcacaaaggaagcaataattcagaagattcatagctgatgggcttttgccatctcagcataaaatacactggcgtttacctaaacaactgattccccatcccctcaggggcaacacatcaaaactcttattttgtgccttccttataaactgctagttttacactctgagtatttattagggcaagcatttactcactcaaaagaaatgcttaataacaggatatttggatataacataataatatatgctaatattatgcagcctgtcattttccaacaaatcagtttttgtccaccgaacttactttaggacatacgatcaagtacaggtttgaatgacacggtttaacaaataaagttttccatcatgta

SEQ ID NO: 62505 - DNA, 813 bp, Bovine  19866880722980
  misc_feature (1)..(1): n is a, c, g, or t
naatccaccttataactgagaccaaaatcaagaatataacaagtctcaaagcatagacaatcttaagacattatttaagaatgccttctcctcaggaattgtccttactctcttagagccttggtaagaacaaggcaaggcttctaatctttcatttatcaatctctctttgagttctttccaaacggttggtcctgttttagtaggagatattcaagataatgtaccttgaacaggagatgacgattctaaatctctctctgctccacaattaagttttatccacttgatggttacaagggtgagttccttgtgcacagaagaagggatgtatgcccagtatatgaagacccccaaaactccctgtgttctttcacaaactgccccaattgctattaaaataatgtcatgaaacatctacatcttccccagtatcacatgctggactgggcataaaaggactatttgcatactactaatttgtgggtagggcttccctggtggctcaactggtaaagaatccacctgcaatgtgggagacctgggttcaatccctgggttggaaagatcccctggaaaagggaatggctacccactccagtattctggcctggagaattccacagactatagcccatggggttgcaaagagttggacacaactgagcgactttcactttcccttttcactatttgtggacttagttccaatcctgcatattacttctatttcttcccaaggactggcctttgctggacttaccgttctctctctatttgatcctcgctatctaaactcataaagccatctct

SEQ ID NO: 62506 - DNA, 1574 bp, Bovine  19866880751054
  misc_feature (1)..(1): n is a, c, g, or t
ntaaaatatggcaagagatattagagaagcataattggattgatgagctatttgatgcatttaaagtcttatctgtgaaatcagaagtagagccctccttaaacttctcatacattagaaattgtgatggctatcaaacaagtattaattagaaaagactgagaaatcatctagtccaactcttttattttatagattaaggaaagagagatccaaagaagctaagatctgttttcatggtcacacagttaataaattagtatagataacttctagttagttaggaattatctaactcctatcatttatcattttagttctcttatcataccctgacttcattaattaaagtgacagtgacaatttgagcaaccccagaacctctaatactcatctttctatatgacacataggtgtagaacttgtgtttggaaaattcctggtgaattgcagtggacctcttaagaatttccccatttttattctctttccacaatccccaaaaactaggccacagaaacaccaattcactggaatttaatggttttcttttttcttatgtgctttgagagcagaatctcttaaagctcgtatctaaattcagacatgtgatgtgctttctgatgtcgcttttaacacaaaagccaaaagttgctgaagcatctcaaaattcctggcttcaatacagagttgtaatacagtgttataaaacgtctcactcccagcatggtgaatcacatgcactttcatccactgtgtgaaaattcattaattttaaaaacttccaccctttatgattagaggaaacagttgcttaagtggaaaagtaaaatgcaaatatgagtcaatacagaatgtgatttcaaaatggggagtggagtattggaattaattattttcttgtttattatcaagagtgatcactttttcaggataccaaaaaaacaacctcagaaataagctttagcaaatagctaaagtatgtctaattaattatatgcaactatcatataattaataacaccattactgagaaacaggctctacattatctagtccaaccttctgttattatgacatcagatattaggttttcttttttgtggagatttttatgctaaattgcttggtaaaaatttgtttttgtgtttcttataaagaaattcagtgcgttagaatattccatggataaacagggagcttaggcccccaacaacccactccagtattcttgcctagagaatcccagggacggaggagcctggtgggctgtggtctacggggttgcacagagttggacatgactgaagcgacgtagcagcagcagcaggcctccaagggtctcctctttatttctttaatattaatgaaagaaattggaggtcataaagactgctcttattatcaaaatgttctctatgatttttaacatctagagaagaaattcttatgtggcaacatcaaagcttaagctagtaagacttattttattggctagaagatgatacagttagttttcctctttacaaaaggaaggtttgactatttttatggcttaataggttctataaatg

SEQ ID NO: 62507 - DNA, 1659 bp, Bovine  19866880793518
  misc_feature (1)..(1): n is a, c, g, or t
naatggactggttggatctccttgcagtccaagggactccccagagtcttctccaacaccacagttcaaaagcatcaattcttcggggctcagccttcttcacagtccaactctcacatcccatacatgaccacaggaaaaaccatagccttgactagatggacctttgttggcaaagtaatgtctctgcttttgaatatactatctaggttggacataactttccttccaaggagtaagcgtcttttaatttcatggctgcagtcaccatctgcagtgattttgaagcccagttaccaaataaccaattgaggtatgcagtataatgcccatttgctccttgaatagaagcttccactctgagtaaaagcctctggtactaaaagtagtttagtgttaagtgttgcaaaatcgatggtgcaagttttgcttagattaaaaaatccatagtcattttgtctaaatcttataaacaacattgtttattctaattgaaatgagtgttatatttttgatgaattaaacaaacactggaatttaatctctagctattaacatcacttcaaaactattagactggtttttcacactgttaacactaaaaaataaaaatccatagtaaaagcaaatttgccgttaatcaaggatcattcttcttaaaagtaagaatttattagatatctagcaaattttaagtccaacaagtaagttttagtggatttttatcttgatgatttttaaaactatgcgttgtttttaaaatattttggcccgttgacgtttatattttcattttatcaccctttacacactttcctcttatgcaaatatatctactcttatcacctctttatgtatttcttttcatattacatgtttcgttatcacatttattcattttcatagtgataaggtttcaaaacattccccttcctttcataggcacagttctttctcctagaaatatctgaggagttgatttcttacattttaaaatactccagtttacacttaaaattgacattatgcatatgtctataaaatagtaaagtaaaaagaaaaatacaaaaatttgacttagattttttaacaagttgtttttcaagtagccatatcctttctaactaaagaaataaaggctgaactagaaaaagaagcccccttaaaaaaagatatatacatatatatgtatgtacacacacacacacacacacacacacacagattttctttataaagtagggtcgcttctaatgtattcttaaaaccctaaaatatgcagtgacccaggctttgtgctaggtgatttacatactttagttgtgattagtgtagtaactctggaaggtaggtttaggattatcaccaggaaaataaaataattttgcctaaggacacaaaagtaagaggtcaggatattaacccaggtctttctatgtccaaagtctgtatactctccctgaagccaactcctacatgttttttcccctaaagaaacttaaagtagatgactcttgttgttcagtcatccagtcgtgtctgactctttgtgaccccatggactgcagcacgccaggcctccctgtccctcaccatctcccagagtttgcctaagttcatgtccattgcattgatgatgccatccagccatctcatcct

SEQ ID NO: 62508 - DNA, 1209 bp, Bovine  19866880913049
  misc_feature (1)..(1): n is a, c, g, or t
ncctgttatctcatgtcactttatatatccctcagcgcggcatatatctcaggatattgtgactggaggtttgtttctcttccctgttcgatcatgaaaccctttatagcaaacactgttccacttatccacgcatcccctgggcctagaatagcacttggcatgttgtcgatgccagacaagaatccatttgggaaatgactgtatccatgctgtacagttggctgccatttttattctcattccttgaggactgcttcatatggatcctgttgtttagtgggtgctgatatagaagagtcgtcctattgacgcagaaaaataatgaggcaatgtggggttcacccacagaaatttcataacaaagattccatttgcaagttaaaaactctgagttaaaacagacctaatccacttatggaatctcctttgcaaaaactatgaatgagtttaaacacagaggtcaaatttcaaaataaaatttcaatatcatggtcaaggtcttctcaaggcagtcagggttttgtgtatttgcacacacacacacacacacacacacacagtgtatgtgctgctcaaggtcatttttggtagttatataagctttaatttacatttgaaacattactttaccaaattgtttacattcacggatttccgacatcatttcagtttgacctgcggtaaattcctccatgtaagctcagaaggagacacacctctatcccagattttaacttgcaagcagaagtaagttattaaaggaattgggagagaagaaaaagagaaatggctgtgcttctaatagaagaaagaaggcaaacattgatttaatcaatggattcacttttaagtaagagaacagatgttttctgttaagcccctggtgaaaattcagtaggcgccagtgatactctggggccagtggcttctgataacgtttgaaatgaaggtctgggccgttcttgctgaatgagcttttgcacagcaggcctgtccccgtggtgagatttttctcctgagttctctcttctttatgcattcatgggctttcttccactgtccattcacttatgtgttttaccccttagagtaggcaatagcattacatttgtatatggttgtgctgtctgaaaatattaaccatcaagaatttaagtttctccccgtgagtatctccttgactcttgcattttcaggccccatagt

SEQ ID NO: 62509 - DNA, 973 bp, Bovine  19866881041157
  misc_feature (1)..(1): n is a, c, g, or t
ncactgtgaaactttatgaacatcaggggaatatatatgccattttgggggaggaattaataattttttgttgctatgagctgaattaggtatttggagtagctgctttaggtggtactattaaagcttgaatattctgaacttattcagaccttagaatctgacagtttcagtacctttcccactacatccactctctgcccttcaacctaccagcaaggcctagatcagcatcatggaggccatatattgaactgaatgtgtccttcaatttacttttccatcctgcatagcacttctccattgacatgactgattagccaaggtaacgaagccactgtgttcatttaagttttattttttcaaaaaggcaagacccaaaggaggagtcagaatcttttccttatagaaatgcagcctgagaactaattttcacttttcattcttctttgtaaaatttccctatgaactatcccttcttaagtaaggcttaacgttttcaacttaaataattatagccatataaagacagacagacatttgtcaaccagtagcctggaaaccagtatatggtgacacacaacttgtataaagaagcgatagacgtaagttaattaccaagacaatggggaggggtcagaaagaaacattaaaaaaaaatccaaagacacaaagtaattttaaagttagtaacctttaacctgactcacattggttggaatccaatattgaccagagggactggaattcattctgatgatgtgatggtaaaaagttgtgagctcaatgagtctggtggtcttggcactattcccagagaaatcgagttcccagcacataactaaaggacctcaacttctggtccaactagccatctttactctgtcaaaaaaagactcagggtggaaatgggccatggggacacatttttttccttcctactgacaggtttcgtctctgaatgagtggaagg

SEQ ID NO: 62510 - DNA, 1188 bp, Bovine  19866881057445
  misc_feature (1)..(1): n is a, c, g, or t
ntctacttctgctttatagactacaccaaagcctttgactgtgtggatcacaaaaaaaaaaaaaacaaaaaactatggaaaattcttaaagagatgggaataccagaccctctgacctgcctcctgagaaatctttatgcaggtcaggaagcaccagttagaactggacatggaacaacggactagttcaaaattgggaaaggaatacatcaaggctgtatggtgtcaccctgcttatttaacttaaattcagagtacatcatgcaaaatgccagactggatgaaccacaagctgaagtcaagattgccgagagaaatatcaataacctcagatatgcagatgacaccacccttatggcagaaagtgaagaagaactaaagagcctcttgatgaaagtgaaagaggggagtgaaaaagttggcttaaagctcaacattcagaaaactaagatcatggcatccagtcccatgacttcatggcaaataaatgaagaaataatggaaacagtgagagattttattttcctgggctgcaaaatcctgcagttggtgactgcagccatgaaattaaatgatgcatgctctttagaagaaaagctataacaaacctagatagcatattaaaaagcagagacatcactttgcccataaaggtccatatagtcaaagctatggtttttccagtacagatatggatgtgagagttggaccttaaagaaggggaagtgccgaagaattgacactttcaaattgtagtgttggagaagactcttgagagtctcttggacagcaaggagatcaaaccagtcaatcctaaaggaaatcaaccctaaatattcattggaaggactgatgctaaagctgaagctccaacacttaggccatctgatgcaaagagctgactcattagaaaaaacccccatgctgggaaagattgcagacaggaagagaagggggcaacagaagatgagatggttgtacggcatcactgacagaatggacatgagtttgagcaaactccaggagatggtgaaggacggggagacctggtgtgctgcagtccatggggtcgcaaagggtcagacacaacttagcaactgaacaacaattctatgatggatatatagcaaaacaataaatggagaagatccaaatgtgttgcaaatagtcacctcagactcctatcaa

SEQ ID NO: 62511 - DNA, 1243 bp, Bovine  19866881146950
  misc_feature (1)..(1): n is a, c, g, or t
ntcctgggggagaaaaatgtgttaactttgaaatctgccatagcacagtctggttaatatgaaaaagcaggattttagctccaaatcctattaaagagatacctgtgagtgatgaatgcagtgtgggttattatagagatggatagataacagtggaaataagaaggaagacaccagagaactgagtgagactttggtgaagtaaccaaatgtctgttattgtagtgaaatcaaaagcacctttggcaggatgctagaaggacaagattacgtaaaaggacaataagcataaacccagcaccagttgttttgctattgaaatgcaagccatgggcaataagtaagacttggaatgaaaataaaaacttgcagcaataatgactaacatcaggagagagaaagtaatctggtaagaagctgccattaaggctttttaattatttcctccctcctgcctctgcctccagtggtaagaagtctttctagagaatctgtctctaggaggcagaaaagcaaatccaaccaagctcatagactgagcctgtgattcgagaagtgatccgtgagaactctgggaaagtcagagacccctgagcaagtcctacattagaagctcataaaaacaccatcacagtgagaacctaaaaaagctaatatgcaaccaaaaacatctctacatccaaagtagacaaagtaatgctaactctatccttggctttatgtgacaataaataggaaactgtcctgatcaatcctgtctaccataagcttgccttatgttggtgggctcacgtaatccttatagagcagttataactaatccaacttatagtgaaattacagaatacacagagaaactaagcaatttcctcaaggcaatgtagagccagaattcaaacccaagcagctcggcactccaaagcttttcctaccacctaacattagaagtcagtgttacttaataataagcacagaaattgagttcattttataatgtgataaaactggaaaaccctagggtagaaccctaaagaaatgccaagtttttttttttttttcctattataattaatctggacttaatttcatttttaaggtgggggtttttaatggatgattcaaaaataattaaattttggttttgaaaaatatttaatttagccaaagcagggatagatcttgatgataaacgaatgatgttgatgaaatgaatttccgtacttgaaaagaacctcagtgagat

SEQ ID NO: 62512 - DNA, 1341 bp, Bovine  19866881147037
  misc_feature (1)..(1): n is a, c, g, or t
ngagtcccagaaagtgataatatgattaaatttgaacagtaatatatcaagtgtgcatcagatttttatccttatattttacaaacttgtttaccaggtatatgctataaaatatgcattgctatatgcctttggagaaaagaaatacattgagaagtatgatctgtctgaaatagtttagaaaaaatatgtgtacccatgacatttctgacaaggagatttttcacagctgtgtactaatacagctgttttcatgcagaggatttttaaatatagcccccaaaacagactgttagactttcagctgtttctatgaacaagtaatgtgtgaaacagacatattcatcccattctattataaaatctctccacagccttgatcctcattctgttgtacatacccacccctggggtaacaaacagggatcacatggggtcacgtggggtcagaaacgggatgaagacgagggatggagtgacgttaggcatggtctggcagacaacctctaggtgaccagaagttacacgcttactacacttactcatctcagagtgggccagacatcattcttagcaaagtgctcgcttattctctgagaattcatttatatcttaaacgtctactaaattgacagtgggcacactgttctttggaaggactgatgctaaagctgaaactccaatactttggccacctcacgtgaagagttgactcattggaaaagcctctgatgctgggagggattgggggcaggaggagaaggggacgacagaggatgagatgaatggatggcatcactgactcgatgggtttgggtgaactccgggagttggtgatggacaaggaggcctggagtgctgtgattcatggggtcgcaaagagtcggacacgactgagcaactgaattgaactgaactgaataattaacaatgttgaacctcttttcatgaccctgttaaccatctgtgtgtcttctttggagaagtgtctatttaggtcttcttcctatttttcagttgcagtctttgctttttgttgttgaactgtatgagctgttgacatacttttgaaattaagcccttgtcattcacatcatttgcaaatattttctcccagtctgtaggttttttcattttgtttatagtttcctttgctgtgcaaaagcttataagtttgattaggtcccatctgtttattttctattgccatgggagactgatttaagaaaacattggaatgacttatgtcagaaaatgttttgcctatgttctcttctaggaagggcttaaagacaaacttgagacatgacaccataaaatttctagaagagaacataagca

SEQ ID NO: 62513 - DNA, 3072 bp, Bovine  19866881201108
  misc_feature (1)..(1): n is a, c, g, or t
ntagatctttttgcttttcttcatgttattttagaacattttcttatttggggtttgttttgttccattgcctggttttcttatttggggaaaactattttaagtatgttgaatcagcttttcctatctctgcatttatttttcttgaattcttttctttccttctttcttaatatatcagcattcttcctttttatctggtatttttcctaaagattttctttatgacattcattcagtcttaatttctgaaatgattttgcttgttacatctctttttatatctttcttttcttgaaacatgttattaaagttttctaatcctgacatatgtcctttcatagttacaaatttttcttaattttctttatcatgttttggaatattaggttactatttggaatattaggttactgtttttatgtgtttactgggcattgtgttttttgtttcttttctttcttttttttttcctgcaggtagtattgctatgtctgtattctttttttttttacatattaaatttgtataggattggaccacaaccctcttttgttgcccattgttaattcagataagcatttctttgtattagagagagttttggaacaaaataacttttctagctacatatctctagcactccctcttctctcgtgtttatgaagtgatttaaaaactggtctcatatatttgagatctactttctccctttgttcatttttacctaggctttttcttttgtcctgattgctcttgcaaattctgtttccaaaagttactcttcactgaggggcatataatacatgttgatacctaaaaggcaaactgatcaaagatttgagaatgtgattctcttattaattgaaatatataatactggtattcaagaaggaaggtaactgaattttggaatatggaaacaggtattgtgttctatgagatgttgtttatcttagttacatacaaatctgcacatatattcttgacaccaataatcaaatggcattttatgggttttagactagattgggtgtgttcagggtggtattgctgtagatgagttttatggatttcaggaggaacaacaacagtaacaactaaaaaaatgaagtttgagcttattctaactcagatttcttaataatttaaaaaccaagtggtcacagtgcacatatattacaaaatgatttcatgaacagtttcagtgaaattagatagtccctgtgcttcaacatatttagcactgccttgaattaattaaaggtactgtgattccaagtgactattaatttactgagtaaactgaacaagttaaattaaataaatggacaaattaagttattaacagaacaatgtgctgattgctagatcactctatttttgatggctgcttccttttcccttgatctataataacttcatttttgtattattcactcctgtattttattgtttccatctttcattaacaaagtcctgtttttaaaggttgaaatgatcttatcttcttggcaaatagcttgtattttttgttgtctttttcaggggccctgtgaaatctcgacgttcacattcagactccagctgtgttcatatttggccataattcacacagaagaaaggtgaagaagttaatattattaacacaggtaagaggtaaaatgatagtaggaaaattctaaataacacttttaattgaacctataccacttaccccacattatgtttaggaactctggtagagttccagaaatgttaccctttcctcaaatgttttatattcccggtgtctataaatccatctgtttggggctgaatttcatgccccctccccaaatgtatatgctgccaccctaacccccagtacctccataactcctttactgcctttggagataaggcatgattacataactgcctttggagataaggtttttcaaaaggtaattaagttaaaatgcagtctttaggatacaccctaatgcaaatatggcatgtattcttttaaaaagaggaaatttggacaaagatggaaggaaggcacagcgagaagagggctatctgcaagctaggggaaacggccccagaggaaaccagacctgctcacaccttgatcttgcacttccagactgcagaactgtaagtaaaggtttctgttgtttagaccgtccagtctgtagtgtttcactgctgcagcctgagcagatgaagacaccctctttataacagacagtctttgttggttttctgttatatcattgtttccaagaggcttttactctattggttgaagctgcaatatacatattcatccacttgtgttgtaggtgttatttttggccctttatcaaaggatttatcttggcttttttagaggaatcagtgttttaagtcctccttcagtgatgcaaaggtgtctccattttcttcagatgaattctccttttcttaggtgcattccacgttgttgccatggttgcacctctgtaagtataactgagggcctgatgtgctgcaagttaccctctgctcagtttaatattggacatgtacttaaagacatgaactgtgggatacaaataagagataatacatgtaatacatgtaaagtacctaacaagcctggtacatagtaagcatttgtatattttggttattattattttttgttattcctgtatcttctaagccagttacccgtaaaagcccttaaactgattgaaagtttaataccttgatttttttcatacctcaagctgattttgagcattggagcctatttccagagtatcagaatgtaagatctgttacagaataatcattttgaagatgaacaacacagtttgcatttcctgttactaagcctggttaggcttcaaacacagattttaaattgccacttaagaaccttttcccttagtttttgcaaatagttttcctattattttccaatctgtgccacagtttattttatagttgaagcttttctgtgtttatattcatagatttagataactgaccaggaacaaacacattttaccagacttgattagctactctgcccttcca

SEQ ID NO: 62514 - DNA, 1757 bp, Bovine  19866881209720
  misc_feature (1)..(1): n is a, c, g, or t
ntttttatcaattaaaaaattatcaattcttactattaaaagaaacaagtaaaagcataagacccactttggggatgtaatactttatttcctttcacagacctgctctcttgtgtttacttaggctaacactaaataaattgctattctctaagcattcacattccctggaagaaagaagccataaattgcgtcatttaacagcaaaggcagggctgggaatacatactcaggacagaaaattcaaaatatatcatagttatcaagcgtagggactctgattttctggttttgtaattttttccccccaaattctttagctccatccactgggtttcatattaacaaatatttatgaaatgatcacatatgaattataattgccaattgccaaactaatctcagataaatttaatcaactactaagttacttcacaatagtgtcatcagactttttcatgtatttaagattctggtcaatacgtagcccatagttgaccagcgcctcagtggtcatgtctaaactaaactttatctcgacttcacttaagctgcatttccaacaaattccagtggagcaagggctgcacattttctttcttggacgctagagggagattggttgcagtcatccacttttaggtgtattttgcagcaaggctatgtccttctcatcaccatctagtctgctgctgagaatagtcacatatggcagcttcctaccctttggccctatcaaaaccacacatttttttgagtgctcttctaacatacgtgatggtggtggtttttagctcatatttatttaaaaaatgagattgcaaattgaggaagcttaaaacgggtacggctaacatcaaaccaaaggagtccatacagaacttgttaatctaatcataattacaaagaaaaatacattaaaaatgtaatagctgaacgtttggaacctcagaggatacaactaatttgtactaaagcaggttggatggcatcataaattcagtggacatcagtctgagcaaactccaagagatggtaaaggatagggaagcctggcgtgttgcacttcatggggtcacaaagagtcagacatgactgagtaactgaacaacacaatataataaaatcctctgtgttctcacctctcccactctccttggtcactcactcccagcataccagccttattactggtcctgagtcctacagacacattctccccaggaacttctccctggctgatccctctgcccacaatttcttcctgccaacaccctacagctcattcctgcagaggttcaagtctttgcccaaatgtcatcttcccagtcaaatctaccctgcctaggaaatctcatggacagaggagcctggtgggctacagttcatggggtcgcaaagactctgacgcgagcaactgagcacacgcatacaatgccacacagcctaccttatttctgctaacttattctatgttttatttttgccgtggcatttatacatttctattctacatagtttactgatttgttttgttgataataatcagtacataatgtctatgtcctttactaacatgtaagctctatgagagtgaggatgtcagtctgtttgcatatcactgtagcccaaacacctagattaatgcctggcagggaaaaggtactaaatgttaaaagacttaactagatcctctgcagtttaattcaataaaacattattgctttgtacttgaatttaataatatttttcacgat

SEQ ID NO: 62515 - DNA, 1352 bp, Bovine  19866881266302
  misc_feature (1)..(1): n is a, c, g, or t
ncaggctcctccatccatgggattttctgggcaacagtactggagtggggtgcccattgccttctcccactgtatcctgcaattttgctgaattcattgatgagctctagtggttttctgataacatctttaggtgtttctatgtagagttgatgtcatctgcaaacagtgacagttttattttgttcttttccaatttggatttcttttatttctttttcttctttgattagcatggctaggacttccaaaactattttggatacaagtggcaagaggggacatctttttcttgtcctgcttttcaccactgagaatggtgttagctgtgggtttgtcatatgtggcctttattatgttgaggtatattccctctatgtccactttcttgagcatctgtgtcataaaatgggtgttgaattttgttaaaagcttttacttcatctattgagatgatcatatgtttttaattcttcagcttgttaatgggctgtatcacatggatttgtggatattgaagaatccttgcattcctaagataaatccgtcttgatcatggtatatgatccttttaatatattgttagatttggtttgccagtattttgttgaggagttgtttttttaatagaagaggactttagaaaaataactgcaatactattatcaaaactttgagttccttaatatcattaagtatcctaagaattcgtgaatgcttacaattttggaaatcatcaaggaaaagtgattacaattgaaatgtgtaaagacaagtggttgttttttactcattggtgagtaacatatcgataaggtgcttagtcatactgtgaaatcattttgtaaaaagcacatctgcaaagtatttgcagtttccaggagcctgttattttcagggtctcatgaaaatacaaacagtttgtagagaagctccagcatctatggcatctattagcgggaggagtctatttggctggtgacatggtgaatttaaggatttacatctgggctgaggttatgggggagagtactgaactcatactcaccacacccaggttatgcacccaaattcccagacaacttttgtattattttcggcaaagactgttctcaatgagaaccatcctgctctattgctagaaacaaatttttgccaatgatcagggattggttgaggacttggcagtgagccagccagacagcaggacatgggtgtgtactcttaccccatctctgtacatccaaacacatttatctagcaatggaaagatccccccagacattaaaaggacaggacctatgaattttaaatgaacttctccctagggctctccaaacacatgctggcag

SEQ ID NO: 62516 - DNA, 1855 bp, Bovine  19866881270579
  misc_feature (1)..(1): n is a, c, g, or t
ncctgttttaatctcatttgaatctggtttttcaaccagaaaagtgaaagtgaaagtcacttaatcatgtctgagtttttgcgaccccatggacgctagtctgtggaattctctagtgggtagtgggtagccattcccttctccagaggatcttcccatcctagggatcaaacccaagtctccctcactgcaggcggattctttaccagctgagccaccagggaagccctgaatctggttaaccatgtaaatctggttagccatatgcagttatcaaggaaactagaccctgcctctcttccttcccttacgtttagttgctaagttgtgtctgattcttttgcaaccccatgagctagccacggggtttttcaggcaagaatactggagtgggttgccatttccttgtccaggggatcttcccaacccagggattgaacccgtggccactgccatgtctcctgcattgtaggtgggttctttacccctaagccactggggaagccctttccttatatatcaagatttagttcagttacccatgtttatcttacccatagctgatagaactgaatcagcattgtttatcaaagtcattataagtgactttatttttggtatttacattttttttcagtctatttcaatatctcacagaagataaaaattaatttgtaaaagttttctaatttacaaattatttccccttttccatattgtaacataaggcaatttgtttaacattcccaattttccaagctataagattttattaaatattaaatgctatgtattttttgttctgattctgatgttttaattaatatgtccattttacttaatttaagcttagacatttaaaagtactgtcccacttaaactgtgtagaacacaggcagaatgataaataccagctggcaatgtaaatagtttcctgataaaggggatgtattactgatatcacacctcctcctcattctgtccatgaatgatgatgttcttgacaggacaaagcaaaagattcacagacatgctacccttgacacaccttaatttctcaaaccaacaatagtagctgtgtatttaataacttttgccatatgaataaaaaaaaaatttaactggtatgtttgtaagggtattgaaaagacatgtgtttccacaaaacaaatctgaaaaaaggaacggaggcaatttaggtgaaagagaatttgttaaagcagcttgagttaattaaatctcttgctggctttatttggtttcttgtcagtatgccttacttcttctttcaacttagtgttggctatcttgaagttgactggcttgaatgggaggaccacacccttaatttgattttccccctgagtcatttcattcaacaaagaaattttactgggctttttttttccttcaaagtcttttttaaatgccacattgtactgtgtctagaaaataacttgggggtgtggttactggtatgcagaacatggaacttacaggaagcaatgtgattagaagtccactgaatatttgagggaattaattcccacccaaaactcagtactagtttagaaacactggaacccataattttcatgagtggaatatagcttcagttatttaagagccttcacagagggcatgctcctcaatatatccactttagatggatatcctcccagagggcagaggcagggaccaaggataactgtggatgagggggttcctcatatagaacagaattcagattaaatcaataaactcgtccccaccccaaaacacagaacaggtggccagtagaatgtctgtccagtgacaaccatatggatcccatttctcctctttctggatgggg

SEQ ID NO: 62517 - DNA, 4590 bp, Bovine  19866881291335
  misc_feature (1)..(1): n is a, c, g, or t
naattgaacattgtgtttccggtatgcaaacagtgcagttttagtctcctcacagggcctcatgttattttatgtattgtatgtgaaacattatcaccgaagtcacttttctgtcctttgttttaaagtagagtttgaactgtaagagaaactgagggaattccctgggagtccgtggtttggactcggcgcttttactgctggggccaggttccatccctgatcagggaacagaggtcctacaagctttatggggcagccaaaaaaaaaaagccctaagtgaaattttagtagctctgtatatctagaaaatgtatatgctgctgctgctaagtcacttcagtcgtgtccgactctgtgcgaccctgtagacggcagcccaccaggctgccccgtccctgggattctccaggcaagaacactggagtgggttgccatttccttctccaatgcatgaaagtgaaaagtgaaagtgaagttgctcagtcgtgtccgactcttagcgaccccatggactgcagcctaccaggctcctccgttcataggattttccaggcaagaatactggagtggggtgccattgccttctccagaaaatgtatatagtatctgtttaaatcatggaagtgtgctaaattttatttcattatcttctgtaggacaaaaaagagcaattaaatttaaaaaataggcagatatgggactttgctggcagtccagtgtttaagatgccatacttccactccaggggctcaggttcgctctgatcgtcggtaggggaatatactgagatatactgactcctttgtccttaaatgccattcactgtatccctggatactgtgttcccatgccctgtttgttttctctgtaacattaatcactagctggtattcctctgatttctcctgtcttttctcatcatcattactttaattgctcaaaagtttaggattggagaacacaaagagagcagagtgacccatttctctgttaatcgacatgcagcaacaattaaaagaatgtttttgttacttaaaaggttataattattcatttcgattttgtttgcatttcatatgcaaatataatagctgtatcacaaatcttttgtgaaattataaaatgtattttaattctacagcatttctcattctcagttcagttgataagccaaacagatttaccattaaccttaagatgagcataatttataggtatatataacttgtgtgagagaaatgttcttattttgatcttgattcctgtttaaaaaaaaataattttctttctcttaccattagatggttatggaacaaggagattggctgattggaggagatcttcaagtcttggaccgaatttattggaatgatggtcttgatcagtatcgttttactcctactgagctaaagcaaaagtttaaagatatgaatgcaggtaagacatggatctgattatctcacatgggactgtttggagtctctgcttgatgggggaagttcttaaggattttttccaatacttactaaaaagtaagacagattgaggagtaaagataagtggagttagcaatggaatatgtaaggaaagctattatagtcagtctgaatccacctgtgtagttcgctcccattctgtgtaaaacaatagaaataatgacattctgcagaaaacaatagaacagcaataacacgttcactcttcattcaccaagtgctcgttgctcatctgttatatgtgcctgagtgccaagcgctgagtattcacaagtaaacaggagcttatggtgtattagagagagacagtcaaaaaacaacagaaaaagtcactgaagagtaggttaataatgatttcagatttctgaattaggatgaagtggagcagtggaagtggagagtctgtagaaacccttctttataatactgccttagaaagtatcccaggacagggattcttatattagacatctgtgattagcaggtcttttacacaaagctaggtaaataatgtgtttatgctggtacacccacaggtgccacagcgtttgctgtagattttgggaggcttttttaaggtctgaagaatttcaagcctcttataatcatactgcttatgaattctcactctggaaatggttaaaccctaagcatgggtactgctttttcaaataacttctgtgtagaaattgaggagatagctctattctagtttgctgataattgatacgacgtgaaatggatcaggaactggagatgtgatctgggcacaccccttcagggctccatgggcctcagcagcctgctcattcattcacatttcctgcttagacacctcagggtatttgatagtgtaggaccacatttctgcttctgaattttattcctcacctctgagtttgaagcacttatttggcctaagccacttgtgcaggaatttctctgtgacacccgctgcttgctgatacagcagcttgttttcttcctttttgctgacaggtttgggcaagtcgcaggggactgtatcacgcctgctgtaagtccggatggtgcccctttctcttttgtcagtatgtgacttaaaggtccgtgtgtaagtctggtttggcctttgaagtgtaaggaagcggggcttctgggagaggttttcctttctgaagagaatcaggcttaggacacaaagttatctttttccatccttccttttcctcttgctttggacgtgatcatgcacgggttcagtgtttggagctccggcagccattctgtaactatgagaatccatgagaatcttatactgttgagtttctgatcaaccctcgagtcctctgtatccacattttttactcaaaagacctaatgcatgtttcagttatagaagatgcttctagttgagtcttatcttgtttgtggccagaagcatctgataatttaacacgtatagacctctttttttctagtaagcaggaacatgtttaactgaggacttgctgagtattttttttccaatataatttatatcaggagctcatgttaataataatcttttggcactgttgaagggtcttatcatgaaattatcattcataatcggagactttatgttacatctgttttgcattcttccttgtggggccaaacgttttaaatcatttagagaatttgttgcataatgaatgattgcaacttttgtttaaagtagctgggagccagttatttgccttagatcaagcaaaaaagatggtggggtgttattttgtttacttttccattttagactaaagcaaataaacaacagattgaggaccttcctttatagttcttactcattcttttccggaagccagtaacaagtcatctacttgtgtgtacaaatcataattcaagggagagaaaagaggagattcttttttttcttttacttaggattcctttttaacctcttccccctccttccctcatcatagtagaagaactctgattaccttgtgtgggctgttgtcctgtgcacattgatagggtcagttttggtgtttctaacccattctgtagctggaaggattggaaaatcactaacacccatgtgattgcaggtgtcatggttccaggtggcaggttctttgaaccatggatgattgaccactatcttggaaagaatgaatttcacttaagccaattaagagccacattagtgtttattatacacagtggagtcctgctgggttacgaaaggaaatattggcataattcctttcaagctagtgtgtgctagcacagtgctgaatacatctgaaaaagccttgtagagtttattgaaccagaccatattttaaatgaattgatagaaacagtagatagatatcttaggcaaagttgggaatgatagatacatgaggaagctgaggcggaagcagatcgtctgcctctgaaggcactgccacaaggcagtgagcaggagatgctacaatctgaggttgggtgacggagcctctatcagccgggtcagggcacactcagatgaggctgtgagcattatctgtcaaagtgagtatttaaagacgggtggtcaaggttaagggagctgccaaggaatgacgaggcatttggggactagcaatttggggtagtattaccattcttgacatggtttcttaagtggggaaagagaaggctggcactgcagggaagggtagcaggcaggagatagttggggtgtgggcgtggctgtggtcaccatgctgggggcagatgttttctcctccatcctctgcttgcctgttggggtctgccttggggaggtaggcgtgcagtcctccccctgcccctggacacacacgtgcacacacacacgtgtgcacacacacacacatgcacaggagacatggactagaggggaaggtgaatgcagagcagacagtacagggtctatttggcaaaaagctttatattcaacattacttttcacgttaatttgaaagcactttgaagaaagaaaacaacttgctgccatgtttggggtgtgagagtccctgtttgtgaaaaattctagtctattcgtatttactcaagtggcctatctctgtcttgtgga

SEQ ID NO: 62518 - DNA, 1315 bp, Bovine  19866881299970
  misc_feature (1)..(1): n is a, c, g, or t
ntagaaaagttgaaaatcctcagggtggcctattcaatatagggtatggggttgccttcacactcctggactttctgaactatgttgatataaaaataaagtacttggtagaagagaggctatcaagagagatgaaatgatatgcagtggccatcatttatgtcactgttcacatagaactgagatggttttgtaaatcactaaataatggagccgtacactgacagggaacgaagaccaagtgtgtggacctgggtttgtcctacgctctgttggccgagtcacttaacctttgaggattcacttccttcctgttttaatgagaatgatgctctcttccagttactttaacttctacatttctatagttctaggtgttagaccaagtaatttttgtttttacacagtgagtcaatgtgacggtataggctacagagctacctttgaaagcagctggctgttaagtcacagccaacaccttgtcttatgcttcccagatccatatacatatatacttgtagatttttttggaaggggagggcttgccaggtgtttttttttttttttttcctggcttcccgagatgattttaatttgttgagatttcctgctaatagatactgattatataggaagtatatacatttattatccacttactacttctaagtgctggtcatgaaatcgtggttgtctaatgtgaccatttctgttctaggtccagtggcattgcagagcaccgatggttgcgggagccaacttctacattgttggccgagaccctgctggcatgccccatccagaaacagggaaggatctttatgagccgactcatggcgccaaagtgctgaccatggccccgggcctgatcaccttggagatcgttccctttcgagttgccgcttataacaagaaaaagaagcggatggactactatgactctgagcagtaagttttacattctctacataaatctgtgaaacaccttgtgttctaagctgctcctagggttttaatgtactgccttatctttacaacagctgaccagtggcaggctttgttgtaccagtttcagagacgggcaaaccaaagaaactaatttctcaatactttagaagtagaaataaaaattgagtctagtttcatggttcatgatcttaggaattttcttgggaagtgttaaggcagtgatgacatttctgtctgtcttatagaagtagtccaagtactcagcgatgattttgctagtaagtgcaagggatccaagtaataagagagttgactaatatttgtgcagtcattgtggacaggcact

SEQ ID NO: 62519 - DNA, 1348 bp, Bovine  19866881474587
  misc_feature (1)..(1): n is a, c, g, or t
nattaaccttacctgagttaggatttttatgttatcattctctttcgcagtaaaaaataatatagtaataataatgataatatcaatttcagcaagtacattgcagtttaattccatagatctcaggtgatttttttccctgtgtttcttaatcttgaagcctctgttgtccttcgatcacattacctttcccagtcgtttccatttttcttccttttccttcacagctttattttctactagaagtacttctgtgatttatctatagtggttatatgataaacattgactaactttatgatcattaccttccatttgctttccttccatagttgtttcaataaatcagtattgaatagatcaggacatgaaatgcattattattttcttggtacacatgctctgtctaaaagtgggaagaaaatctgtatctatgcacctagttggattattgttaagctaaaaagtttcttgaaagaaaattactttggtgatctgtacatctaggtgatagaagttccatcttccgccaaagagagatggtgagctactagtggatgatgaccatgttttattcatccctgtgtttccctcgagtacctaatgcagagccttacacagtgtagttaacttagaaactggctaactaagttagctaatttattctagtctggggcattatgatgatctgccaaactatctctgctaaataaataataaactagcatgactttactatacttcttttgaccagatgagttgcataccctcaacatagcatgttacagtcaagacagaatttctgaaaatttcacatggttcatagtactctggagtgaagtaaaactgtcatttacttagagttgatatcctagaagccagactaggaaaatggagaagtagttctataaaccagaaaactggatttgtttttagcaatctaaacattaaaattgaaaggtattgaccaacacctaaaggatgagagttggagtgaacttcctagtgtggatttgatttctcttgaagtgattactaattttaagtaatgaagaccctaggacagctaggagtaagtttgaatttaatttaaaaccagcacatgatggattgtactgccagctattgcaatggacatttatttaattttttctccagaaagctttttatttatttggacatcttccaatcataggagattatttagataggttctgtaggaatatacatagctattgttcaatcagtggagttcctggttttatttttcttaagaactgttgatgacagcatccagaaatgttagtgttaggtttctacaattcgaaattgcccagaatataaactt

SEQ ID NO: 62520 - DNA, 3173 bp, Bovine  19866880403533
  misc_feature (1)..(1): n is a, c, g, or t
ntaataattactctactgtggttttctataagggtagttcattttccttgaaaatttgttggggcaacactgattattctaattattagagatcacactactggcatttagtgggtagctcttgggataccatgtacctttaatgcttaagagcccaaaatgataaattgtattctttccctcacaactttttcaagatggaggaggaaatggcaatccactccagtactcttgcctggaaaatcccatggatggaggagcctggtaggctacagtccatgaggttgcaaagagttggacacaactgagtgatttcactttcctcacatctctcagaatgttccacatataattttgatctgagaaataaaactaccttataaataaatgcaaaataattttgcatagtttaaagataagtgactttcaggaattgtactattgtgaaaactggggaaagttgtgttttattttgttctttgcctgtaattagtaatcatttaaaaaaagcatgtcactctttgaagtgctgctcgtgacatacatacacctaattcactgggcatctgtagcttcccactgattctactaatttcaacatttatattgaaatatataatattttaaaatatattagtttattgcataattttcttttgaaaaaatgttatgtatgtagatagattgtattatctatgaatttcattttaagagagtaaaaatatcatatacaaaggtgtattgagtctgacagagttgaaaattacagccttaagaaataggaaaagcttgtagcattttagtgatgagaggaaatttagaattcagcctgcatagtggataaaacaatggactaagatttgaaggcctgagtcctaattacagctctgacattagtcagattacttttgaaaattatagtatttttatatgcaaaatttaaaagttgggatgacttgaagtggagggaatagactgtttctatattggtcttattccaagatacatagctagcaaatacatggaaatagaacattaattaacatatagaaaaatcctcaaataattggggctacaaaaatgaatttacgtacatttaaggcatttcaggctttgtctggttactcatttgctatgacgggtatggttagaggaggacagattcaataagggctactcaacagagatgcatgtcaaaatcatcattgaggcttataaatcaggtaccatggatctggggcctacagacacttctagagtttcatgtatgattctggtacccactccagatagaaaatgaaggcgttaattatctccaatattttcttcagttataaaattatttcctaccactgtatagagttatctcttaaaaatagtgttaaagcaatagactacaaatagataattcaccaagtagtatttaactcatatatctcattcaatttccagacctagtttgtgttccccagggattctctaatcatctcagaagatgtcttgatatttaaattcgctttagaaattatgtatgatgtaatgctttaagaaaaaggcctatatatgaaatcttaaaagatttaaggtgttttaccagtctgagtgaaaagtcaaaattcactaatacgaccaagaattcaaaagaaatattgaagcttatagagttccattattaggtcttgctctttaattttaccacttagtctatgaactggtcttcctgatatttgtagccttggattagttctgctcacaatgaaagtgaaagtgaagttgctcagtcatgtctgactctttgccaccccgtggactgtagcctaccaggctcctctgtctatgggattttccaggcaagaatactggagtgggttgccatttcctactccaggagatcttcctgacccagggatcgaacctcatttttaaaagagggaaggctagattatgtaacaactctgaaaattttattttttttccattggaataacaaaaaaggtggggctccagggtggggttcagagagaagagcaggttcataatccaggagttatagacagcttctaaggtgtcataaaggttcaccaaaattgactctgttcagctcaaccttaaagtttgcgtttaattttaatgaatgggttcatcaatggcacttgtcgtaaaaaggtgaacttcagctccccaaagatgatattgacattaattaaacaaaggcaagtggtaataaatctttaaaataataatctaaaatcctttgtaatcactaaagtggaatttgtcttgtatcggagtcataaacctgaaaagaatcaggatgtaaggatcatattgctctcgtgtaggaagcaagtccaacattcaaatccatgaacaaagacaacatacagttaatacctcctaaataaacaaaaactgatatgtgaaaaattaagtttaaataactcttataataaacatttatgcagatatatgtgaggtttattgcttctttgtttttagtcaaattatagctggacattggtatttaggggcactagagactagataaagttaacatttgtacttaactagcgatggattgctctggaaagcaggacaagacagatgtggtggaacatctagagtaacagattcaaaaatcatgttgatgtatttattatctcaatcatggaaaagtaatcaaccaatactataccatctcagaaaatagcaccactctaatggaacctgggaaaacaatcatatcctaattttgcatttcacatgtgcatttttaaatgctatcattttcccctcctttgatctttcctttgtatttgcaaaaggggctttcatctttggatgcctgtgcagggaggtgctttggagcccgtgtccttccatgtgtatgatgccaacagccagccagacttttgtaaatgacacaacagtaccaagacagctacatctgactgcttaacccctcagcttgcctgggcagttcaggagcccctgctgtgatgttttgtttgcacacatgcacagataaaggccaccactcctctcattaaataagaaggcatgtgggaaaattaataatttaattggcagggagaagatggatgtggatatcaaatgtaaatctgcatgcttccctgagcattcacctcagtgtctgaggaaatctggtgcca

SEQ ID NO: 62521 - DNA, 700 bp, Bovine  19866880423406
  misc_feature (1)..(1): n is a, c, g, or t
ntcattctgatacagtaatggtttttccaaactaagtgggctcccttttgtagctacactttattatctggattcttattttcactcttaccccgggatttttagagagaggcattttttctcacatgcacatttgtaaatttcgaggagcagcaacagtcaagaggaaagatgcaaactcatgattcagatctgggacctcacacgggcactgccaccgctgtgcttctatgacttacatttcatgcaatgcttcagtttcttccactaatataataaaaaggagcctgaaacttttcttacataaaaatgcatcccccgccttttttttaagttgctagatttctggcatatatatatcctaataggaaggcattctggtcaaatggaagaggcttagggctttgaaagagggagcctaaattctaagcccctgcctggactggggaacacaggtatacctgtggcggattcatctcgatatttggcaaaactaatacaatattgtaaagtttaaaaataaaataaaattaaaaaaaaataaactgggctcccagctaattgagagaagccattcccacaatctgtggaggctcagttgtcctttgtattatgctacttggatgatttgagtttcacaacacttgctctaggaatagcacggataatgctttagaccaactaaagaaaggaagctagt

SEQ ID NO: 62522 - DNA, 1603 bp, Bovine  19866880442468
  misc_feature (1)..(1): n is a, c, g, or t
ngttgatagtccctgctatctattatttacttttattcccccatgaagcctgatgtctggtaggaagtcttttatactaaaatttaattacctcttccaccctaagggaggtgtgcaaaaccctgataacagagtaaacacacgaaggttagagaaactcatcttcgcatggtgtttcccgtcacctgtcacttggaggggtgatgttctctgcgggtttccgcacgtgtccgtggtgagcaggacaagaagcacagtcagcttggaggtgccagctggagaagctaaaggatgtcttgattcaatccttcaaactgtggtttcctctcctggtttgacatttgtacactggccatctatcctaccactgatcacgcaatgaacaaaacaccagtcatcagcaactctatgttttcttttccagaaagaaatgagatttgtttccccaatgatatgtggaaattggtctcaatggggaacatctggctcgtgcatgtactgaacatgtattccatgtgcttcctctgccaggtgaagtgctgtgcgtgacatagatgtgaacatcacagttcccgtccccacctagcttgccatctacttggggtgccaaatcacgtcgtgtgtccacttctcctttttgcctctaacggcatcatctctgaggagatactcattatctgaacaagaccaacgattgctccatgaatctgtatttctcttctttctgataccctgttaccagatcaatcttcctaaaaacaacattaaacctcctttccaatcaaaaccttctaagtgtacttactggtgattgaaatttactctctaggcagtcattccaagccaaaactccccaaccctaggtcttactttgtgactctttccttatgcatccggtgttccagcctcactgcacaaccctccttcctaaccacacggtgcttctctttgtcccatatgttgttcacactgttccctttccctcaagtgctcttctgttgctcagcaacctattcttcttttgatggcttcgctaagcccacattctctacaaaatccttcccggttgaccagtcacagcgggaagaaatctcttaccttaagcgccactcccttatagttacactcccctaaggctttggtcatattctgggtttgactcatccgatcagaacacattcactcagtgtctaccatgtgtcatatactggtgatacaataattaaaaataaaacatgttcacaaaaactcataatcaggagtagaagacaagcaagcaattaacaagtcaatgtgacaagatgctttgtgtcaagtttctcagccttggcactatggacatttttgagtcagataattctttgttgtatgtgtgtggaggagtcctgtgtgtatgtgtatgtggcgggggagtcctgtgaattactggatgtttagcagcatctctggcctctgcccactagatttcagcagcatgccccaagttgtgaaaacctcaaatgtccccaaacattgctaaacatctgccggggccaaaactgtgcctcgttgaaaaccactgcattgtaggatttcacaaaatatgaggtgcataggaaggcag

SEQ ID NO: 62523 - DNA, 1255 bp, Bovine  19866880511707
  misc_feature (1)..(1): n is a, c, g, or t
nctagttgtgttgatcagtaagtgaaacaggggaagctttgtaatatctcatacaatacacagcctgagactatactgttctgtactgtgatgcgatttgttcaaattagagatgatgaaggtgctagaatttctgatcaattctactgatctctgtgtgggaagaaggcagagctgatatacagcttaggcttacctgggctactgtacccttagaaggcagccaacataaacacagaaatgggggtaaagtttgagtttgggttgcagaaactgtgatcagatggaggccagaagcttctgcttcctgctgaaaaggcagctcgagctctggggaaggtttttctccttctcacttgccttgttctcaatggccgacattaaggtaacatgagagcagctccagtcccacaaaagccttttataccatcaggaggcaattatggcctaagataccttccctggctgcatcatgtcttcctgaaaatgcagggcaaaggattaatgccaggtgaagggcgagtcagcatccaaatatttatctgtgaatttaggtcacaccacaatgctcagttgtgtcattccctctcaacataggaaaaagtgttctgtatcctggatacaagttcagtacaaaattgttctccaaggattacaagggaaatgctgaagctcagcaattttctttgccccttgcattgggctgctgtgccatcgggtgggcttgtgccagacagcagaatggagagtgaagtagtgctggctacaaaactcgtgtgagagagagaaatgagcctttaccacgagaccttaaagagcagggcctgaacttttcaccttttcggtggacatttgcaaggtcctcagcttgaaagtgtttctcttctgcaatccactgagcatgctaggaaggccacagctgggcctgcctcccctctggcaattgatgaagacacattcccaagcatccacttggagtcataatctttgttaacttgaatgcatttaaggacattaatttcttcttttctctcatgaggttttagcagaaaatcccactcctttttccttgccggcaatgtggtacatggtctccacacatccatatcccagacatacccccaatcccaatggtggagtccccaatacccttagtgcacctggttgtcatcacagatgagtgcagcttgctttctgggcttgccttgtaagatctgtggggagagtgcccatgtctcctctccccagctgatgc

SEQ ID NO: 62524 - DNA, 1174 bp, Bovine  19866880535524
  misc_feature (1)..(1): n is a, c, g, or t
ntttaaagattttaaagatacatcttggattttaatactttatggcatgttagcagttgcacatgtttttgacaatgtttttaagcaatcaatttcatgatattttcttacatgcggggaaaaataatggtaatttcacttgttaaatgagaaaaataaggcaagaatgaaggtcaaactgatttagcacatcaaacagtctttgtcagccaagcttaatatatcctgagtttgtggaacaaatgaaattttgctgctatgttacactttgcttccaaacaaccattacaactggttttatatattgtgtgagcatcagaccatcaaacagtgcatctttactgacgtgttgctgcagcgatgatctacagcagcaatctgccatttatataagggcaaaatgtgcatctatatttagttgtgaaattggcctattatactcttgatgtttacagaggctaacataaattaatgatgacagctatgagcagtgcattagttaagcagcagagttcttaccttgaacttgaaggttccagttttaacttcccagtatgtactatactgctttcttcacacattaaaggaaggtttctgaaattattaccctttcttgaagagcattaaaagatttcgggttgggagttatgttgtacataatcctaccagataacagttttttatgcatttctcaattatattacctcgtaagaaatgtggtatttacaatcatggggggaaaatacttctgaaagatttttattctttgcagtggactgatttgattgactttgaactctctgtgatgccaatgtgtggtggactgttttattgaaagtaatgaaggaagggcaagcagtgcttatagaatctttactgtactttttccctgggaagctgcctcattcagctcatgtcagggcaggtgtaggtaccggagtaactatagatttcaccgttaactatgaccagagatctgacaagtatgcaggtgttcaaaggttcatgagttaaaatgctgcagcctttgatgaatttttgatggctgcatttttaatacaggtcgaccttcttcctttgaggctgcatgccagattaattgataaatagtagaagtctagtgctggattctcctaagcaaaacaagtaggaaaatccataaaaaaaaaaaaaa

SEQ ID NO: 62525 - DNA, 983 bp, Bovine  19866880566768
  misc_feature (1)..(1): n is a, c, g, or t
nttttaaaatgcctgccaaaaactgagcctggaacttgggggaaagaggggcacagcagggaagacaaggggccaccctcagaagtgaagctgttaagctgtgtatctggttgtgcacagggacagctgagagggagggagggggtggagaggaagcagaaaggggtgagtgggatgtagagagggagggagagacagagaatatgagagagagaaggaagaatggagagagcatgaattgccttgcaagttcaaaaggaattccatggaacagcaaatacctttggctttttcagaattcatcctagactatcatttgccttatggaagactgcctgaaggcctaggatagcagtagatcacggaatcctcacggaatttctggctgagctgtagctgtaaatgtttatctgtccatcagtgaatcactcaggctgtattagaagcaaatagaaaaattggcaatgtgtattaaaatatatctttcaatataaacacccgacatgtgactaaccgttgagtgaaaaaaagatctactttatcctatggacttctctcaggctttgtgttgcaattacctatgatcccctcccttctactacatgtactatttataacatcaaaagggtttcgagcttcttttcaaaaggaatttattacccaaaaggttgcatttgggaagggagccaactgaagactctggagaaaaaaagaaaaacaatttcatttatttaggaacaaatatgattctgataatgttgaacacgtctttcccatactacagatacatgtatgtgccagaaactttcaaaccccagcagtggtttacgaatggaagaaaataaatgtgttccgaagttccatcctgttaaaagcaagaagacattctttttgtcccagaaagagggaactgggaaagaaggggattgccagaagggttaagcacaagcagagtttcacacacaattggagatcaagatata

SEQ ID NO: 62526 - DNA, 1073 bp, Bovine  19866880616422
  misc_feature (1)..(1): n is a, c, g, or t
ncttattggattataattgctatcccctgtattcagcattaaagaatatcattcagagttggttacaaaatactatcacattcctctttagactctcagtaaggaatttattgccctggtaatttgactatgtcttgcacagaatctgccactcggcttagctagcttggaagtctggtggcagcactcagagagcagatccatccctctcaggtggattcacattaaccacatccatgaggccaataaaccagaatgccagattattcatttacagtgagaagtacaatcacacagatggaatgcttgtcttagcaagaccctaacattcttttcctgcatggaaagcagacattcagaagcccctactgagcctggaatcagaataggggagtaagatgaatcacagtaatagttctgtggtacttactgactgttgcatgcatgctgagttggcctcagtcataaatctggctctttgtgaccccataaactgtagcccacttggcttctctgtccatgggattctccaggcaagaatactggagtggattgccatgcccttctccagggatctccctgactgagggatcgaacctatgtctcttatgtctcctgcgttggcaggtgggttctttaccactagtgccacctgggaagcccgcttactgatggtaggttagtcaatagttcattgaggctgcttttccatatacagtgcctagaaggggacatctggcatttgtctccatggctgtcattttctaagtactctctgtgggtaagtcatccctttctcagtgtcatgttctttttcttaagtcatcaagtaatattcacatcatgatgtgacagaattcattctgttgacttttttgttctatggtttactgttatggtagaaatttcatagatcagtttattttctgtatggaggatgccactggttaggtacaagtagtatgtagaactgaggtagtgggagatgaccagcaaaggccaactcactagctctttctggacttggaaccacgcctgtctgagagcctgccttgaggctgtcagcaggtaag

SEQ ID NO: 62527 - DNA, 665 bp, Bovine  19866880618053
  misc_feature (1)..(1): n is a, c, g, or t
ntcccctaaagtcccagcagagtgcctcatagttgctgctcataaatatttgttgtttattttggaactgcttttaatcttcgttgccattcagtgctttgaaaatatatataacagacattaggcataaacttgaaatgctttttaatcagttggtgcagcatttttcaattactttgtaaaagagagtgccgagggatgtttcagaatcgtctgggctgccagtatggctttaaggataaacagactcttcaatgacatgagcttctttctctgcactatttgtgtgtttgcctcctaacatcgtccctatgctcctaggcttcaggtatgggagacacttttgcgtttatggaagttcctcagagctgtttggtcacttgctaatatatatgtggttttcataaaattgcctatggaggctagtttcttggtgtgaaggaggaatggagaataggataacaagagccaaagcactttatgtttttctaatttttttctttaaaacattttatctatggcttcattgggtctttgttgctgcgctcagactttctctagctgcggagggcaggggcaactctctagttgtgatgcatcatggacttctcattgtggtggctgctcttggtgtagagcacaggctctggggacgcaccgggctt

SEQ ID NO: 62528 - DNA, 2001 bp, Bovine  19866880628774
  misc_feature (1)..(1): n is a, c, g, or t
ncaatggcaacccactccagtactcttgcctggaaaatcccatggacggaggagcccgatagggtgcagtccatggggtcactaagagttggacctgactgagcaacttcactttcacttttcactttcatgcattggagaaggaaatggcaacccactccagtgttcttgcctggagaatcccagggacgggggattctatggggtctatggggtcgcacagagtcggacaccactgaagcaacttagcagcagcagtagcataatcctaaaacaaaatcttggttaaaaaatagtttagtaatgatatgggtcagactggtgtgtctttgctagtttacatgactactgtcaagattatttccattaggaaatagattagatggagagacgtctgttccttcttcttggaaacctagatattaaagatacatggactctcctgactgtgattttggaatagttacatgaaataaagtcaaccaaaggtagcaaccagctttatttaagtacaatagaaaggctgagactgtatgacctgtttttgttctggctatgttcaacgtttcaaattcttgttgaaggtatttccttatactgatatgtaaacacactcatccaagattgacttttcctccctcttcataaaactttggaaattattttgtaagaaaaactagtattaatttctaaagctaatggacactattttgaaggaagtaagcagatccttacctgtagcatgtgaattgactaccaaaatttttccacgaataacagcaggaattcagaacagagatttttttcgctgaacttcttgccaaaggctaacttgccaacttagttccacatttgtaattcagtgtaagttcatcccatatttgtgagtcaggctgatcctaactggaatgcactgaaattgttaggattgctatgtatcagatatctgtcaatcaaaataataaaaagaaatatcattagcaaatcatttggctaagcggttgaacctttaaaaattcgaaatataccttatactgccacaggagactgttcttaaatgaagagaaaagctgttacttaagtacaaggtaatgatgattatctgtaattcttaaggatcattttatcttcgggaaattatttgaaaaggcagatcttaatgatcgtcttgcctcaggactcatactcagaagtctaaacagagtgcctcagtttgcccaataaaatattatacaaccaagaataccagagagtttcctgatatttcaattcagaacgctaccgaaaccacatattctttctcccttaacactgtgaatacaatgagtaccttacatgatccatctgtaaacgaacgtgcacgtgagcgatgtgtgtgcctgcacacgcacagctgtgtacctgcactcacctttaggggtgggctggggatgctgggctgtcacttcatttgaatggcactggctctcgtgtcgtcagtttctcttgtgcctctgggcagagttaaagattgcgggtgtggatttacgcaggcccactttcgagctggactcttcactatgggatcccctttggctccttcctgtccatcacagggctgggcaattcagagatcaagttagatacccagctgtggcttcatgcaatagaaaacatatattttctacaaagcagtagaagtttaaaatgacgtgtttataaattagcaaactggctttccattttatttcgcactttgcttatgttaacacttcttgagatttcacattctttgccggaagcacagtactggtacagtgtaaagtagcaagctgcaggagcaatggcaaaaatatagatgcttgcacaattgttcttttaattcttagataaaatagaataaattcaagattgaatgggttttgtaaattactggtttcaggacttcgatccagtgaaaaatgcgtcctcctgtcagaactagagagggagctaagccatctcctctttcaccgatggcta

SEQ ID NO: 62529 - DNA, 1457 bp, Bovine  19866880661210
  misc_feature (1)..(1): n is a, c, g, or t
ntatttttactctttttcttgatagcctcgacaagttcgagcttgccttgaattttccatggggataaggtgtgagtaagatttccacacctgcaggtgtacatttgttattatgtccctccagacattttcttttcttggaattcaaatattatttctagagtttctgagagcttaggtttgagtatttgtctaactcctcctaatgataagtatgtatgataaattttaaaagatatttagtctaaaatggactttaagagctatctttaaaaatatttaaaaactcttgtaaaatgctaaaaggtgaagaatataaataacaaattcaatgatcaggaacagtaaatatattttttgcctataagcctcaaaaaagtgtattaagtaaccaaaattcttattagggtaaacaaatgtaatagcagctagcatgcatagagtgtatctactattatcctaagtgctttctgctaagtattagctaggtttccatttttcagctgaggaacctgaggcgcaaagaactggagcaactgcataagatcatgcagctaacagttggacttgctactgaataaagagaatctaagtctaaaagacaggcttttaactacccctcacactgtctttgaacatagatttaaatactaagaaatcctctggatcttaggctagtgagttaaaaaaaattttttttttatcaaaataactatgtataaaggaaaggacatggcttatttcagtgagatagagggcaaggggtagcagggggacacctaagcttcaactctaacaaatgaggagttcgggagagtgtttcaggaaggacttagcgcatttcttgtgtgtctttggtcttctttgtggtctgtggtgattttccatctccaggtgcagagacaagcacagagcccctgcactctttacagagagagtaagtgctgagcaagtctgtttgaaacatatgtctttttgaaagtttaatggaggctttttccccattctccttgttgctctttaggaaacaggctgcatactttcagggacgtcggccttaccttgttctccgagaagaggcaagcgctccatgttcctaaggaaaaaacgatcactttgatcatgctgcctgtatgtcagactcgcttcatgaacaatacacttattttaaaagtttgttctcactaaagaaaaccaagtgtattgcagagtttggaggaaaggcacatgtacatcttttacaacaatgttcctaaaacctgtcagaggtgacccaacagtattatctttaaatatatggtcatcctcaaccaataaaacacctcgaagcatgttctttaggtccataaccaacctcaataataatttattttcagttacaagtaaagacagctttaactcaatgttctaataaacaaatggattgaccaactgggaactaattgtcacagtgggga

SEQ ID NO: 62530 - DNA, 674 bp, Bovine  19866880662575
  misc_feature (1)..(1): n is a, c, g, or t
nttatattattatatcgtccttgaataactgtggttaccaaaagttcaagttgatgcagtaatttagaaaaaaaggctctgcttcttgtgtgtctgatattctctgactgggtagttcagggttagtagaaggatgtttgatttcttggcttgcttgtggtgtgcttgcctaggagtaaggcacgggtggtggtggtgggcttttggtttattagaccgtcattatatatttcatttaaacgcaattgtaacatttcccccattttcttcagtttacagccaaaatgaatgtgaaatattttggggggaaaaatctagggtataaaaataatacttaatttatgaaataaaaaattagcatataaagttaatatttgactaaagctcacttaagtttatttttatttctttccaaggatgtctatgatttaactagtaagatacactaagacatgttagaatttctagctataaataacatttttctcataaactgacctagtgatattaaattgatacaaagctcaaaatcagtatttaacatttaatggaacgaacaaactaattctgcaatttaactcaacattttcagtaagatgacttgtaccctaatggcttgtaattaatttctctgaaaatcatatttatgatagtctgcagattcggggctttat

SEQ ID NO: 62531 - DNA, 772 bp, Bovine  19866880720224
  misc_feature (1)..(1): n is a, c, g, or t
ngcacccagcactggaaatctagaaaaacatgtatctatgaaataatttcttttgacagagaaagaggaagtcccagtgacacctcttaaaaccataaaaacctgacacatcaactacttttactttaaaaacaaactatgcagtatgagtttggcttgaaattctctgctctcctcattcattatttaatcttcttttactttgttcagacaagcaatctgcctattgtgaagcttcacacagccaattacctcaaggtgtttagttcatttattatttaaagcataaatcttgtacaggttgtccattgacgaccctctgagtagctgtagtaaatgcctttcatccttgtggcctcagtcaatgctcatggacctacctgctgagcttggcaggccaggcaaggtgctggaacatgtaagataccagaggtaattgcacttccttttctgtttaagtgtgcatgtgaaagatgtgcacacagtagcaaatttggggttgaaacgtaagggaaatgaatcttcaagtgcaatcttcccttctatagagagcttattcgatgttttagctattgttataggctgaatattgaatttagaagtttgtttcaagtatgtctagtgacatcacacttaaaaatatttttgtggaaatatcaatctttcatatttgttggatttgtccttgaacccattttccttttctgactttctttcagtcttgtgtcataataccaacaatgaccaatatgaattactttcaaaaaggcta

SEQ ID NO: 62532 - DNA, 1150 bp, Bovine  19866880728896
  misc_feature (1)..(1): n is a, c, g, or t
nggagaaaggagtaagagtgaccgccatatttagatatcctttgagagaagctatgacttctgaactccacaagggaagagtttatagcagaagcaatatggagcaaatggctcctatgtggcagaaatgatgaagagaggaactttagagaaaaaggagagaaactctaaaatgtaaatatactgttaacaaaaagaactcagattaaccctaaaaccttatgaaatctgccttcaacaaggaacacaaaaggagaaaggcaaaactacaaattttttttttttaatcaatatgggtatccagctaccttgcagacttactatagtgtcgaccattgcatctcagtgtttggtgagttcctttctgtaaatatcggaaggaccttgttctaacactttcagttataacaaggtccttgagcgtcaagtagagttgagcattatggtatggctttcatatcattgcagaaatttatagaagtgtcatagtgatttttaaaagcctgtttttattttccttccatgctccttttacttccaggaatgaatccatttcagttcttgtgggtaaaagtccaaaagttactgcctttgtgattaatcttatttgagaatcctcttcaactaccctgtcgtgagttgtagaaaatttgtgtgcagtgaacttgtcaaaaataaaccacagattacttctgtggctctttttgtttctaaaaactgctgagtgctttagtgcaaacatcttacatttagagaaaacatgaaataaaaatgcactagccagaggccagaatggaaccttagtgctggtgtgcctctgctgagatagtgctggatgccagttggccagactcaggaacatttagattttgtttctgagaggaagcagtgcatagccataagccgcattaagttcattaggtgcaaatgctacatgacacagttaatatggtgacagaaataaactcttcagtgactcaattctagtggcaccaattttaaccaatttatcagacaattgagtatgttctgcacttgggatgggttttaaaaatatggtgtccattttcttgtttggcttacttgactttgcagagccagtttagtttatgaagatgcagatatgtattcactaagcatgtcagcactg

SEQ ID NO: 62533 - DNA, 2303 bp, Bovine  19866880753945
  misc_feature (1)..(1): n is a, c, g, or t
naaccttagatgtttactctatccttttacagaaagagttggctgatcctgcattagagcattctcccaactcaagaaatacactgtcgtactttttgttttgttcttttgttcttaatcattcaactgccctggacaccattgtttataagtccatcatttggaaactgtctggatttattgctctccatggattgcctcctgtcctccttaatacttgtactatccctttttctctctctgtttttaaacagctttatactttatcccctaaacactggtatagcacattaagaatgttcttatttagtaactgacatagatgcataactgtgtgctgcatacaaagaaagctgaatactaatagtaagtttaacactatttatgaagcatgataaaatatacatgcacatacacacggaactccacacggcacttctgctgggtctgctaaataggtatttatcaagcccattttacagataagaagactgaggtcaagcaccattatttaggattgcacagctcatcatcacagttagcagcaacattgggatttgacacaagtctttcatctccagagcctgtgtgtttaactttcctctggtactatgcttagagtgagattgatattaggagaataagaaaatcttattgttaaatatttcctctttcctttcaaaggggttcaaaggattgattttaaaagatgtgaaaaggaaagatgtattctttacttgatcagctttcattctgccacgacttaactgaattcagtaagtgaaaccacttcctgaatcccaccgcttactatatccttcccatcctcccaagtgaagatactcactgtggaacaaagtatagcctcttggttcttttcccctaggagaagaaaatatgacgagtatagagactgatgctccagattacctcaattcatattccagataacacttaactagctgcatgtccttgggcaagttgtaaaacctctttgaacttcaatttccttacttttaaagtgggacttatgataatattgtgtgtattaaatacacaattgtgtgttgtgtgtattaagttattgtgtgtattgtgtgtattaaatgcacctaaatgtattaaaggtatacatgcaaagcccttagaatccatcctggtatataatgagcccttaatgatactagttaaatattataagggtggttgtgataatgatgattaaactaagaatgcttatgaagaatcactatagcatcttactaattgtccccttcctgtttagtttctgaggcttcagcataaagagggcataagttaactgaggcgaggggaatttctttattctctcaaattacccctctgcattctgtatccaggtctcaatctcccagcatggaatgatttcgtttgccatctacccgggtaggctatgttgaatagaaaagaagtagtgaataaatattaagcacttctgacatcttcgctggaggaaatgcctttgcttcttggattaggtattccttattgacttcctgtgctcactgaaaggacttccctggtggctcagatggtaaagaatctgcctacaatgcaggagacaacccccagtggtttggggagaataaacacaaacatgtcaatgtttatgatattggccaacttacaaatcaggaaattatattttactaatcttaattggatttctgatgggttcttccttgcttgtcctaaagcagaggtcaacaacctctagcaaacaggctgagttcaattcccagaaattccctctggtctacttctaattcaccaaaagactactgaaataacagtttgaaaatacattacatttgcatggggtgcttcacagtttacaacttggcttccatgtgaattatgctgttaggcccttacagcaccccagagttatggaagctctgaattggagggagctgcctgtccagggagctgtgggtggggctccccttgggtatctggctgttttgtgccccaggaaccttacttatgctgttgtttctgcctcgattgcccttctcgctccccctgctttctgatctgtaaagcttctccgtgggttcaactcagacattatttcagttaggaaaacttccctgacagcctccaaatcctgccctcttagctcatcaccccttctttgtgctttaattatgccccgaagacacctagggctcaagtccctcaccatatttccatactgaatcaccattatgtcttcatacattttcccaaatagctcccaccccaggccttatcatacattt

SEQ ID NO: 62534 - DNA, 2082 bp, Bovine  19866880849162
  misc_feature (1)..(1): n is a, c, g, or t
ntaatcaagtaggaatgttactgacagtctacaacattgcttgttggaggtaccaaaacagaagctaaaacaaagttatttactttgggtgtggccactgcattcatttggctttgacatctccgaaccaatgtggaacatttttttacacattgtgtaaatttttttttttttggctttgtttttgtttgtactttgtcttaaaggtaagattgatggtacaagattataccacatttttcacagtactagttagaggcaagataatgtagtaatttgagcacagattctgaatgtctgtccccaaggctggtgaagtcattgctcccactgcatcattaataacacgagaatccagattggcaaacgtcctatcatcatgtagaagactctgtttccatttttgagcaactttcctgtaactctgcagtcctcctcttgtccctggtacagccttgcaattcagactccactgcaaaatattactgttaactgttggaaatcttgctcagatggattttttttttccctcctctgcttcctgcaccctaccaggaaaggtatgctccggcactagcttctccttctgttagatttttcctgccacttttacagtcttctttgtcttaactatagaaaaactgcttacatgtatagctttgttttactaaacaataaaaatgggatgagagcatgatctgtctcactgcagtgcctgtcgcctttcttatgctcagcaaccaacaggaatttcacatgaaatcacattatcatttatgttttttatgctcagtagccatcaagaaatttcacatgaaatcacattaccagttatgttttttaaaatatcaagacaatttctgtcttcatttgactgacatacacatattatttcccaaatgtgctatagtgtgttttcagcacttcagtggcttctagctcaattctcccccaccctcttcacatcttcattataaaattactggcaaattcgaatgtcgcacactttaacaacaactctgaaagacactgctggaaatacactgggaaataaggagagagaaacaggcgacacggaaatgtgtgaagattctggcaaaggtttggtaaattctccttgtccctgaacacgtggtcctgctctgtccccaattgtgacacgcagcctctagctagggcctttactttctccaattctatgaattaaatggggcacaatgttcaatttcactttagctgtgtggctgtatgtatataaaatttgaatcattgaatagttaaggtgaaagtcaaattatgccactttctcttctattcttcaatccaactccatcccaaagtggttggtcctttcaaaaggaagaactatttatcccagtacagtaaggggctctccctctctataccaatcttgtgagaagattaaaggccactctattaggcacattccattggattccttgaatatggtactgtagaatccagatggtagaaaactattaagtggataaaagcttagggaccaagggtttcaattataggtcatagccttctcaacctgacattctctatgcccacagatatatcaggcaacttctcagcactgttttctcctctccaagcaggcaaccttggaaaaattgattctattctggtctaggatccaaatttgagatcactgtgcttattaagttttaaaaccaagttcctgcttagattattggtgagatcaattgtcaccaattagaagacaaaacaaaacaaaagctgatcagatcttctgatacagctttcctctgtccctgggattctccaggcaagaacactggagtgggttgccaattccttctccagtgcatgaaagtgaaaagtgagagtgaagtcactcagtcgtgtccgaccctcagcgaccccatggactgcagcctaccaggctcctctgtccatgggattttccaggcaagagtactggagtggggtgccattgccttctccgatgtgcgaccataggtagtctcaaaatgaaactatcagactagaaactcagggcacagcagctagaatgtcaataaggaagagact

SEQ ID NO: 62535 - DNA, 889 bp, Bovine  19866880858787
  misc_feature (1)..(1): n is a, c, g, or t
nttataaactgagaaaagatggaggagaacaggctaaaaatggtacacatttttaaatgttcaggtatcagaatctggcaggtgcaactgagagacttcactagggcatgtgtatgcctgcagatgagtgtgcatgtgtgtgcatggtgatggcaagtgtgttgaaagtgatctagagtctagctttttcagaaagatttagtcacatgattctgaatactccctaactaggaacactgcattacaatttattaccttactgatgacccttcaaatgtaataaagaacccagtaaatcagaataattgataattcagggtcatttgaagttcagctccacattatgtaataatgtgaaaaaatacatcgaggtaaaatttacctttatacagaatgatgtatgtcggcacttcagaagctcccatttacaatcaacagcagaaatactacgtaactggagactggaattcagggctggtattctagcatgattaaaaataattcccacatttattaaagctgaatctaattgcttatactgtaaaatttagatcgggggatgatatgcattaaaagtaatttatgttccagaactttcactaattcagactgacataacttccagataattcatacttgtgaagttttttaatcaaatactcaaagtaacagcattaccattgtttattaatattgaatgagcaaaataacagtgcaccaaaagttttgttttagcccttgtaatttaaatgatgctataattgtccaagtaggttttcctattatgaatatagcaatagataccattatgtatcaagtctcttaagaaatgactctgtaaatcaattatttgcatagctcagaatgcttcttttctgctaaattaagt

SEQ ID NO: 62536 - DNA, 871 bp, Bovine  19866880860970
  misc_feature (1)..(1): n is a, c, g, or t
nggaaaagcgatgggctgctgagtgatgggtgccgtggcagagtccacagagctctccgcttgtcattctggactgcgagtcttgcttgatcccaaaggaacagcgcgacgagggctcagcaggtgagactccagggttatctccaggcacacttatataagcaccccgattctaatatcaaattcaattattcaccctgaaattgaaaatcctccttacccttgccatccgatgggacgaactgaattccattcccccatgatttaccttccctctggctgtttacctccagggcctccgcatcaatttatgagccgcccagtgggaaacctctcatcacaacaagcctccttggttgactgagcggcctgcaccctcttaccatgtgtatactgaatatacggggcacttaattgggacttgatatatcatttcatgaaagcagtcttcagccgtttcatttatgactccccaagtaagtgagactgtcttttgccatcagtcaggaattgtttcagctggtttcactttacagtctggcacaccgtggatgttcaacaaatgccgggggcaggcagggggcacctatatcttgccttggggatgactggagagcccagaacttggaatcaggttctttctataacattacacatttactcagcacctactgtataccaggtgctgtggttatgtgctaggaatgaaaagatcaatgaaaaataagtaagttctctgtgtaacagttgctcacagtaaggcctgggggtgggagctatttgggaaaatgtatgaagacataatggggattcagtatggaaatatggtgagggacttgagcccctaggtgtcttcggggcataattaaag

SEQ ID NO: 62537 - DNA, 905 bp, Bovine  19866880887643
  misc_feature (1)..(1): n is a, c, g, or t
ntctcttaaaaatctaggtgttttatttctaacccttgaaaaacatgagatgatcatgttgttttcttgatcatgttatgctgggcctaggtttgtttcgaattgcttaaaattttctgatggaatgtttatgaggttttatagcacagggtaccctacagtggctagcaagtttcagcatcacataggtactcagtaatttctgaactgaatttgaactactgtggcttgtttttttttccttttaccagttcatataacctgttcaaattatacaattctcatcactgtcagtggctgagatatagtcttcacagatataggattacatgttccatttatttagcaatgtgctatgcacttttttggttgatttagtattctttacattccaaagcattgtcttttaattgaacagacaaatgaccgaagtgtctgcagattaaacattaacctgtatagcagtaccaagtatgcagtgtgtgggcactaccaaatggttttaaaaactgtcaacttccaaaacacagcagtctgagagaacttcataaacagtgtattacttttctgagaatgatgaccctcactgaggaagtgcctcttcagtttttctttaggcataaatgatactccataaacacaatgagattaacatagaggaacaaaataactgtgtttgtattgttcctgagttatcagattattatctcagtactcaaaatcccaaatgtggtgggatgaaaagtacaagataaaaagtacacatttaacatctattcagtcaccaataatgcttcaagtcagagctgggcttctacctggggcataatggggttcctgtttaacatatttatgttggttgtaaaattaggaactgtcattacagccccacatcacctgcataa

SEQ ID NO: 62538 - DNA, 3165 bp, Bovine  19866880899587
  misc_feature (1)..(1): n is a, c, g, or t
ntttcttctactcttttcaagttaacctatttaccactcaagagaaatcgttatgtatgtattgtgcggtgctgtgctaagttgcttcagtcatgtccaactctttgtgactctatggactgtagcccaccaggcttctctgtccgtggggattctccagtcaatcccaccagagtgggttgccatgccctcctccaggggatcttcttggcccagggatcgaacccatgcttttctgtctcctgcactgtcaggcgggtttttaaccacaagtgccacatggtaagccctttgtatgtattacttattgttttattaagctttctgttatattgaaaactccttatcaaaactgatgaaggaaacgctagatgccatcctaagtgttttctctcgtttttctatcgttatacttatcaaatcacttgaatcatatggttttatcaaaaggcttttagaagattttaatatcttcattgtctgtcaagagttttaaccctaaatagatgctcaataaatgtttattaagaagaaaggagggaagcaagaggaggaagaagggatcatctctaccatgcccaccttcatcttttgttgccttaaattaagttttatagtaacttgtccatgcttttaaatggattttttaaattatttcccaaatccactggaatccacttttcttttctacatcttaagattgttgaactatgagtcggggatgtggagcaatgaagagagttgggcaagaacaataacacggatgcagtccagtgcctaggatgcaagtccagtctacaggaggagctcagtcctgaggagacaactactagaatctctgacggtcaccagagctgctactgacgcgagtggtacgacgtgccaggacgtgatactggtattcttcacggcagtgtaaccagtgcagtggtggtactgataagactgcttcctcatcttcctctgaccctcatgcaacttgaaatgcattcgcattcatgatggcaacctgaaaatttctcaacctcctgagtcttttttccttcaaaagagtttgtctcatagtcagggcaaagtgtattccagaaaatgcatagagagtcctagaatggaatacaagaaatgacgtacatcagccatttatacaatgtgctcatgaagggcaggggaagaggaagctgcatctggacccttcctccaatcaaaccgtgaagctctacttctattctttcattgtttatgcttctgggtgagatatacttgcaggaaacctcttcagctttaaaataataatttgtagaaggttttatgtttatttttattttattttactcatgtttatctttcatgagagaaagaaatacctaagagttataatccagccatcttggctataagaaagagctgccaactgaatggagtccactaagtaggcatggattcccagggaacgtcaaggttaaacaggggctccctgagtggagagtctattatctcctaattccatgtggaaccccgatgtcctggggctgcagagcaaaacagaacattcacagaaggagttattccatcactctgtgtaatgggtggcctgtgttttatagttaagtgcgtgctttttcaagtggatgcttttgaaataccactgaacgtagcttcataaaaagggagagataagtataataagtaagctagctgaataaataagaatactcaaggcctgggcacattataccacatgagacaagtcctgtgaaatgctggcagttactttttttgtaatgcatcaaagaagtcagcctggagaaacgctgcagggcagcatcccccgtttgcggggccctactccaaatctcaaggggagcaacagcaatgataggcttagaccacctggccatttgttagcagcaagggctgcctctggtagaagccaggcaccgagttagggagatgatggcaacattattctgtaataccttccgagtgttattacaaaatgacaatattgtttttagcccatttcccttaaccagattgacagaattacaggttgacattattgtgaaattttatgatgtatcatgttaactgtgccagtttgattagccttgattgacagcttgtacctgaacagcaagtgaaatacctcaaaaatataaaaccagcgtatctcgcgtgactttcacaataaacaaaaatctctagctaatttaatttttaactaactaggaatttcatcctaacctcattctactaaaatttcatttctttcaacatcatcttgaggctggaactggaggagaataaatctaggctgcagttataaaatcaccgcttgctttctgagactttaaatgcattaggaacagactgcttgcctaatgtggccctggtctgcattaccattggaagaaacagatgcacctcagggctggcatccctacacaaagcccaggctgagatatgaggcctttaaaaacacaatagagaaaggcaggcacaagcacctctctgcattatcaccataccttcacaatgcttctttcttagagcatcctcatctgttattgaaacagaagttgatctccttttaaatcttggaactagaagctagactgccgagtaaattaagcagaggggtggtactttccccctctggctccatggtgaattggacctgcaattcagtctggaatgagattggtagtttccatttgcctcggagattaaagccattcatactgcagaatctagacatactaagaggtacaattagacaccacttgtagattccacttgccatctgacttgtaaacacagtcagaaaaagtgggacttgatccaaacagtcctctccaatcaataacctgcttcacttccttctttgtatctctctggaaatctgtaacgattatgccaccagtttaaaagtactgcatcacaaaaggagtcttcagatgcttctgaattatattccttgttgctcagagtggaaatgaaattcccacaaaacgggtgcccgtgctctgtgacaaaccagatgctaagggctgagcaacagttacaaaagaaagcaaaccacctacagaaaattcaatgtgcaatttaaaaaaatattttttttttctttttagtgcagatggtacattaggaaggcttttgcta

SEQ ID NO: 62539 - DNA, 803 bp, Bovine  19866880957045
  misc_feature (1)..(1): n is a, c, g, or t
nttggagagtcacgggggtttgaccatggacaatctgatgaaagcagtttttctagggtatatattttcaaaaattacatgctagattcagtaccactttggctatctagaaaatgaaagcaccatagagaccttttttaacaaaaattactctgaatggacaggagtttgtagtttagctttgtttttatcccaaatcttatctaaggaaagcaaccatctttttccaataagatgcccaaacaccccaaatatgtctgtttcttcaattccaggttaaaaatgaatcttacatgtacaaaaaataaataaataaataaaagctttggccatggcaacatttatcctggaaagagaaacaatgcagaatgatagtcaagttaatgatttgcaaaatcctaacagaaaaagttctgagtaagtgaggcgctaagtttgggataaattttttccaagactaaataactacaggtccacgccctagtcaccctcatatttttcatgaaagtcactggaaagatcaaattattaatatctgtctcctcttacttaaaaacatactttaacatctcaccctaacaaagtcggtactttaggaaagctaacatcagggtgggaagcacttatgaatataaactcaagcaaagaacaactgaagtttggcaacacataaaaatgtcacatactttcacaacaaaactttgctcttccaaaaacaaaatatagctccaaagacacacacatatggttcacttacaaatgcagcacacacaatcattctgggaacagccagctactataca

SEQ ID NO: 62540 - DNA, 1676 bp, Bovine  19866881000740
  misc_feature (1)..(1): n is a, c, g, or t
nagatgcatacttatagatagtatagaactaagccctcattttacaggtgagggaaatgatgtagaaagggcttacagttaagtattgctgctactgctaaggcgcttcagttgtgtccgactctgtgcgaccccatggactgcagcctaccaggcttctctgtccatgggattctccaggcaagaacactggagttgccatttccttctccagtgcatgaaagtgaaaagtgaaagtgaagtcgctcagtcgtgtccaactcttagcgaccccatggactgcagcctaccaggctcctccatccatgggattttccaggcaacagtactggagtggggtgccattgccttctcctacagttaagtattagaagatctaaaattagaatcccattgttttgcttttctgtctagggctctttcagatattatttctagcaataatatttgatttctatcatcatcatcatttgatttctatctcatcatccagatgagaatgctcttagctttggactatggctaataattcattttttttttgtgacctccagtcaacttaactatgtaaatactaatgatgaagatggattaaaataagataaaatactgtctctgctcataggataagttcagtctatagaggaacatggtgatgtcagtgagaaaagtgggaagattggaatttatataccagacttaattatttaaaaaattttatccagtttatcacagatcatccagttgtcacatgtttactccctctattagaaatctgatgatagcctagaactgaagtctatactgtactgaagtaggggacttgctactgtttactctggctctcaaaggttgctaggaatgcaatgggtgctttcggtaagctggttctgctgtacaatatatgtatattttattgctttcctctttaatgcaaacctgctactcattctgatcaaacattcatgaaacaacaacatcaaaagaaattcattttaatttgctaaggtcttctatgttgtgcccttgaagaagttcatatggataaacaagcttatataaatagcctccagcatcatgtgaagtgcagttcataatccaacaataaaacagtagacattatacttcgtgcttctccaagcagtctcttgaataaacctaaaggcatttggaaatttatatgaaaagtgcttacatgatgtaggcagcatctttttaatgtgatgagttgttcatgttaataattaaatttcaaagcttaaatttaaatttgtcccaaacaactatatagaaatttaattattttaatttactgcttcagaaaggttctttattctgccctgtgttcatcatatcttttcttaaaagtctataaaggttgatgagtttgttttgtgatgcccattgtgtacagattattgcaagttgtgcttgcagaaagcacactcaagtggcggtgtgtaatatgtcctgagtcaattacttcatggaaatgatatgttaagcaattggaaggtaacagatagtttttttccattattttagaaatatctctattgttataatacagatcaaatctacaatgaacattatgcattattcaagaaatgaccaggcattctcagcagtgtttcagctaaataactgatgattgtaacctttaaagaaatctcatt

SEQ ID NO: 62541 - DNA, 1852 bp, Bovine  19866881096546
  misc_feature (1)..(1): n is a, c, g, or t
ncattgtgtttgttttaaaaatccctcctaacatgtgtgaatctgaggagaggagctgtgcaatgaaagttacatccttcccacatgagccctgtgctccgacaccatcagcaactctgtttttctttcacttgacaagtcagtttacgcatcctgggaaacctctctgcatcattttggtggcaaatggaaatgcggaccttgtttgggtgctgttttctgaacttgctttctcctaccccctcacaaaatgatcgaactagtaaaacctctttaaataccatctgaaaagcaggggatggtactatggtgaagttctgtttgcactcagaggttttcattcttttcgtcatcctcctaatttatactcttgccagagggaagaaattgtcttgtctatgagttgctccttggggagcaatacaagggcatcactctgtgactctgaagccgtagattcactgttcagttcaactacaggcagactgaaagcggactttctcaccgatctttccatgtgtgtgttgtacacgcacatgtagtgtgtatgcagacacaagtacctcattcgaccgagctctgtgttacctcagcccactgtgagaagcaagcggagagatggtatataattaaggctctgtcattatctagctaaaaatagagggaggagctatcccctttgcttccctgtgactgaaaaccagccaaaccaatttcactaaaattcagtaaaataaaaactgtgctcccaggatgagaagttgcatgccaaatttcagcctgaagcgaatttaaatggctgagttataaacctttcataaaggatgttttgtcgctcactcaagataaaaaggctccttttttgaaaaggaaattatctaggcacatagtctttagcggggattgttgccatttatttaaagaaaacacaattttaaatgactgggtttttgaggactgaaagcagcaactgtgtctgagcagtaattatgtttcataattttgtttagcaagtattacatattatatgaatagcatcatagtaaaaatgattagcattcatactatgcaaaattctgcatattaagagcttcacagtagtgtcctacatacaatacattgtaatggctccagattacattgtgtcaggcagaaccctctgtgcctgtgtgtctcccaccccagcccagcccagagccagagccgagaacaggcctccacttgatactgagcaccaggagaatgggcactcccaaaacagcctcagagacacttctaaaattgaggcaaggatttcattgatgatgttcatataccttcattattctgcaagcttagagaaagacctggttctgccatatgcattcatcgtgtgtgtgcggtgttagggtatgaaatgaaggcacagcccacgtgttccataaagagccctcagaatgacggagttgttgattgggatgtttctgccttaggaggtcttgtgtttgcagcccagcatctcaaaacagttttcccaacttggggatcaggccatgaagctagactaatgatgtctcacctgaggagacccagagacgtttgtaatgggactggggtcacacctgtgtacctgtaggaagcctaactcagggagatttggaccgagagaagcaaacttccaagggttacacacaggcttgtgcaacaaaggctatttttattgctgttactgttgtctaaaaacacgggtgtgtacttctatttccataatttgattttctgcagtaaataacattacttataaagtcaaaaattaaaatgaaatacatatcatgtatatacacagatttgccatatatatggatagatagat

SEQ ID NO: 62542 - DNA, 3260 bp, Bovine  19866881102976
  misc_feature (1)..(1): n is a, c, g, or t
ncatatcggatagtatctccccccagtgtactgatgggaccacatggagcttcacagaggttggtaagaagtccaaagtcacagaaggctggactggacactcaaaccaggggtctttcagatcccaaatcccataatttttctacctcattcaccaggctgcctcttttttgtagcctttttctcacttacgaaattttaaagcatgttggaggaatcatgtctttggcctttaatagatatacttacattagttcacaaaatataagatataagccttctaatatccataggaaaatgttgaagatagagatagaagattatgagtcaatacaaaataactggaagtactactggagcatatgttttgaagatgaaatgaaagtgtctcatccagtcaggcatttctactaatgttgttagaaattacacattttcagagaattaaaaatactacttttgtataaaaaatcctagtcatcatttaatcagtatataactttaaactttttaatggttccttcccccaattccttataaatttttaaagggataaatattttactatttactattattaatatatagcaaaatatatgatctttattttccagatttgttcagactgttttgttctgtagttggtttgtaatgagttactatattttagtcaaaagttggggtaagtgactttgcctttctgagtgctgacagaatccattgcttttaagtttttaatccaagactgttaacagttttgtaaagttttagtcaaaagttggggtaaatgactttgcctttctgagtgctgacaggatccattgcctttaagtttttaatccaagactgttaacagttttgtaaaaagaagcaagtctgtctgagagctgtcctcaatgatatctgtactcttccaggtagacgtaacaaaaatagtggcaaacactcattaacaaagaaaaaagaaactacactaaaactcttttcagccctgtcttctggttgtcactatcaaatatggcctccagttaagatcacatgtcacatctctgacacaggcggtttgacaagaagcaatctgaaggctttcagaaagaaatctgtctggggtagtttctatgtgatataaatattacaaggtcaaattcatttttttccagtgagacaaaatgttaaccttacactgggattcaaagctgacccatgacatcatttttggaatgaatatttcttttcattggaaggtgtgacctaatctccatatttcttctatgtatcttatttcctaatttgactttgagtcagaatcaccttttttcatacatgtgttgatgctttctgctgctggaaatagatctgtaggctgttaacaattattgtcgttcctaatacattctaaaaatgcattataaaggtggattgattctgtagttttataataacctgagtgtggcactggtatggtagatgggaagattattcagaatatatcctttttacattagacatttaaatctgttagtagttttggagttttatgaaaacgtcttttcctggtcttgatataaattattgacaaatatgagcttttgtcttgaatactatattttgtttacttataatatttacattaaagttgagaggttagatttgcttgtttattgtgcatgtatttatggacatatgttagccttgcctttattttcctataagtctcagataagcatattttcagatcaatcagcaaacatttattgagcatttactatgtgtcagacactaaagcaggagaaaagatgaataagatactggttttgttcttagctgttcataatatggataaatcacagggaaaaccgacattttcaaatggttttaaaaggagagtcacttgatatgtcttttgggcaagatacattgaagtcattatacttaaatgatcgtatgttattagtgactcccatattgcagagcaaaggtctataggataagaatacatttcactcattgaaaaatcttgtttttaagtcatgtggggccgtaagaaattcttaccatataatgtcatatgaataaagatgttccaaacaaaaagagactcacaaacttagagaactaacttatgattatgaggggaagggatatagggagtttgggatgcacgtgtacacactactatatttaaaatggataaccaacaaagccctactgtgtaacacgtggaactctgctcagtgttgtgtggcagcctggataggagggaagtttggaggagagtcgatatatgtatatgtatggctgagtccattcactgtagacctgaaactatcacaatattgttaattgtttacaccccaatagaaaataaaaggtttaaataaaaaaaatactattcacagttttgatcttagttaaaaattgcatacacatatattgattcacacacagaaatatagaaatatactaaactgaactaactgaatattggaattatgggtgatctttatctgtggtttgaaaccctttataatgaacatttatcacatttattaacaattttctatgttaatggagcctgtataccagcagtggtctgaatttccctcttttttggttcttctctgctccccggttcttcttgctggtttttcacatctttctgaggagctgggaggaatctgattttacctgtccacattttagctctccctcccagtggatttgtcactcttgttactgttgcttccagatcactcttctacgtcacagtcttcctcttagctgtagtgtactggttcatcagacagctagtttaaatatattttcagtctcccttaatcctttgtgattgattctgttaacattttatgtaaatgaaaagagatctggcttcttgaatccagaattccgagttcctcatcctttccctgggactctcttcctcttttttcccctctctaccgctgaagctgctcctctcgttacagagtctagcaaggcttaatcctttgcagctaaattccagggactcttttggacctgccagctccagggaaggggtggtgttaactgtgatgtgctttatgcccttccttcctgcggttaagtgtatcattttctccagttgacccggtgaaggaaggttagcaaaacgcttctaattcctaggtcagagcatagcctccaggctggaccaccaacgttgccaggggattgggtcactgccagacactggagatacgcacaagggctctattttt

SEQ ID NO: 62543 - DNA, 1323 bp, Bovine  19866881134737
  misc_feature (1)..(1): n is a, c, g, or t
nattgagcacacataccatgagtttttagtacttcatccttatttaatatttaaataattaataattaaatatacacattaaatatgtgtatttaaggctataaatttccgaagtgaaattttagctgtatctcatacatcttgtacttttgctactgcttaattcaaaacatatttataattctttcttttaataatgaattatttaaacatctatatcttcatttccaaagttttttatactttaaaattagcttaattgcaaataacattgtctatatggttctgttcctttgaaatgtgctatgatgtggcttatatcccactaaacgatcaattttctcaaatgtttgagaagaatatatattttgcaggtcttttatgtggcattttttttgtttaatggagtgtgcttgattttttgttcagatgactgactatacagcctcaaaaatttattgctgctactgacgaataacatactgctattgatctttttataaacataaatatgtttgcttatatatttataatttgaattttgaaaactttagctcggctctcaacttcggaagaagtatcccagccggtactatgttgagatgatattgtgtagagattaacagccatattggtctgctgctgctgctgctgctaagtcgcttcagtcatgtccgactctgtgcaaccccatagacagcagtccaccaggctcctccgtccctgggattctccaggcaagaatactggagtgggttgccatttccttctccaatgcatgcatgctaagtcgcctcagtcatgtccgactctgtgcgatcctatggacagcagcccaccaggctcctccatccacaggattctccaggcaagagtactggagtgcactgccatttccttctccgaaagtcatgatgagattcttcttattcatttggtaagagccatattcaagaataggtcaagctgtatccacattctgaattaagaaaattaattatattatgagctcttctctgtttatcatgagaagttggagattggtcacatttactgagagttatggcacatttttccttatcactaagttgtaggacatgatgtaggaaaataagccagaggctttaatttgacttaccttgactgctttttgacctgttctatttttctttaccaatggacagcactttttgcaggcatgattttataggccttgcacaaatctcagtaagtcatatatataatacaaggtgagagactgcttttatccaacttggtgtatcgtttcctttgcctaacagatagttataatttcctaatgca

SEQ ID NO: 62544 - DNA, 1965 bp, Bovine  19866881200532
  misc_feature (1)..(1): n is a, c, g, or t
ncttatgccatgtatttagaaatgcttttgtagaataaaaatatcacacaccaaagatagttcttgtaaagttataggcatttgaaaaatatctttcatatatatgcagttgaaaatactttttttgtaagtaatacattgcttgggattaatcagataaagatgaaagtcaagaattttgccaacagtgtttcttactaacattactcagttatgcctttcagctcagcatattgtatatgaaggatatcttgttaaaacaactgttgaagccaagtcgtgtcgtatcagccacactctgtaccctatgggaactcaaatgttcccaactctatgttaatataatcttgctgctctgctgagctaaagcaaaaatcagtttgtcagtgccatgtaaggcttcataaaagtagcacattatctgtatgtcttccagaaatgaaggaaagctgagatgaagattatgctgaatcaatttatgaaggtaaacattgttaacaaaaaccataaaataacctagaaaaggattccaacctccatttatcaactaacaacaagtttatactcctcctgatgtaattggtaacctgctatctatagaaaaacaaaattaccccactcaagacttagcagcagaagcagcaagggttctcagcggctattcggcacaaggttctccattttctgagacaggatcctttgcaatactctgtgcttgggaattctacaactctctacaaaggtctacaattctcctgtactttcttgggacatgaagtcttatttttgcttatcaacctctcttcattataaactgatgacaaaagacaaagatccgacttgtttttaggtttccagggagtgctgagggagaggtagcaatagaaacacaagaccagcattttttttttctcttaattaatgctatttcaggtctagtgagaactaattatggaaaacataaaaatccattttatattaccaaaaactgcatgtttctttcattggctgatgatcataaaggccaactctgattattatagaaacaaaaagacccatagagatgtgaaaggtttgaaaactaagcttaatctttaaataatttaatctaatttcaccaattaataaaacacaaagctaaatcttggaatgtcagaagttaagcacagtacagattcttatggactctgtaaagatagtttataaaagagttaccaaatgataatcttattgttaacattcaataaaacacggcctccctaaacaatattttacagaagttaatttacaggtgtaagtactctccttttgccagctcggtggccaatatttagcataaaggatgcagttttccaagtgtttctttgactaatagaagctatgatgaaatctgctccagcagcctgcagagactggcaggtggacctgagaccatggcaagctcagctaagggaatcaaacattcattgtacagcagtgttataagctaaggtaagaagagaggaaaaatagcaaatgcaggacagaccttgcaaaggaaggtcatgaagaattttaattatacaataatatctactaggttaaaaagaaaattaatctccaaacagaagaataaaaatatttttcaatgatgcaagcttagctacttaacatattgctaataaaacagtaagattccctttccagatactatgttctttaaacttgatgaaaatacagaagggcaatatgaagatcctggcagtcagataattttcagaaatcaaacagcatttttagcaataagtgcacaaaatcttgaaagtcagggtttctacaagacccagtgtacaaaaaaaaaatatcagaattcctacaaaaggggggttagtgatccttgcccttcaaaaattaacatatccttattatttaaaaagatgaaaaccttcactttatacaatggacaaggggggagcagtctattga

SEQ ID NO: 62545 - DNA, 1454 bp, Bovine  19866881201609
  misc_feature (1)..(1): n is a, c, g, or t
ntgtcccctcatgttgagacttttaaattttttcctgagtgttctaaacttgagacaatccttgtcatgaatgcctacattcattaattgaagcctaacatgaggagtatggtgtatgtggctggggtgggggttaagggatgagagtgatgtatacagagaaagcatatgtggaaacagactaaactgaaaggaatgggacctaggaatggtggtttcttaaatgttaactacatttctggaaatagaaataagaacctcttatgattcaaccagattagggaaaaagagttgctgtgtaagactggagatgatgtgaagagaagaaagtgggaaaagtgctcacaaaataaaccctaactcgtttctagagtttcaaagaaaccctagtttgacaaaaacctaaagttgctaaattgccccacatcacacatcctagaaatgtgtggattcaattacagagcgagcgagactaccagcagcaaagatgcttttcttggaatttcaatgcaaagcaaatgtacagatgttggcataaaagccaaactgaagtgggatgaaagatagaggtccagagagaagattggagaagataaagaattaaatatgcaataaaagagaccattacatgcacagcatcaaacttggacagccaaagccttagctactagcatactcagatgctagtattggtgacatgtacaggctaaagaaaaaaaaagggtaagggtaacagaatcaaacaaatactacattaaaatcgcttatctctgtgggcaggctgtaaaaatcatatcattctcattgaaaaataattcattaaactgcaccccagcaggatgtaaagaacaacacacagcatacgaagatattgagcagcagggggcaataaactttataaaaactattaaagcatgcaacaaagcaagataatacaaggaggaaacaatggaaatgtcagtccaatttataaaatagccatgttaatacataagtgcaaacacttcacaaaaaaacatacatgcttatcacattaaaatgcacgcttgtgaaaccacccttgagatgtcaaaagctgacctgccgcagggctgtgaaataaaagccagcgggttgccacatggaaaggcctggtccagagagcttcacaccaggtaacctactgaaatgccataattgcttgtaggtatctgagactgctccagttacagacacagaggttaaatgaaaacagggccacacacggtccacaaccagcgatgtgcgaggacacttgtagctctaggctggtgggcttgagtgccctcaccttcaacccagtttcctccggtgttactggatggttgaggaactaatcctactcattcaactgttcctgagaactgcatagcttaggatcacctcagagcacacacagtgtccataagctgtgttttcaaactgttttactcccc

SEQ ID NO: 62546 - DNA, 1164 bp, Bovine  19866881217154
  misc_feature (1)..(1): n is a, c, g, or t
nttagcagtaaaatgcccattgaccagtgcaaataatgtagtggacagatgcaagggaccatgcagaagataagtgtatagaatttaggaactaattggatttgagaaggaggttatcttaaatacttcccaagtattgagcatatataacagaagtaaatgtctgaggtgagatgttgatcatctaaggagtacatacacagaggcatcattttaaggggtatcctattttggaatgtgagatgctgagctgatacctcaagagaggagaaagttaggaaaataatatagaaatggaggtgagtgcaatgggccattggcatagtctgctacttgacaccctaggaatggctgagatcagctaggaagaaagtgaaaacagaagagaaactggtctgggattacctgtgcttgtgcaattaaaagcgaagtgtgctttggttgtgcccatcaagacaacatgctgctgaagctcttactaccaccccagtgaaaatggcgaggaaaggtgtgtgctgctctaaacacacctgagaaacctttccgtgacaccttatgggaaacctttatgatttgagaaaaaaatctcaactagatttatttttaaatatccaatgttctgagtacttttccaataaaataaaatgctatttttcagtaagaataaaaatgtctgaaaactttaatgtaatatataattgatatagtttctcatcaaaacatttactgcatagagatacaactgtgcttaatatgtaccccattaaaaataattaaagggctgccacatttcaccacagaggtggattcatttccattctggactcaaagatcactttctataaagcattctcaagatgcctgttctgtttacaaaagctcttcagatgaaagatgtttttgcaaatgcaaaatatgaattattgtcatcatcatcgtttttattgtcctaggcatgtgaatggattttgcatctggtggctgttaggttttaccgcagcaggggtggctgggttaaaacctaaattcctaaagcaatactgtaatactttgaaccatagtgacatccaagagggataatgactttctgatgaagtgagcagctcctctgtggtaagaggagagacgccaaacctggaacccggtgcaaactcacagctaact

SEQ ID NO: 62547 - DNA, 779 bp, Bovine  19866881326792
  misc_feature (1)..(1): n is a, c, g, or t
naaattcctgaacaaggttctctaacccttgtgtaaaaccttccatttctctttaaaccctgtaccaaagtagctatgcaagcatcatttacatccccgggcagggcttgggcttctaagtcaggcgctgtgttttgctgaagtctgctcacagcctgtgcattaaattcataatgagattaaaatctactgttcttagaaaaagaagagttgaaaatgtgttgcaaaagcccttttgtctcatcatattaatgttgatgccctcttatcccagaaacttggctgaagctggagccaaaatctatattggtttaattttaagtggccttgtgaacaagtgagtacagacaccgaaggaactgaaaggtacttagagcactcaggctcctggatctggactctcaggtggggctgggcccacatgcttaacatttctgtgaaggaggggctgaatgttgagacccttgccacttccttcattgtaatcatagaggcagattggattcattaatgagcataataggattagatatcggaaaaaaatcccaaattttctaatctaatgtgaaaagaactcctcaaaaagtagacaaatgcatttgttctgcagtctttgaagaaagagtatgaagtgactgtttgataagataaatcaagtctgaatattcagcctgatgatctgctagaccaatggtagcaatcaccctttatttctattcagctttaaactctctctctcttttttttttaattgtatctgggtaagcatattccttatt

SEQ ID NO: 62548 - DNA, 1012 bp, Bovine  19866881326983
  misc_feature (1)..(1): n is a, c, g, or t
nctgcgaccccatgaactgcagtcctccagtgctcctcgtccatgggataccccgggcaagaatactggcgtgggttgccatttccttcttcaggagaccttcccagggattgaacccatgcctccagcattggcaggcagattcattaccactgagccaccagggaagcccctgtgctgggataggtttgtttgattcctgcgttctgtctacatcctctaaggacccggtttcctgcatccccaggcatggggagagcgccttggttttgtttgtggaagaaccgtccagtctttagttacatcacatgtttggtggctgccgtcctgggtgcctatttcagtaggactgtcagccatctcccaaccaggcctcctgtgtctccaccactgcggccttggctacggtgctgcctgtctgcagggcctgcttcataggccagacctgcgacctgtgaatcagagaaggccccgcactgggtttaatcctctgctgtcattcccttcaaattcttaacgatgattaatcaaagggctccacgttttcattttgcactgggttctttgtacaaatcgtgtggccagtcctatttgtatgagcctcttctcccttgctacccccagtactagagaaattgcctccttcaaggaccagctcaagtgtgcttcatgtgtgaagcgttctgattccttggtggacgtgagcgtctttgccccgtgtgtgtccctcagttacaacctgcatggcaccctccttgagctcactatgtacacctgtctcctgtccgccaaggtgggctcttggagagaaggcggcgccctcagcgaatcttctgttcttctccctccatatcctagcccgatggctttcagtgttccataaatgcttgttgaattgaagtgaattaaataatttgcccttttatctgaaagagtaaagaaatttacatttaatataaggcccctttgatagacatactgccttcatttctgttctcttctgatgttgaat

SEQ ID NO: 62549 - DNA, 1016 bp, Bovine  19866880404885
  misc_feature (1)..(1): n is a, c, g, or t
natttgttacctgatatttaagagctgaggatgaaaccttgtctgacctgcagctataccacataaaggatttttttgaatgtcaccgtatctgtatattgggattgaaatttaaagcttttttttgtctttgatgtaatacctatcaccatactatctcatttaaacttttctttaatgattttgaatagtttctagccctattgttcattacattatatgtgtatgttcatttgtgaatttgagaagtctctgcataataagctatcaactgacatactgtaaatgtttcctaaaattttccactcatctttcaaatttatttatattatggcataccaaatatatacaataatggagtcaactctaattccatttaaaataatttttcaaattatgtgtttgaaactgattgtttagaatgcctctaagttaaaactcttttccatctctacagaaatatatacataggttctttcctgaatttaacagcttcttgtttcgtttaacacctcaatatatatggaatttattttaatatatagatagtatataatgtatatgaatattaatctatagatatgtatgttcaaattactattcatttgttagatatatatatagacatatagatattatatattttcaaattattactccattttttaaaacattggttgactccttttatctcctaattacttgcagtttattatttaataaagtcaaacatatgcacatgagattctttgtagcttactttattatccctttcatctctaaatcctcatgttaatatcacattgttttgataatatatgatgtatcaaatacttccacatttaaatacatttacaaaattttattaactatctttatttccttattcttcaaatgaacttcaaaattttattagctatctttatttgttcatttttcaagacaaatttaaagtcactaccaagttctaaaagtaatccaatgggattattataagcattgaattataattaatt

SEQ ID NO: 62550 - DNA, 1194 bp, Bovine  19866880434068
  misc_feature (1)..(1): n is a, c, g, or t
ngttcttcagagatttaaactgaattatgcttcttattactctgtgatcaaactgtaatatattttctaaagtgaataattgcccctctccataatgggctcaaaaacataatgcctttcagagggtttggtctttgacagactatttttggcagtccttagagtttcacatttcttaatttttgattaaatcctaatcaacctgatttccttcactatttcttcttccataactgtgtttctttctgccatctgtttttcatcctcatttagatcatcaaggcaaataatcaaattaaaaggacactgtcaatgtatttttctctcatatctaaaatctattttactgactcttatttagggtttgaagcatgattataaaatatattttccctttagtgatacagatataaatattacagcttagaaaaaaattttttgtaataatggaaaattactcaggctatattaatacttttatttaaaatactgttttaaatacttaaaaattcaaaaacatccatgaaaattataccagatcaaatttcagtcctatgcaccttgacagagtccctgtttctgtttagagcttggttttcattcctcaagtctgctctttaagaaattcttttttgtccttacttgttctcttttttctaccataatccaaatatgttttatgctcatgatagtaaaaataggtcatgctgtgatttcaaatcattttggcttcagctagtactagcttcaaccttttctatttactattggtatttaatagctatttgatcataaatacatacttaaaaagaatatgatgtaatatttaaagttcttcctttcagtcatttttcaggtacatcagtttttttttcttttgtgtagcagagttttattaaaatgcaaagggacagtgaaagctactgacacagacaacagaagggggatggagaatgcccccctcgctagtgttagcgagggggttatatactttttaaattagttattacaataaatcaaaagaatgtctcaaggttgtaaaagtcttactagacccactcccacaatttacattttaggatgacaggattagaacttaacagtagaaagaccctaccagacccactcccataatatacattctaagataccaggattagtcagaaggttttcaggaagcaaaaactgtcctca

SEQ ID NO: 62551 - DNA, 2483 bp, Bovine  19866880493162
  misc_feature (1)..(1): n is a, c, g, or t
ntctgacactgtttccactgtttccccatctatttcccatgacgtatattttacatattgattattttttctatagctattttatattttattcagtttagtttttagctccagaaactctacttgtgtaacctattcattttgaacttatttttagacaactttgtgtgcactttgaatatgttttgcagttcagggacccataagatagaaaatacaccaataatatgaataggaaaattataattaaaagaattattaactagttccagggaattaactactgacagataaagagaactccaaagaatatataaataacctacacagggagcagccagtgccactgattcaggtataaatagacatggaataaggtataaatagacacggaatgtggtataaatagacatggaataagccactttcatcttcaagactgagagtcgtacaacattagattgagtgtatctttggaccgctggatggtaggaaagttcatggtgtactttgggcaagggacggaaagcaggaaatcccctgctgggatggcagtccagtggagaaacaagtgggaatctgcctgctgaggtgctgctaaaactcattggaaagccaccgtctggtgtcacacattctactggctgcctcatgctgcagcaaccagcatttttaaaaagttaaaagcacatcataaccagggagaggagcctctatcccttggaataactcatttagtaccttctattagtaaactttttcattgtgccagctggcaaaagagaagtgtttgtagactctaattccaatatcacaaagcagggcaaagaaaggttgaattgggactgagaaacaataaatagataaattccagtttgcatatagttataatacctgctttaatattctcgtctgctagcttcaacatcggtgtcatcagggtttgttcttttggctcatttttctcttgactctgtgtcacattttcctggttctttgcatatctactaatttttagtatgtactagacattgtgggtgggagagtacagaggctctgaatcctcctatcattctctggatggtgtttgtttttgatctaacaggctattacattactggccatttacattagacttgtgaaggcttgtttctgtgatatcaggagtgagtctcatgatttatgttcagacctagggtgaaccctttagatctggcacatagtctttagtccagtgacttgaaatttggggggtttccatgaacagcttgagttaaccaagccttctgtcacaccagtgtatgttcctcggttctttgttttggcacaacaaagatttggagcaacggacattaaagccctcggtgcatcacagctcttgggtcttgaacaaaccgtgtcatagctcttagacaaatcaatgttacagctctattttatttagaagatagcgggagaatccatccccgaagaagagaagagagtggaggaacgtgccagcttgtgtgcgtggtggggatggggggcggcggtgggtagagagagaaagcgagagagaaagaacctatgcatgcaggagagagagagttccaatgaatatttcaatgaatattcagggtttatttcctttagaattgattggtttgatctccttgcagtccagtggactctcaagagtcttctccaacaccacagtttgaaagcatcaattctttggcactcaaccttctttatggtccaactctcacatccatacatgactattggaaaaatcatagctttgactatatggaccttttttggcaaagagatgtctctgcttttcaacacactgtctaggttcctcatagcttttcttctaaggaaagcatcttttaatttcatggctgcagtcaaatccacagtgattttggagcccaagaagataaaatctgtcatggttttcatttttccccatctatttgccatgaagtgatgggactggatgccatgatcttagttttttgaatgttcagttttaagccagcttttgcactctcctctttcaccttcatgaagaggctctttagggcctctttgttttctgccattagagaagtatcatcagcatgactgaggttgctgatacttctcccgtaaccttgattccagctcatgattcatccagcccggcatgtttcatgatatactctgtgtagaagttaaacaaacagagtgacaatatacagctttgacatactcctttctcaattttgaaccagtccattgttccatgtccagttctaactattgcttcttgacctgcatacaggtttctcaggaggtaggtcaggtggtctggtattcccgtctctttaagaattttccacagtttgttgtgatccatacagtcaaaggctttcttgtgtgaatgaagcagaagtagatgtttttctggagttcccttgctttctccatgatccagtgagtgtttgcagtctgat

SEQ ID NO: 62552 - DNA, 739 bp, Bovine  19866880654567
  misc_feature (1)..(1): n is a, c, g, or t
ntataaattttctataaaatatataaagaactatataaaaaggtaaagaccagatagaaagtagtctatagtatcaccaccattgctgagttgatccctggaatagttaaaatatataccacatagtatacaaatgtatagagattatacctcaatttcctggaatgaactgttgatcattgcaattaacatgtttagcaaaacaatgaccattgtaacattatagactccataaagaacataaccgatgttttcaataaatttgtgattatagttgatgaccactgatttcacttcagaaagtccaaatatagcccaaaacagtgtcttaaaactctcttccactctgggtaaaaaaaaggaaataaaggagatgataaagcatacaaatgaatgacaatgatactataataaaagcaagctgatataatgtctgaaaattattagatattcatgagaaaattcttcacttccctgagcctcagttttcttttttgtaaaatgggtacaataactatttccaggattgttgcaaggataagggaatattttgcatatgaagtacacaactcactatctggcacataataagtgctcaataaatgttaacataacttcaaaccacagacattaacatttaaataatccatagttttggtaaagaaaatattaaatgtattaataaaaacaatgtaatatgtaatttataatttatatatggaatggaataatggaattt

SEQ ID NO: 62553 - DNA, 1148 bp, Bovine  19866880676001
  misc_feature (1)..(1): n is a, c, g, or t
ngcttctctgatagctcagttggtaaagaatccacctgcaatgcagaagacctgggtttgattcctatgttgggaagatcccctagagaacggaaaggctacccactctggtattctggcctggagaattctatagaccgtatactccagtggggtggtaaagagttggacatgaccgagcgactttcactttcattttacttctaacagaggaggaaatggcaacccactccagtgttcttgcctgaggaatcccatggacagaggagcctggtgggctacagtctatgggatcacaaagaatcggacacaactgaagcaagcaagcatgcattagctttaacaacatagatatcactgggaaatagaaatcatggctgtcttagtaaaatggtcttgaagtttctttacccctgaaaaaattttgcaccccgcaaaatatatatctggagatactgtgttttgttcagtttctcctatttatttctttgcaaagccattttccctttagaaaatgtgttaaagaggtttctaatctttctcttagcatgttaatatggtgctttaccacctctcttgcagattgctttctttgtcatttgcctcttcaagcatatgtattatttgaaaagtcctacccagatagggtattatacacgtcctaaaattcaaatagatttattaatgctttcttgacacctggatcctatccctcaacaaagtcgtctcctggtgtttcctcaggagtctcatcacagtctactgcatgtgcagatggtgctgtcagtcgtgctggactgtggctccctcaccagtggacttctgagatcaccactattattttcgcaacttgtttgtctctccctctaccaaggatacaactgtgggagtgttaaagcatgactctcatgacagcatgactgacagccacgaagtctaagacagtcctcagacaacctctaatagccaccaagaggctgaacacacctaaaacatctgtgatttgtgttggaagaaagaatattaagcaaattaagttaaaatggcactatacatatagaacagagaaggcaatggcaccccactccagtactcttgcctggaaaatcccatgggtggaggagcctggtgggctgagtccatggggt

SEQ ID NO: 62554 - DNA, 2404 bp, Bovine  19866880687939
  misc_feature (1)..(1): n is a, c, g, or t
nacatgaaatatttttcttctcgtgtaattttagttttaatatcacatgactcctcacaatcttctttgtaaacagtagcattagttttactttcaccttttgtattagattcatcttctacaatgttaactcctggagaatcctttatattaaaaaaaaataagaagaagaaaaaatatatgaagtatgttatattacctaatatatcataaataagactctagaaaaaaatgagattttaggacatacacaaagaaagactatatagttaattggttaattcaaacttctacaaacaaatcttttgctctcttttttcctctccaattccaagaggattcatttagggcctactttccattacagtggttttatggccttgactgttacacatttccctgtgtgatacagtgctgagccattcctctttcaggaatcatgccatttgaaattccttctatggatactaagaaggttccctgagaggcctacatttctatgccagcaggacattctgccaccaatttgtaggaattgtgatgtggggctgaggggaaaatgtgtaggagatttgtcgcttttgtataagctaaagtatttacagatttgaaaggtaaagtattcatagacttaaaaggcaacaataataataacagaaacaaagaatggaatttttctttgcaaaatcaacaacagatgtcattttaaaaagccagcaacgttgtatctagaatggataaacaatgaggtcttactctgtagcacagggaactatattcaatatcctaggataaaccacaatggaaaggaatattaaaaaggatacatattttatatatgtatgatataaatatatataactgaaacactttgctgtatagcagaaattaacacaacattataaatcaactacacttcaataaaatacatttttaaaaattaaattaaaatcaaaagctaacaaccaactataaacttttgaataccagtggggagaaggaaggagagagggacaaggtagggggtaggagagtataaagtacagactactatgttcaaaaaaaaaaaaatgccgattacagctgtcattccaaatggtatcagttcttactggtacattgttgggttttttaatgttaaagcatacattaccagttttttattattaaaacattctttggtagaagttataagatttaaataaactgtaattaaaagaaaataataacaagatctgtcatctttgacatggatattgagagaaaagtgaagagctaatcacataatttaaaagatatttgcccaaaatacattttgctacaaagatctacttttaacttttgctctttcccctatactcctataacaattgacatattagctgttttcaaaaacagctatagtttacaactatagttttttagatgtaaataagattctaaaatttttagcacagagaattcttactaatacttctgtagctttcttagaatttattcttgcttcaactttggaatttggtattgatacagtggtaaatacatttataacatttaaatattataaaccaatatttaaattatagagattcaaattaccatctactcatagtattgcatacagtcttagctatcactctgacattgctcggaatacaattttttaatattaaattttaaaatttcctgagtgaccaggtacaagatcatatttgaagtacgaaagtttatagaacagtttttttttttagtaaaattaactttttatttgcctatcagatatttcatttttaaagttaagtggaaagttgttggctagtttttaacctaggtctgcaatttctttaattttttacaagaaatgtgttaagagtcaatcttcagtttatagtttcctacgtttaaaaagaatattatttaagcatgtctcagcatttctaaataaacactttaatttttccataaattatattgagtgctgtaattaatcttgtcaaacacctagtatatatcttaaaaactatataatcatgctttcttagctaaaataacattgctgaaattcttaccgtagaatgatgctcacagttatcttgtatagcttctccacaagtaaaaatacatagatttaagaacaagagtgaggcttggaaaagataaatcatatttttcttggttggagaaatgaaaattttcttcaaatatcagttagctctctgtggaaagagctccagtacattgagtcttcagtcgaaaatttctggaaggtgtacaacaaaaacagaagccagtacttactggtttccatgccctcgtttgaaacaacacccttcatataaggaataaggtagcctccagagatcccatcattctatgttatacaaacccttttatcactacatgt

SEQ ID NO: 62555 - DNA, 1719 bp, Bovine  19866880782377
  misc_feature (1)..(1): n is a, c, g, or t
ncgtttacctcggcttttaaaagtatcctgctgcaacctgtgttcctctgtgttaaatgttgaaatttacctttggtatttagaatttcatggcgaccaaatatcagttggagaagtttgcgaggactctgtttgagaacgtattttaagaagtctttgttttcaccttcccgataggccagtaccgatgcaggcaccgccggggcgctgactccgcagcacgtgcgggctcactcgtcccccgcgtccctgcagctgggagccgtgtctccggggacgctgacccccacgggagtggtctccggcccggcagccgcgccggctgctcagcaccttcgacagtcttcctttgagatccctgacgatgtgcctctgccagccggctgggagatggcgaagacatcttctggtcagaggtacttcttaaagtaagtggaaaaagggtgggggaatattttctggcaccaagatacgatttatttttatattttccttaatatttatgtcaagctcagtgatctcttccataattatttttttttccaggatggtacgacctaaataccttctttgggtaatattttgaaagctttatggattcctggctcatagcctcttactaaacttttttttgtggcagttaggatgttctcattttgagtttgtgccaaacctgttaattagcctagctctaaactgaaaggatcccatgaagaatttgaaattgagagaattaggaggctggcatagttttatgaagtatgtagggcacaacttacctttttaaacattttactggtagaaaagaactataaaaataagtacgacttccctggaagtctgattttacggtattttaggtgtgagatgacggaccctttagctgcagtttgatgtgtattatcattttctccctcaaaaagcaaagagaaatatgcattttcatatttgatatgcagcagttcagtagcaaacttcttttgagccagcaggtcttcaaaatagaatccttcttctcagggtaaacaaaaacaaggctattgggttatttgtttttctcagccttattttttgtgtgtttaacaaatgtggcaaattttcattgaagctgaaaagatcaaagtagaattttgtttcctctcactttgaaattatagataagactttaatatttttatttggcttctttggcataagtacagaatgtttcttataagtaattatagactgaaattgatattttcaaaaagttgctaagttctgttcaatcatgttgagataataaaattaaaacaatccaagttttgattgacatctgtctttgacagtttactcccaaggcaaatgtaacatttattcattagatcagataatacaataataataatactgttttgttgtatatcttaatattttatattgcctttcagggcaggttgttaactttcagtgtaagatacagttttgtgacaagcttatttaggagaaaagcagaggggagaagtttgatcttgaaaagtttctgcagtttttttcccccctttcctgtaacttttttcttttttaaatcgttttctggtgtcccggtatccatttcagagggtcaggtttcaaccagaacaataaagagcctgagactggaaggtacacacaagtctggcaaactcatctgcatgagcaagatcatttgttctgaagcagacatccacagtaaatgat

SEQ ID NO: 62556 - DNA, 1600 bp, Bovine  19866880846833
  misc_feature (1)..(1): n is a, c, g, or t
ncttatcaaatgtttagggataacaaaagagaattaacatacagagacaaactcccagctggctgtgactgtctttcccctcatttgtgaagcttcttaaggactgactcctccctaacaccaagcttcatccagttggcagagagtattctcccccactctacctcacaaagaccatccccaaacaatctagctcttaatagtcagtcttagcccagatggataaaggaataccactcacttaagatatgcctttcaaactcccatttgtttttctagtttctccttccttctttcctggatcatcgaccttaggtatgtctaatcctttaaacagagaccccacccacttaccccaacaggtatgacttcactcttggacccataggggcattttcttgagaacacaaccacccagcagctgtaaaaggggtttccaaataaaatcaagggtctcatttccttataaaaacacagttatcaaaagaaatataaaatccatcaaaggaagtatgtgtgatatcatgatttcttatgatatcacaaacataagattcagagaatcttagtatctattatgtcctttgaaaaaaaaaatagtatccataaccataaagcaaaaacctggaccttggttaagagtttgcagtttggaagctgcaaagcaagtgtgaaaatcacctttggctctgcttcctcttcttcatttagcaatcaacatctcctctagctgccatttggattaatggtggatctctttcagttgaccactttgcaggattatgttctgcatgacagaaaccagatattttgtttctaaatctctctggattgaagtaatcaacatctgctgataacagtttattgtcatgaaatgttattagggtctcagcactgtgacctgtggcgttattgcaggatgtgctgaaatgcacacacttgttctgtaacagagtgtttacctctaggaagaccttgcataatttttaacttcataaggcattcatctttgcctcttagagagtaaatcataaaaggaaaacattttcttgagcccattcttcgtttcctgcctctgtcataaaaaaatgctaaacataattggatccagttgggtaaaattaccatttgtgattgctctttgtttaggagtcatctgttgggttttagtacatggagaagtgctcatctgtatgccaaatttcagttaaacttgtgtatctaaaacttggtatgctgttgaagatccttaagcagttggaatggactgaatcacatttcttatagaatgtccatttggagcaggatatagaaatgatacatgctgttacaatgaaacaatgatacccaaacaacacaggtagttgcaacctaattgttctcagccccaaagaggagcaatggtgttgactagagttagttatttccaggcccaggcgagttgctgtttctgtagaggagtaatctgtaaagtatttacatatgttttgagggactaccattttttgaatacctactctgtagcagattcttttctaattgtcatacaaatgtaatttgctcttcaaggcaactacttggctatttttaatgtccattt

SEQ ID NO: 62557 - DNA, 771 bp, Bovine  19866880905147
  misc_feature (1)..(1): n is a, c, g, or t
ntaaattttaaatttctagtttttagttaatagaaaatgaaattttaacatgttcttcttgtgcaacagtgatttgttttgcatatcctcctggtgttctgccacaacactttagaggtcactgctctaaagtatagacccctcaaaagcagagatgtttaaatctttatggtacctgtgtcatgtatagtacatgtaagagaagttcaataaaagcttgccaactgaatgaatgaaacttagtgttttctgtgatgtttgaaggtaacttggaattttacagtggatatatactgtctactcatgtaaattttgactttgtcgtggtatttgtttaagattctagtgttacaagaagaaaacgaattgtcgaaaataagcacaaaattcttttagagcaaaaaagacaaaaccctggatctgtaggacagaagtacagtgagcagatgaatgtaagtaccacgttagtagacatctccattcaatagtgaaaaattcttggaaaacagaatgttcttaaaggtctgtgctctgcctgcaaactgttccacaacataaatgatatagccgaagccattgtgaagcactggaactctctatgctaggagcttattgtactatcagatcagttcagttcagtcgctcagtcatgtccgactctttgcgaccccatgaatcgcagcacgccaggcctccctgtccatcaccaactcccggagttcactcagactcatgtccatagagtcagtgatgccatccggccatctcatc

SEQ ID NO: 62558 - DNA, 700 bp, Bovine  19866880965261
  misc_feature (1)..(1): n is a, c, g, or t
naatcctattaataactcttgatagtttaaaatctgcctcattcagtttcacctgtcatttttactttcagtctctcactttctattagatatttgctggatttagacatttatcttaatggatccaaacctacactcattggtttgagaagcctgagatatttgtgttacacacagaattaaacacaataaagtgagctttttatatttctgacctaggagttaaagtcctataagaactggctcatcactccctctccttctgatcccccttctcaacccatcccctaggtacatatgagaattactcatatgagagaattactcatgagaattactgtgctgctactaaatagttttaaacaaaagcgaaaatttttaaattctttatttttcatgctttgctacataaattggctatgaatttgcattatatctattgtagcagttattcaatattaattaattcccccctcaaaatttcggtgaaattttctattgattcagacgaaactaagaaaatagtcctaggcaaattgatagtatcagggccttctgtgatcacttggatgttactgggctatataatatagaagaagggaattgttcatttacaaattaggtaaattaggtgtgaagcacctactatgtgcccaagacatatacctctaacctaggatgatcgggatatatggtaaat

SEQ ID NO: 62559 - DNA, 3375 bp, Bovine  19866881018190
  misc_feature (1)..(1): n is a, c, g, or t
ntgaagtcatgtaatcttgtacacggcaactgacaggattttgttttccttaactgctttgtaccataaaatcccaggcagacataattggtggttctctatctgacttttaccttatgagggacgtttgacagtgtctgaagacatttttgactgctaccatgagagagcgacaggcatctagtgaataaggtcaagggtgcttgttggacagcctatattgggacagggaagcccccacaacaaagaactacccaggcccaaaagtctacagttctgagactgagaaatcctggacaaaaagaagaaactggggaggctgtcatgaaagtcttgcattgtcagtagttcatggtaaaaagaacaaaagcatttttaaactgcatctttctctcagcccatccattttttgacaatccaaacttgtttcttggaaggaacagtgaacagagtttcatttattcaatatttattaaacattggttgtgtgctaaatattatccaggaggacataaaaaaataaataactcattattgctgattgcaggaagttcaaactcaaatgaaaggagactgactaaaaattcaattatgtttatgtaatgtaagtgctgtactaaaggaagggaagtcagggaaccctgtctggggtaagcggaaaaggctttcagttatgaaaattttttttaaaaagcgttttgaatatttaggaattttgactccaagttgagacattgtatgctggttgagtctcagtctattggatttttaatgtgcttagtcattatgtgcttgctaatatgcttttaaaaccctaggtttcatttcaaattcattcatacaggcttatgcttttatcaagtatgaacaaactaaaagttgtactgtagtatctttgtgaatggagtcataagttaatagtctttctctgtggaaaatggccactccaataccaacccatgctcttcaattcttagaattttgataatgcattcactacagccattttaaatagaaagcaggaatcatagtttgtttattaattttttaaatttctttagcaatttttacatctgctgctgcttaagttgcttcagtcgtgtctgactctgtgcgaccccatagacggtagcccaccaggctcccccatccctcggattctccaggcaagaacactggagtgggttgccattttctcctccaattcatgaaagtgaaaagtgaaagtgaagttgctcagtcatgtccaactctgagcgaccccatggacttcagcccaccaggctcctccgtccatgggattctccaggcaagaatactggagtgggttgccatttccttctccgaatttttacatctagatactttttttactaagtagcaacacccagaaaatagatcagcatctcttgagagctatttgagagtaaatatgtgttgaatgaaacaatgaacaggtcacagaatacctattacatgacagatgctatgctaggtttgggggctatgaagataatcaagggaaagagacaaatgaaaggatgaatatgatcagtttgctgtgcaaccccttccctttatccactcaatcacaatcatgctgattctgtccaatacttttgaaactacccacatctctttaacttcactgccgctaccccagtgagagctaccaacatcctttagtgtcctgtaatagttttttaacagcattctctctggcttcagaatcaggaatgacctgcatggagactggaaatgatctcttttaagtacaactcaaatcacttcacttctctgcttaaaactcttcggtgattatgcaggccttttgtgagaaatgaactcttagaaaacctaaacagatcaatgctttacgagaaataaaaatgttattaaaataacatgagataaagaatttgtatttccttatgaatttatccaactcatttattcatttctgttgtcatatttttcaaagtactcaataatttctgatagaatccattttttttcctttaacttttcaactttttgtctttgagtattcttatttttcctggttaggttagctactgtctttttatgtgtattttattgtgtaccttcaaaacacgccatacatgttttgtgatcttattgttttcctcttctctttttttaatttttaattaaaatatgttgttgttgtcattcagttgccaagtcatgtccaactgtagcctgctatactatggggattctccagggaaaaatacaggtgtgggttgccaattcctcctccaaaggatcttcctgacccaggggtcaaacctgggtctcctgcattgcaggaagattcttttccatctgagccaccagggaagagttcttacagaatattagcaaaatttcctgtgctgtacaatatatcattgtagattatttatttgatatatagtagtttgtgccttttaatctcctatcccatctttcctttcccacttcctacctcccctaccctcccaccactggtagccactagtttttttctctgtatctctgaatctgtttctgtttgtcattcattgtttactttttagatcccacgggtaaatgataacatatgtaatccacgtgttctttatccattcattggctgatggacacttagattgcttttatatgaaggcaactgtaaatgattctgctactaacattgggttgcaagtatctttttgaattgttgttttcattttcctcaactatatacccaggagtagagttgctggatcatatggcagttctgtttttagctttggaggaacctagacactgttttggagaaggcaatggcaacccactccagtactcttgcctggaaaatcccatgggcggaggagcctggtaggctgcagtccatggggttgctaagagtcggacacgactgagcgacttcgctttcacttttcactttcatgcattagagaaggaaatggcaacccactccaatgttcttgcctggagaatcccagggatgggggagcctgatgggttgctgtctctggggtcgcacagagtcggacacgactgaagcgacttagcagcaggccagcgacactgttttacatggtgactccaccaatttacatccccacaggaatgaaaagggttccctttcatccacatcttcagcaacacttatttgtgtgtgcgtttttttaatgataatcgttatgtgactgtatcattctgtgatagtgcaaggtcatacctcattgtgattttgttttgcatgtctataatgattagagaggttgggaatcttttcacagacctgctggttatctatcttccttggagaaatgcctattcaagtcttctatttttaattag

SEQ ID NO: 62560 - DNA, 1350 bp, Bovine  19866881085432
  misc_feature (1)..(1): n is a, c, g, or t
nccccctcaccccacacctgcagtcacacttcaaaagccagcttctctccagcaagtggactcaatcaggaaacagatattgagtgtcaattaagtaccaggcagtgtgctacacactggggatgaaccagatagacacagttcctgtttgcaagacagatagtaaataaattactacaaataattgggaaaataattctaagtatgcaaaatgctgccaaagaaatacctggagtacgattttaagtcctctacattctctagtggccccggggtaggggggccaaattagtaacggtataatctgtagaaaagcaattctgaccttaaggaagatagtattttacattatgcagacaatttagctcctagttttttttatttcctccatggagaatgaaaagagccaaaatgcatgaacacttaaactatgtccttggtaccattctaagcccaatatatattaatttatataatttccacaataaccaatgaaggagtcctactattttccccgtttcacagataagacaactaaggcacagaaagattgtaactagctcaaagtcacatagcaggtaatggcagaattaagaatccaggcaatccaactgccagcccaaattctttattactgggctattacacctctgaatacagagaatttgcatcatcttttctcaacagtgcattcctgtcttctgcctctggaatgtgcccccagggccaggctggagagtgccccgccacatcacacttctccaccaactgcactgtttctcgtagttgctgacagcccacaagttcctctgtagaaaccagaggagacccttcctaggtctagttcacagggatcactcatctctgaattcgtgtacaatcactgtgcacagacacactcttacaggttatgttctctactaggtttacagcaagtgtgtttccccaaagtaaagagcacatgccttgtacagaactggtactcagaaatattaagagagggtccctgggttgtagggatctgtatgataggcagcaaagtcagtggcaaatggacattttagttcttgattttatgtttttttatgattttttttacaaaagtctatggatattaagaccatatctggaaaatattcaataaacatttaacataccaaagcattgtgccaagtattagaagtaaaactgactctctttcctgaactatatacctaaattgccagctgccttccaggtacaaccacaggttcaaatccaagactattatcctgatccctgcaactcagaaacacatattccaaaggctcttcctcaaggtttcagcacttcttgcaggctctccatcat

SEQ ID NO: 62561 - DNA, 1016 bp, Bovine  19866881112922
  misc_feature (1)..(1): n is a, c, g, or t
nggaaaaaaaattctaaattggcattcagtccaatgtgtattatatttgagtacatactgactgcagttatctgcagagtattaattatccagaagtataatgaagtggaaaaataggataaatgtaccagaatcagcaaggagggttatgtcttcataataaataactagttagtcaactgagcgtaattatgatatgtgcatgtacataaaaaagagttcagcacaatataaggattcattttgctcttgaacttgcttaagctccctctttagaaatatacaaatacaaatgttccttcacgggtgaattgtttttccactacaatccattgaacatggaagttctcatgggcaaagcactgggtcacctagcacagctggcaaaaaagtaatctgggaaaggatttttagctcagtggcaagcagacatcttgaggcctgtttctttcttctcccattagcttgtctgaggtttcctttccttgcaactctaagctgcacatggctccatcttattcagatgaagcactaataaatctagtattaggtagtgcttactctagttgtctaaaaatagtgttagtaagaaaatcagctcctccctgtgatggcgaaggtcatcagcctttatctgcaaaagagaaatgctcagagacagcctgtctgtattcctttttatctattttatgatgtaatttgtattgctattcttttctttttataagaaaaaaatcatacacactgcaataaaaaggtcaggaaacatatgaagagcagaatttttaaagatgattcctaacctcactacctagatgttgtgattataaacattttgtggtataaacttgtatgcacatttaaacacacacacagtttcttctttatctaaatatacatcatcattagttttagtgactgcatactttatggatacattaaaaattatgttgttaaacatctagtgataagtattttcaagatcccagcatatgcacttttaaaattttacttca

SEQ ID NO: 62562 - DNA, 1814 bp, Bovine  19866881117997
  misc_feature (1)..(1): n is a, c, g, or t
naactagctgatatttactggctgtgaaaaaggagggcttttatctatttttaaggaattgtactaggactgtttttacacttattaaagtaagttaatgcttgaatattacacaggtcattaaattatttcatatttatactttttccccctacagattttatacttgcaaacataaaaaggctcattttcttgtgcatcgtaagattatttattttatataatatagccatatgaatattttccagagaaagccctaatgaaagcaaacccaaaaaattcccattcttcagaatgaaaaatctaccccagaatacgaatggtcagtgaactgatgtccctgtttatgtgaaagaacatattaaatagtgttagaatctgtgtttctggaaataagtgttgatgggaccacagagattaaaaacacatttggtgtaaataaagtactggaactagagatgtggattaaaaggtgtatcttttgagtcttaaaggaggtaataaattacctaggttggcaaaaacacaatatcctttgaaaacacaatatcctttgtaatcgctaatagcaaatctgtgcgtagacattctgtgcatggaaatgtaacaggtaattaaaacctagatgttaattttcgtccgtggtttcaaggtattccaaaacttgcttttcagtcacaaaccaaaagttgttcagcacacctttctgatcaaagttaaatattttgcatcagtagttaaaggtgtgttaaatttttttaagtgttcagacatgcattaaccttttccttttaagagcaaatatttccgatagctgttaaaagtaatattttccttttaatgaagatgcacctaatgaccaactaaatatcataccctctcttgtagaggaagggaaagcgctgaaggctgtaggaactaactctgtaactccattaatggagtcttgggtagctagaataccatcatcagctcatttgaacttttactgaagcaagtctcttgatatccatgcattaaaaacaagtttttcctttgtttttttgttttgttttccttaccctcttttaaatattgcctcccggtcctaaaatgtcagtttgggttgtgaactatattattaactacttagggtggggaggaaaagctgtttcattgtgtttcaggtaaatagagttgttgctaactgcagcgtcttaaaagagataaatctcaccaagtttggcacataaaagcaacctgtgactcttctcttcacttttcctcaggggaggagggagggggtaccctgggcactgaggagcgtttagcgccctgactcctgcccgctgagccacccagtcctgtgactgcaaacccaccaacatccattttaaaaaaatactgggagagggagggaatactgccctaagtctgagtttctctgagatctaggaaaatcatgacttactgagttacatagttaagtgacagaactggaatctggacttgatcttttgacacctagaattttaaagaaatctagattgcaagcagttaatctttcagaaacacacctaagtcaccaatgctaatacatgggaatttcagagggaggaagatgacaatggttaatgcatttacttatgtactgtgacgtacatattgtgactcatcttgaggaaattaccaaggtagtgagtttccagctacagaagtaaaaccatccagttggattatcaggcctcgcctctgccacatccttaagagattaccttccaacctcacctttgacctttccctgactaggagcttaccatattacaagtcagtcc

SEQ ID NO: 62563 - DNA, 830 bp, Bovine  19866881296224
  misc_feature (1)..(1): n is a, c, g, or t
naatttataatttatatatgtaatgtaataatgtaatttatagtccttttgtgttttctgctcatctacacttctaatatccaataaatagataatggtatgtgtcttaaggtgtcttaaggaaaatatgacaatataaacatagtcaatgttactaaaatcactgacatgtcttaggaatttcaatgcattaggcataattattgaccaaaatgaagctcctctgcttaggtcagttggttcaatctctctgataaactgaactttacaggaatatgaataataggttatgctttgatcagtacttctcattttaacatttttttgttgttcttcagttgctcggtagtgtccgactctttgtgatcccatggactgcagcattccaggcttccctgtccttcaccatctcccagagtttgctcaaattcatgtccactgagtcagtgatgccatcagtctttcctagaatcaaggtcttttccagtgagtcggctcttcgcatcaggtggccaaagtatacctgaatacctaatatttgagtaatgtattccaaacatactttataaaaaacgtgtatccatggtgaacataagttaaaacccttgttgctgctggtaactcagattgattttggaagaagccattcttgtagggccccaggagtctgaactgagcaggatacagcagtgaggagcacagatgctagggtcagtggacaagggactagtcctggcttttctacatactagcagctatgagacactcagcatgtcatttaacttccctgagcttcagttcctttttgtgtgaaacagaaataataagat

SEQ ID NO: 62564 - DNA, 1949 bp, Bovine  19866881321621
  misc_feature (1)..(1): n is a, c, g, or t
ntcctaccccacacaggactgcagggtgggggcctcagtgactgcgggcatgtaatcactgacttgctcagcaactttgctgtaatggcttcaaattgcaggcctgaggaaatgctccataaatagcagctcttttttcttgtaaagcctcttcgtagacccaacagaactgcactaccaaaaatggaggagtcaccatagaccttttaaaaaaaaaaaaaaaaaggtcaagagaacaaggaggaatatcctgctaaccaggttactcattttaggggaatgaatcacagtactgaaatctgacccactgtttgcattcaacttttaggtaacagaaattacaagggattaagtcagtttttgtaatcatgcaatttcatgaaaaggaaaaagaactgttgtttttataggcctttagaaaaagggatgtataccaagtttgaaattaaatgtttgacaatgtcttcttatgggagcagggctcctttcggtgtccattcataagccacctgcaagccaagacatgtgggtgtggtcacagaatacactctggggaagcaggaaccacatatataccaaggctctaaggtcaccgttagcactcacacctcctgcactccttatgttcatgtatatttatatatatgcatgtaacttcatcattcagataacttactgtaaattaacaaaaactcaatgaacagccactttaagttgaatatatttgcagtaacaatgaagatttttcttagctgaattcaggcaggggaaagaaagcagcaatgcatttaaatcaaacacagatagggaccaagaaattcaggttccatgtcgctccagttttccacgtgagttcatgcctaagttaatctacaacaaataaggcagtttttaaaaacaaaacatgagagtcaaattttacaggacaggtacaattagttgtcaattagaattcatggttttaaacataaatgatgacttgtaatcaaaaagcccgtattctaacttactaaatggttcagaaacaacctaatcggatagcacctcaattcagattacattattcaccaacaattagcctttacattttaacagtataaactgttttcctgtgacattatgctttaccctgagttttttaggcctcaggtgaaattcaactatcctgaacaatacttttaaaaaaattccatccaagtatggtaggctgaaaaacatggccataatattttgcagttcctcccaggaacaaagagtctacttttcaaacctttcaatctgagctgacagaatgcagtaacaagtgacattatggaacagcctcagaaggctttgcagcgtctgtctttatcccccagaaggctcccaccaacacggaaggagacctctgtgccccacctggcagccacctacaagccaggagaacaagcctcaagatgctaagactccagagctgtgagaaatgctaggtggtagttcaggcctcccaatccacgttgcttttgtcgttgctgttatggtagcccagtttggtaaatcaaccagtaagagcaaataacctccatgtggcttactacaaaacagctggaagtcttcatgacctaatgtgctgctatcggccatacgcatgtcttaattaccagcattcctgaaactcctaacttccttccaaaaccatgttaatgagttttgtgtaaaaagaattttgactgctctgtgtcccacaaaagttttgttaataaatttaaatctgattgttttaattgttactgggtgttttaacagtaacttataacggtgataggcagaatattagatttgttttacaatttattttaatagagttgattaataaatatgcactcaaatgtttattttggtgttcgtaatgtaaaatggtctctaaactacctgattttgcttgtctatcactctaaagtttaaagaat

SEQ ID NO: 62565 - DNA, 1355 bp, Bovine  19866881334567
  misc_feature (1)..(1): n is a, c, g, or t
ncaaactcttgcttaaatctctaatgacttggcacaatgatctcgtccttttccaggttactacctgggactgacctgcgttgcttagcagtcaactggacatatgctcggaccatttctatttcacacaccttgactactaactgagaaagggatcacgaggttcttaatgttttacacctcgggcaagcacggtgctaacgctttctgaagacatcaaaacagacgaacataactcagtgcctccaaaatgactgagaacaacacttagaaacaactctcaacacttttttggtgagaaattattatgtggtggcactatactaggtgcagggagatatgatatcaacagctttgaagtgaaaatgtactcctgatgtagaaatgttcatgacaggctcgaagggggaacttcaaggcagacttgaggctagaaaaaatccaggaagacaatccaggggaattaacatttgagctgcatcttgaaggaatctgtatttaatttaaacagttccctgatgaagggtagggatctgagggtgaagaaagctaccatttagtaaaatacagaaatgtcctaaatctcaacttaggtcacagaactaggaagtttccttcaattataactgccacaattaagaaactcactatttcactcaatcaaactgtgaaatttaagaggattattcagggatttgttgtttgggtgccactctttcaaaaaactctatttatttttggctgtgttgggtcttagctgccgcacacaggctttctctagctgcggcgaccaggagctcctcttccgggcggtgcacaagcttctggctgagctggcttcctccgctgcgggcacaggtgttaggctctgcagctgtggcttgctggccctagagcacacaggcttcagtagtggcagggcatgggcttggttgctccttagcgtatggaaccttcctggaccagggatggaacctgtgactcccacactggttggcagattcttatccactgtacccccatggaagtccaagggtgcctctttggaaaggcctagtaactttggggtcatcctataaggatactcttctctttttccttttagtctatgctgttgactatcatgaggttttgtttgcgggggcaggggggcagtgaggggaattatagagacacagtagtaagttaggaaataactcaccttttacagacaatgttcatgactagaaaatcacttcaaatatcctagattattgcagttccaaatgcacttaaagaatttgaattaaaagcacattttaattctgaacataattcccaattgtatcaatgagctttcctaaaattaaaatgta

SEQ ID NO: 62566 - DNA, 756 bp, Bovine  19866881336393
  misc_feature (1)..(1): n is a, c, g, or t
ncaaactcatggatcacctctaaatatgtacaagtgggcaacaaacattttcatcgcagataatgtgtgcatacatgagacacagacccttagacatgggaaacgtgtgggagttttccaaggttaggctattaggcttaaccatcgcagccaagtcttttggggataaggaggagatagaaagtaggccctggatcatgaaggtaaacaaaaagaggtcatcactttaataagatgtaaacagggtgagaaatttgaattaggaaaaacaagaaagagtagtagcctataattaattaataaattagaattacttatccttgggaaaaataaatttttatgtagtatttactactactagctgaaaaactactataacaaacactaacttcctgtaatattttgaaaacaaacaaaatattgtatgtcataatactgaaggtgactcaacgtcaacttcctgttcttgcctgaggaccctcttgcatcaggaatgactcaaaccacctgcaacgtctaatcaaaccagaaagtcctgattttgccacaagtcagatgatcagtctctccctctcacctgccccacaactcaggaatacagatgtcacccaggatactgaaagtttattaaacaaaacttagtggttcaaagtacagggctatcaagaagtaagagcagctggaaaaagtagatgcaatacatcttgcaaaagaatctaatttggaccaatttcagttttgaaattctggtctctg

SEQ ID NO: 62567 - DNA, 1365 bp, Bovine  19866881348488
  misc_feature (1)..(1): n is a, c, g, or t
ncaagcataattgtttttttctaggattataaccatattttgaaaaatgtctttgttttgatttatatatataaaacaggcatatattttacatgcattatatgattacagactaaatataatgacaaactatgtatatgtgtctataatattattctacatattaacagtagcagcaatatgaaaacatgataacattttttaaaacatcatgtaacactgaaattttacttcttccaattattctgaaggatagtccatttcctgaaggagagtgaagggtaaatgtcagacgactgaatcacaaaatactggaaaggttaaggcagaagcagagagttgccatagtacttttagtctcagacatgataattagtaaatttattctgagactgttcttgtaatgattcagaagtctattttcatggacaacgatgaggacaaaaaggcagggcagtcgcgtccaaaactcatttcttaaatgtcgtcatcaaggtttcctctaatgatttaggaaaaaatattaatgttctatgcatttactagagggcatacctatttgtctaccttttacacactgttcctatagtttatcagtagataatgacagaagcttacggctttcagagtggccattagaaaaagaagaaagtaaaccattcttagattctgtacataccaatatttctcttagtttttacttcaatgtctttgataacatgatacttagggagtatgatgactattatgaatctgaaaaactattttttagcactatgactaatatgatctctttagtaggtataattccccttatcattgaataagttggctgcttgctttgtcattttcaaagagtttgaaaaacttgaatcaatgtccccatgatccacctacactggatgtatatcagtcaaatggcattaatataaaaaaagcctatcatacagttggtcagtatctctagctatttactcagttgtacaaaagtctcatcaaaaattgatttcaaaatgaaaactttctgtgatttgagaataggtgttatcaaattcatactgggaaagtttttaaaagtgtccacagaaatatttacagtcgttgctgtaaatacaaagtaaagaagaaacttcgagcaatcattctaatgattcaattaatttgccttcattacctgagtcttttgtttgtggtgtatctctaacctcaggtagtcacatataaaagtaaatactcagaaaagtcaatgttttctatggtaacagatttctctggtagctgaattttgaagttgactgtcagtggtaagatgctgagctgtactcctacacaaccctgtgatcaacttgctcacttggaaagctg

SEQ ID NO: 62568 - DNA, 1041 bp, Bovine  19866881349189
  misc_feature (1)..(1): n is a, c, g, or t
ncaatgttcttgcctggagaatcccagggacggggggagggtcgcacagagtcggacacgactgaagtgacttagcagtagcagttgtaaatacagtagcctattatttattacctcttataattctcaaaatttggtacgggatcggcagcatcaggctcgcccgggtacttgtcaggaatataaattctcagaccctattccactcctactgaatcagaaactttgggtataggacccccagctctgttttaacaagccctataggattctgatgcaaactggttgaagaaccatagatttaagacaatattcaggtttccaggagtctttgttagtcaagatgattttggaagaattgacatttattagtaagaaagaccactctctccaggtattcgaattagttgtggcaaacaaagcttcatagataataaaatatatgtaagataaaccacttctcactggaagataataggaaaattgttacatctaaaattactggggctgaaaagttgtgtttcttaggaacattttgatgttatactcctcatttagctgagcacagctcaaagaatgtttctcattagttcttgttttcctgggggcagaggggagggggcgtggttagctgtacccaccccaccagatttctggttattatgagcaaaaggtttgacatcatcattcactcaattgctttcacttgcaaaaacataaaataccctgagagaagctaacctcattagcatttccttagaagctttatccagttaagacaataggatgattgtttgatctgtcaaggaatctttggttgggttaagaaacaaggttgatgtctccttggaaaaatgaggttgctgctaatatttacagggagctatgtagcatacagctccctcgattgttaagacaaaactgctaaggtctgtgtggcataagatatatgttggtgctatgctgtacttttgaatcaggtgaaagggtcccaggaaaaatcaatttatccagtagcaataaggacctctttttatcagt

SEQ ID NO: 62569 - DNA, 942 bp, Bovine  19866881541205
  misc_feature (1)..(1): n is a, c, g, or t
ncttaaaaatttaaaaatattaagtctatgatcatttcactaatgaaaatgatggaaagatacaccttgtcaatgagccacttacagtgcttccctattttctgatttacagataaatcagggtcagtgtaataggagttcagggttcaatgaaacacagtgtcaagggggcagaatcaaatacatactgaaagcaatccggtttatttcagattgcaccttgagtcaggatagttttgaggagcagcaagggcaaaagccaaagtgaatggagttaataatgaatagatgaatcagaagctgtcattgcaggttagcattctgaaaagtcgactaaagcaagaaaagatgggataaaagcttgaggaagcatgatcagaagagggatatttaccattatttaaatagctttgtatgtacctgtcttcctcagcacctagccaaaaaaggaagcactaaatgaaaactgcttgtttacttgcttttaaaagtgcaactcccagaacccggagacaataagaatgggaattaatttgaaaagcagagactctctgacaagaatgaagatgattacatagcatcatcactaccaaccaagtcctttgagaatacaaaggttacactctaattatcataacattctctgaaggaataaacatggtttacatattctgaaaacagaactgtttaacactttcaattttctacaatgcaaccaataataatgtcaaaggtgggctagaccaattcttaggtagggacaagtcagtgataaaccagtgtgaaggctccaggtcctttgcttctcattttgtctgttgtctctctgacaacagactggacagaggatggaaaacaaaacaaattaaccaactatgttaggctttagcagctctgtaaaataaagggaagtgttaggttaactcttaagacggactattt

SEQ ID NO: 62570 - DNA, 987 bp, Bovine  19866881581528
  misc_feature (1)..(1): n is a, c, g, or t
ntctaagactttagaaagtgtatactgttgaacaaaaatgtctatccttttattcattgtgcaaaagtttttttgattgaaaatagttgatgttatcaggataataatacacagaaaaataaatctagtagagcagaaaacctgtatataaaaatgcacattacttctatactaaattactggaaattttttattcctctaaattcccctggaccctaaaccccctctaattgtctgtcatcttcctttttgagacaaaaatttccagtgagtactctaaaattacactgtgttcactgcctcagcttccattcgtttcttaatctactgctgtctggcttctgtctctaccattccaatgtactgcttttgctagtgattaactaattgacctaactgcaaaaagagacacttcttgaccactatctttcttgactttaattccctcggttttcatattatcatatgttcctggatattttgtaacttctctggttgttcctcctcaggctctttcttgagctcctctttctttgcttggatatgctagattttttgagagttatgcaatcctctgcttgtctatccatattctctgtgtaatcttattcatattgtctgtgtgatcttatctgtatctgtatgtaagtgaagggttaatccatcctctgtggaccaattcaactctgggttaactctttatctctgtcccctggattattagcagaactaggagtgtgtttcaggcacacagatataaaaaatgacccttcatggataaactgtctgtactgacaggactgtcagtaagtcataggaaggacttataggaaggactggtaggaagctatagctttgggtttccccaagtgtggtaattcttaaaactgaacatatcgcttgcatggaagctattcatatagtcattacaagaaatattggctcctgtttagaacagaggatttctaacccaggtgtctgtgcatt

SEQ ID NO: 62571 - DNA, 779 bp, Bovine  19866881638593
  misc_feature (1)..(1): n is a, c, g, or t
ntctccctgctgggtcgcatgctgacctggggagatttttaaacagtttaatagccggcttgcctctcttctttggttgatgttatagctgcaagtctgtgattaaagagcaacatttatgctccccttttcgtcttttgtatcttgtaataattgcttcgaggtgacatctgcctacatttttatgtatgtacatttaataatctttttgttttgacctgaaatgttctgtattttattttttaaagtttccagtgctgctttctttgagaaagtgtctctctcagaggtggattaacaaaggaaacacgtacaccccccccaccccaaacaccccactcaagtgagcctctggcgaaggtaaaccaggacaaaatgatctgaaaattatgccatatgggtagtggtttccatggaaaagaaaaactggaaagaagatagattagcatgattgtttttcaagatttttgagagattctcactggaagtaaaattaggtttattatgtgataagaatcgtgaaaatttttgactctgtggaatatttggctcacatcaaaccttcagaaataaaaaggtgtccccttatgattgatctcggtcagtaaaagtcagcaaaatcatgggttagttggtacgcatcaggaattacggagagggcccctcagcactggctgtggaagttggatgtggacttagaaatttagtatcttctaaaggatctgctttatgagcagtgtgtagtggagaagagttatagaaagatagttcacatccag

SEQ ID NO: 62572 - DNA, 1116 bp, Bovine  19866881703054
  misc_feature (1)..(1): n is a, c, g, or t
natgctgtaatgtgataatctaaaggagagaagaattgtattaaaaatggaaggcattcagtgcttaagcctcaagaaaaataagacacatgtccatatgaaaataaaaactacttcaagaaataatgagatataagaaatgactaataaaaataaaagccttccatcacaacccaaatccttatcacaaagataatatacttgacccttttggtagacgtacacatagagcaaaagaaactacattttccccatatttttatactttaagataatgttgttagatatctatctccaatatccatgtatttgtggtgagacggttgatcctgaaccacaggctacctaccctgagaaatctgactaaagctgagcagtgatctgtttgacctctatttgccctttgtatcatcactttcaaccagattttctagcccatattcattatctatatgactatcagacttctgagaggtgaaaatactgttaaagggcaaggaatgagaaaaggggaacctgaataagtaacctatgtacatttctcaactcatgagaggacactggttgatcagaaggacgtaatgcatggaccctcagaacaaagcatagcatgaacatagagggagcccaatacagcgaaaaaccatcttaataagcctgtctctctacttccctgttcaaatgcttttccacctatgcagatccattcctgcctgtccagctacctccacacctgatccccacttacctaataagctatctcccttcagagccccattgctatcccaccattcccaaattcttcctagctatccaaccgtttcttccacctgccagcctgtccatccatctgtcccctctgctcttccaaagaacttcttagcagccccgttaccatcctacccgatcaagtatcttccttgcccaccagcttcagttacttctagctttcctggcaggttccctcatctgccaaccccaattccttctggcccacctgaccatttaccccacccaccccgaggttcaccagtcattcctgattcagactcacagagcaagttgttttataaaactttcagatccgaacattctcttccagcacagcattcaacc

SEQ ID NO: 62573 - DNA, 909 bp, Bovine  19866880353516
  misc_feature (1)..(1): n is a, c, g, or t
nccattgcaatgaaaagaataaaatacttaggaatatatctacctaaagaaactaaagacctatatatagaaaactataaaacactggtgaaagaaatcaaagaagacactaatagatggagaaatataccatgttcatggattggaagaatcaatatagtgaaaatgagtatactacccaaagcaatttatagattcaatgcaatccctatcaagctaccaacggtattcttcacagagctagaacaaataatttcacaatttgtatggaaatacaaaaaacctcaaatagccaaagctatcttgagaaagaagaatggaactggaggaatcaacctgcctgacttcaggctctactacaaagccaatttcattttaattacactcactcaatagaattttagtccaaaaaaaaattgtgtacaatagaactagaaagcattttcatacacagttagaaagtctgtttttttctctgaatacgtaacagtttgaatatctacctggaagctttttgtgtcttttgaccacaaggtaacttttataataagcatacaaaattctagtattaattcagatttctgaaattggcttcaatctaagaaacgttaatgccacagacgacaaaggtctagcatacaatattctatacatactgctcaataagtgtaaataggagaagatggtgatgagtgtatgtgtggtaaacttttgatactagctataaatttagcgtgaatttctggaaataggaatcatttagtactagtaagttgtccccctcaaacatattaatctatcaaagtggaaattaattgccttggtttcaggggacaatttgtacccatgcagctttatatgggaaaagtacttatggaatttaaatagctgacgaatctacttgtgtac

SEQ ID NO: 62574 - DNA, 2073 bp, Bovine  19866881196466
  misc_feature (1)..(1): n is a, c, g, or t
nttattttgggagaaggaggcttacagagcacacagatgcggaggaattgcttatatttaccatgtgaaagctaagaatcatgtacgtgaattgacgttgagcgtgatggactaagaggtagaatagaaaattaagtaggctgtatctatcagatgcaggatttaatggactaactcagctggaaatgacgaaccgtttgcttggttgactgactaaagcatggattccacaaagggctatgttttatgaggtcaagatgccagagtttccctgtaatcatttagaggaaggaatccaacaggcttaatctagtgatgttactataaaattaccatatgcaatttgctttctctccttttgacaatgttaactgaaagttacagaaaacactcccaaccctggggcattaggaaatgaattatgaagggagaagcagaatcctttcaaacttggtgttagctgtcatggatagactgggtatgatggtagaatctgccactgaattaatctacatgattttaatgggaatgataaaatcccagagtgacagaagccagttgacagtacttaaccatcagagataagagcaactgccattcaaagtgttttaaagtctagggatctggggcatggctgattgattacccgggtcctaggaaaaaatataataaaatacaaatatggggaacaaaatctttcatcattgccataagatgttctcccacccaatttctctacgctacgtcatctataaaccagaaccccttgactgaagaagcgaccaggccctcttaaggagggtcttgcaacagttacgtgtacagactgtaaggcatcctctaaacaccagccagtagggtaaatagtcattttgtctgtgactctgctggagaaagagaaaaaccccagacactgactgtgagttgaccttaatccctgtggacctgaaatgccacgatgattcactgaagcttatggtgaccagtaaatagaggtttggcccaagtctatttcaaagtaagcctattgaatctatcctttggttatattcccagttcctgaaaactacatagtttggtaaagtagatgaagaaaataacagacttcagttcagttcagttcagtcactcagttgtgtccaactctttgcgactccatggcctgcagcacgccaggcctccccgtcccatccaaaatgacaaatttggaagaccctgaactaacctgtcccatggacacgctgaatctatacctatatacagggcaattcatcctgaagacctgagggttggttgaatatcttctgcacattcaattatagaccacataaagaaggaaagaccagtcacagacacattatctatgggaatcgcacccctgatggggcaacattcagtagggagggctatcagtgagggacctgtgtgcagacttgcagggcctggggcacagtataaaacccaaaatttgttttcataaaaatagataacatatttcataagcagattgtcttagcgtccacattggttcctcctccagcaccataatccatacaatttcagagcaccttactctcgatcatacatcccacacctcattacttataactgagaaaacctatttcagtgtgagagaagacagtaatccacatccaccaaatgtacttaactcatgtactggctgatccagccgaatagtggaatgaccaaagattcaatgtgagggccacctgggagataacacctctgaggttgtttgtgctgttttacagactttgctggacttgctctgaaatagtgacatggtgctaatgttatagagttcactggtctgggaactaagagaagttggagagacccttcatattatacttgacaagataagaataaatgtgataaattcagtaagagtcaagtctagattttctctcccccttttttcaaagatctgactcctagtgctaagagccaatacagagacaagaaggcctttaacttatatgcacatttctggcatgcaagactttccccagggcactgagtgccctgatttttatgcatcccctatgacat

SEQ ID NO: 62575 - DNA, 726 bp, Bovine  19866881309727
  misc_feature (1)..(1): n is a, c, g, or t
naaaaatgtgggtgtgggaggtgtgagaaattagggccgcggcttgagttggttctcccttgaaggactggaaaccacagtatgtccggatgacctgaaagtacaccaaagattttgagtaaaacctacaggccaggtgcagagaaacagtattctgcaaagatgaatccagtcatcacttactcatgtctgtccaaacaatcagccaggagaagaatgtccctgtcccccgaggccctgcttctttctcccaggatgtactactgcctgttaggaccactggggctgcctcagatacatcctgacagctgcagaagagtttggtagcagtcctaattccgctttcctttccatctgtttgcagatggtttaaatttgacccctcagggggaaaaaaaagtatcctaccaagaagcaattattatgcttgtagatttctcttttaaaaaaaatgacaagactgtgatttgcaagagccttgtaattgtggattatgttgggagtttgacactcattctgagcatggagtttctgacactgtttggggatagattgctaatatttcatgtagatttattcaaactgtcaatcagaacaacgtagaaaataatcaaaaatgtcagccagaatgttgaaggaagtccagtcctttcaaagctattagcattgcttttatttttctttttcaaaatatctttcaactgcaacaggatatacaacaccaga

SEQ ID NO: 62576 - DNA, 1325 bp, Bovine  19866881499827
  misc_feature (1)..(1): n is a, c, g, or t
ncagcagtaaataattcatgctttgttttaatagttctcattttagcatgaatattcatagtgtatatgatggggaaaaatcagaattactcaagcttctgggagaagcagataagattattgttagaaagatgaaggaaagcattaatttcctgaatatttaaaataattatataggtttaaattttggtgtgatcatcaatgctatataggtatatctgtcattgtcattgactggtcgtttgtaccttaattgtcttcaactttaatattttaacataattagaatactaaatgttattttaaaagcattttatctagctccttaaaataactttctgaaatagtgttaggaagataccatttttgatgtttgaagtagcaaaatgtagcaaatttatttatatagttttgcatacactcacatacagctatagtataaaaacccttataaacagttatgagtttactagtcactaccacactatgaattattgaaaaaaaatataaacctggctatcatttgatcagaatttaataataggaacttttttattcacagtatgattgaatgaacaaatttataaatgattatatttactagctgccagatactttgtaaaacactaaggagaacatatatatgaataacggataccatctatcccccccaaattaatattaatggctagtcatttacttagctgagaagatcatccagtaaacttgaaagattcatggaaatatatgcactgtagatttattgcagtagttccaagtggcctattcaatattgtccacaaaatctattgttcttttctcatagtttcaaaaagcttacttttttctctcctttgacttaaaaagcacttcaaatttttgcctttctgtttgctctagcctcttcaaaatcacaggggaagctatctcatcaaaagatttaaatgacatggtgacatactggtctcataacactttatatgaaagaaactcaaatgctctcttttattttcattcaaaaactcttgctatctttattctactttgatccttataaaatttatttcaaagctcatcttgttgctattgtttcttttgttagtcttaaaaccattttttttaattaaaacattgacccaaatgtaagtttcttatcaatcattatttttggcttgtgtgagttatgaactatgctcaagatttaaaaaactctaactaaaattgtaatgaatgggtacatttaaactagacgagccttaaatgaaatagaacaaaatatggggatttttagcctcttaaagatataatgataaggggataatttt

SEQ ID NO: 62577 - DNA, 1535 bp, Bovine  19866881686599
  misc_feature (1)..(1): n is a, c, g, or t
ngctacagtccatggggtcacaagagtcagacacatatatatttatctgcattcaaatgtttcctaggcttataaatctggagagacagtagtttttgaaatactgctagaaagtgaaataagagtttgagaatgtaagaatattttcttcctccatctccagtagctggtgattcctgagagagggataagtactgcacatacttgttttgtggtttgttttgattaaatactgaatcaactttaccattgcttaataagatacttaaaattcctacataaaagatatgcctcatatttcaagcccaataaatcacagtttcagttttcaattgagacatttatctggcaaacttaacaacactagcagaaacttaatggtagtctttttttactttttaactttttgtggccaggaaaaacaaaactggggttttctaaaggtaatcttcatagtattacagtgaaaatctgagtagaatttttttaatggagggcaataaattcttctgaagggaaagttctgtagtcaaacattcttttcttctctagcactgtcaatcaccaatgctcctctttgcggagagaaaaactagagctcaatgtttaataataataataggataagtaacacacatatttttatctttatttgataattctataaattatattacttataagtacagaaatagcttaagaaatattgttgacagatgactacttgggaggaaaattatggttatttaggaactaaaatattgtcattcttttaatagttaataaaataattaaaactctttcacttgctttcattttaaatatattattgaaactcttaatgctaatttcagagaaaggaaaatattgtgacatgcattttattgcctttaaaatattctgactagaattatgttagagctagtttaactatatcagttatattataccaacctgaatttctattgggcatttgtgtccagttatgagtgcttaacttttgaatatatactaaaatttcactttgattgtgcttgcatggatacctggtctaatatctacattacttgatgtgcaagttaatgttcactcaaaatggtttaatattcttttagaccaaggactcctgttttggagggcataggaaaggtgatagaatttctgcattttcaggatcatcttgaatgaacactttgttgcactctgaaatctgtatttttctcaacattgtcatttaaaatgttattatataccttttcggtatttttaaatgcaataatttcaagatgaggcagatctctttgcttgcattttgaagcagttagacaatttaaaactttccaactggctaatttttactgcaatctggttattctcaatcttggctggaaagcattgaaagcaaattaaaaccgaggcctcaccccataccaaatgaatcagagtatctgggggtggggccaaaggagaggtactaaacaaaggagggggtgaggattaatgcaccatgagctagagaaccacagcaatataac

SEQ ID NO: 62578 - DNA, 830 bp, Bovine  19866881852824
  misc_feature (1)..(1): n is a, c, g, or t
naaaagtaatttctatcctagtgaatactaagtctttaggaaaactgtcatttggtaaaatgtcaaggagttcatttaaaatgaacatggtctatgaggtagcaattttagagaagttgtcaaaattttcttcaaaggtgaattaatcagactttggtcttgcctaaagctcttttgtcctccttagccacacggactgcttctgcccataaaggagaatataaagatggcttcagcgtctggaactttccaacggatgaccactgcaacaaatcaaagttcagaattaacccttttcaaagtgtatgtgcaggagtacagaaacttagctattaaaaaatagtgattctgcctcactctgtttcaggccatgccctgcatatgcttccttttaatctgtggaaactaggaacccatgaaccgctgtggcattagataatttctctgattcagagagcttccctggtggctcagttggtaaagaatccacctgcaatgcaggagacctgggttcaatccctgggttgggaagatcccctagaaaagggaacggctacccactccagtattctggcctggaatacttgacttttaccgcaatacatgaaccgtgaacttccacatgttcaaactggttttagaaaaggcagaggaaccagacatcaaactgccaacatctgctggatcatcaaaaaagcaagagagttctagaaaaacatctacttcctctttattaactatgccaaagcctttgactgtggtggatcacaataaacagtggaacattctgaaagagatgggaataccagaccacttgacttccctcttga

SEQ ID NO: 62579 - DNA, 964 bp, Bovine  19866880392134
  misc_feature (1)..(1): n is a, c, g, or t
natgataggctttttcttttttatttgttctttataatgaaagtaaatttcaccaatggtcttcatttcctgaagagctacagcggttattttactatgttaagcactgtggtctgtgagttaaaaaaaaaaaaacaaaacacgacatgtggaaacgtcaacctctgttaacaatcgaagtactgttagcagcaaagagacaagcttcaacaagacaagctaggtatggcatttatcttcctttcggaggaaaataaacaatttggattgattaaagaaagagattgaaaatgtattgaaagacaaatggaagaccaaataaaaatgtgataaacacttgtcctttgtttggaaagataaactttataatttccatcggaaaaaatgcggctcagaatctagcccctgcaagccacggtaggtgttaaggattgctgaaaagcaaattccaggggaaatctgctgtgcttcactcctgaaaatgcttgaaaaagagtaaaagccctgaggcctggctagcaggtgtgtgaccaccttctcatcacaagagagacaagagaagaaagagtctctttcaaatttgtttgcaaaatgatatttctatcctaccaccttaaatatgcatggttgatgatgacttcaaagtggggtctctacagccaaagacgatactgattgattgagtcgttcgcaatttagcggctgataaattgccttcacgtgcattgtgatgtctgcagcccaatgtaagatttttcggcatgggtacaatattttaaaaagactaattcagggaaaactgcagcctaaaaaatgcctttttttttttttaactaaagttccaatgacagattgatgatgcatgtagggcaagcttccgattctagcaagagagcacaggctcccctgcagtcactctgagtcagtcactcgggcaagcattgtacacacatcattccaagca

SEQ ID NO: 62580 - DNA, 1370 bp, Bovine  19866880404050
  misc_feature (1)..(1): n is a, c, g, or t
natttccagtttttaaggaatctccacactgttctccatagtggctgaactagtttgcattcccaccaacagtgtaagagggttcccttttctccacatcctctccagcatttattgcttgtagacttttggatagcagccattctgactggcgtgaaatgctacctcactgtggttttgatttgcatttctctgataatgagtgatgttgagcatcttttcatgtgtttgttagccatctgtatgtcttctttggagaaatgtctgtttagttctttggcccactttttgattgggtccttttattttctggaattgactgatgcaggatcaatccctagtcaggggaactaagattccgcaagtcaagcagtgatgtgggaaaggggagggaagactgagtcattcaacgttgtattttcccaggggcagattttactctttttctttgttttttttctttgagggtgctggtggtgctggtgaggggaggctgttaataatgtgtgtgattatgatgcgattataatgtgttataatgtgtgcaattataatgtgtccaaggacccttaatccagatgcccgcagtgtgaggatgccacatcctacagatgagaggcttgtgagggactcggagacttattttgtaaattgttccatgtagaaatttgcctgtcctggcatcatgccctggatggaagccagagagagggtttcaaaaaagagattaaggtgttagttttagaggcaggaagaagacagtgggcaatgcatttgcctgattataccacatacctgatttccacccagcttgtgaatacctcagaagaggtaaaatgtcaatagctgttccagtaacatggacgaattttgagtgattcctctcctgtgtttttcaagttttatgtaatgttattgtttttaaaataaatatttttgcattttttcctgtaaaacttatgcaggcactgttagcataaaatactcagtataatgttatatatagaaacagatgagtatcctttgaggttaactagtaatactgatagtaaacagtattgccattcattgttagaagttattttaacaatgttgctgttcagttgctcagtcatgtttgactcttttgtgacctcagggactatagcctgccaggctcctcggtccatgggattttccaggcaagaatactggagctagtggccatttcctcctccagaggatcttcatgaaccagggatcgaactcaagtctcctgctttagcaggctaattctttaccactgagctgccagggacgccctattttaacaagacagacctttaaaatgtatccatatccatacatgtagcttatacaataaatctaaa

SEQ ID NO: 62581 - DNA, 1598 bp, Bovine  19866880405758
  misc_feature (1)..(1): n is a, c, g, or t
nttttttggttttgttctgttttgtttgttaatcttactcaattcctggtaagtttctcttaaacaccactttgttcattccttcctctaataagtaaataacttcttgtgaagaattgtgaaggaaattcaatcataataagagttcactgactgaaatcaattgcctttaatgtactaaaatgctattaaataacccctcttcttttaactacctaatatggaaagaattaagctaacttcaaaaccaattttattatgccagacatggtcttcctctaaaattaaaaccttagtgtggtgactctccacagcaataagaaagaacagagacctattttatgttttgaaataaacataattcatagatgcatgagttggtgtatactataacagactattgaggacaaacagttaaatctattattattcaaaactacatggcactctgctggctgttttgccatatattacatgctaaagcaatcctaaaaaaacagataaaaattgcacaacctataggatgttattatatcaaacttgaaaatcccatcttcataacaccagtatcttacctccaaagaaattattgtccttggaaaacaaaattaaataaaaaattcctagagtctattatacggtgtcatgaagtgtagaaatacaatatagggtaaaaattactaagcaattgattcttaaaactgttttttcattctgaagtccagcatttccctagcaggaagtaataggacatcattttcaaacatgtgacttcctttattacacacttgagatttcagactttaaatggaattatatgcttgcttctggtgaatcatgttcctgcatttaacgggctgctagcatttgaaatcagaaaggaattttcccttagaacactttcaaaaagacatggatagtttcccgccccctgctcttgggaacagggagtggagattaacattagtgaggaatagaataaaattaatgtgaaaggatggacgttttgatttgtcctttcatctccagctttgtatttcaccctaagacttggcatatggaatatcatttcatcttgaagctcctcagtggttgaatgacttttgactgagttataccctcctcagtacaggaaaattgattgcgtcctgggctcatagaaactggtagttatgccaggagacttgtaatgcttgctgggctgtgtaaaaactgtgaaatgtggcaacaggaaagacagtaaaaggaactggacatttctttatggcttgcaacttctatcctagtccaaattgaattgcgaagtatttttgaacattaaattccttgggggaaaaaaactatcatagtaaaaataagacttagggtctttaaaagattatccagaaaataattttgtgaaaaagaaaaattaataatctgacttgaaatcattatgatactaaagcgtgagcaaatacacaagaaaagttcctattgatcagaaactcccagaatcttctactgcttttctgttctcagaagtactagcagaaaaaacaactttgcccataaatttgtttgcaagtgtataaaaatctggcaagatacaattttca

SEQ ID NO: 62582 - DNA, 2767 bp, Bovine  19866880538306
  misc_feature (1)..(1): n is a, c, g, or t
ncagtccctgcagggctgcatgaagcaggttattgcgcccacctccagagtttcggactgagttgggtcgcacagagtcagacacgactgaagcgacttgcagcagcagcagcagcaggccttgggtggggcagtctttgcatttctagcaagttcccaggtaatgctggtgaggctggtctgagacagcactttgagaatcacagctctatactgacacctttgtttacatggaatcgaggcaaatagtgtagagtaatagctgccaggaaaccacgcctaggattgccaacagctggtttgagagagataattaataggcctgcttgtatcagttagggtctcaactggaaacagatggcatgcttcagataggataagtcctgacagccaagaagtgaaaaccttgttaggccctagggttttgcaatgaagacctaagcatccatgtacaagattgaactcggcccaccttcacacacagtcatttagaacagctgacacaacgcagggttgtgaggttacctccatatgcacgctagccacaaggcccaaggaggtatcctagctgtacgctctgacacgtttatttcttttctctcagagtatctggaggcattgccctcttcagctctctgtcgtccttacccaaagcatgactcaggacttcaccctgagaaagtaaagtatctgggaaagctttactgatgtatacaaattttatctgagtagtcttatctcctttcctctgatcaatggcccatttttcttctacctgctgtaacaactattctcacttcaaacatatatgcagggggttattttatctctttaaatttctatatgtgaagttgtgggcttccctggtggctcagatggtaaagaatctgcctgcaatgtgggagacatgggtttgatccctgggtagggaagatccccctaagaagggaatggcaacccactccagattcttgcctggagaatcccatggatagagggctacagaccatggggtcgcaaagagtcagacacgactgagtgactaacatgggaggttacagccattcttccgtctcttctggtacctgtcgaaaggacactcagcagacacactggcaactttagattatagatgatctctgtgtagcccttgttattatagcattcttctttactttttgttttgatactaaatatttttaataataattttgttaaaaaaacttatgtaaccttcttagttaatatgcgcaaaatggatacaattagggatccattccacatctcaggaccagagtattcctggaccagcatatacctcctttcccatcaccggtctcctctgcccccaagtaaacaccatcttttaaaaaaaaaaaatgcatatgctatatcttatgtagacttccataagcagcatactgtttaattttgttggactctgagcaaattttgcagcttctattccttattccatattatatttctaaaaattgtttatattgttacatgtagaagttgtatattcattttccctgtgtaaatttataatgtgaagatgcttcaaattattcatttccctgttgctagacatttgtgtcttttctagtttttgtttttatgaacaaagtggcagtgagttttcttgtagatgtctcctacacgtttcagggtccctcttgagtgtactgaacctagtcatagcattgctggattatagaatacatacagattcattttcacagggcattatgcacttgttttccaaagtaactgcaccaatttacaaccctaccagtatggcataagagttctcattaagccacatctttaccacctctgatatgatcggtcaccttaatttttgccagtatagtttgtgtacagggtattacatgaggttttaacttctgtttgactaatcactagtgaaagtatctcttcttatgtatcatatcaggttcttagggctgctgtaacaaatttccatacactgggtgacttgaaacaacagaaatgtttttccctcccagttctgggagccagaagaccaacatcaaagcacaggcagagttgcgctccttctgaaagctctcaggaagaatccttctcgcatcttcctgtttctggtagtgtcaggcctcttccttggcttgtggctgaataactccaatcaaatctctttctttgccttcatgtggccttttagatccatgtgtctctcacctgaatgactctcataaagatgctcgtcgttggatttaggacctacctggataatttgttgtttagttgctaagtcgtgtctgactctttgcgaccccatggaactatagcctgccaggcccctccgtccatgggattttccaggcaagaatactgggagcgggttgccatttctttttttcgaagatcttcctgacttagggatcaaacctgtgtctcctgcgttatcaagaggattgtttaccactgagcggcctgaataatttaggatgatcttatcatgagattcttagttatttctgcaaaaacctttttttccaaaaatgtcagattcacaggttttaagaattaggacatggacatttaaggatcagggcatgtagttgaggcacaatttaactcacgacaaaaataattaccattcacactttgtaaaacacaggttcatgtttttttctcccgattatctattgaatctttattattttcctattaagcctttttcttattgatttgtaaaacttctttaaagatatccatt

SEQ ID NO: 62583 - DNA, 1468 bp, Bovine  19866880638117
  misc_feature (1)..(1): n is a, c, g, or t
naatttataatttagtgaaatacatcaagagctctggtaaagatacacattattgcctctttctttttaatttctaattcctgcatactttctaataataacagagcatttgacatgaaacaactttttaatttgtttatttttgtctatgttagatcttctggagaaggcagtggcaccccactccagtactcttgcctggagaatcccagggacggggggagcctggtgggctcccatctatggggtcacacagagtcggaatcgactgaagcgacttagcagcagcagcaggttggatcttcactgatgtgcgggccttactctgcctgtggcgagcgggggctcctccctagttgcagtgcactggcttctcactgtggtggcttctcgttgtgcaaaatgaactccagggcgtgagcgcttcagtagttgtgggcacatgggctcagtggttgcaactcccgggtctcgagcacagccttaatagtggcagcacgtgggctgagttgctccagggcacgtgggatcttcccggatcagggatcgaacccacgactcctgcactggcagctggattctttaccactgaaccacaggggaagcctgagacaagagctttttagtaaaggttacacataatattaacagtggggtaccagacagattgtaaatgctgttgttgtatgcgttaattgcaaaatatggaccttaatcctgaagaaatatgtgttaataatgtatattgaatatactgattaaaattgtctgattaatccaacagtaagtgctctggaggcattttattgagcttttaaagaattattatctactagaatctttttaatttctcaaatgctcctaatatattatttaccacttgctaatttttaaaatcatgagactaatgtcatttggatgctgaaaaatatatacctaaagtgataaaataataaatctttcttcttccaatagtctaccttacctttctaaccctactttgtagttagctgttatacacaaataaatccctgaagacattgtaatactacaaggcttggtttcagagtgtacattcatacagaatttcctttgcttagcacttagagttggaattatgagcataatatatacatattaaaacctagttcaggaaaggagagtaggtcagccctctatggtagaagataaatagaattcaagtgctcaaagctagagcattcaagaaaatagacacttatttgttatggggcaagaagaattagacctcagcaggacatgaacctagaatttccagatgtacaagctgaattcagaaaaagcacaggaaacagagatcaaattgccaacatccactggaccataaagaaagcaaggaaatttcagaaaatgtctacttctgcttcacagagtatgctaaagcctttggatgggggggggatcacaacaaactgggaaaattcttaaa

SEQ ID NO: 62584 - DNA, 1135 bp, Bovine  19866880673462
  misc_feature (1)..(1): n is a, c, g, or t
natgcaaagagccaactcattgggaaaaaacccccttgatgctgggaaagattgagggcaaaagaagaagggggtggcagaggatgaaatggttgcatagtatcactgactccaatgaacatgagtttgagcaaactctgggagatagtaaaggatagggaagcctggcatgctgcggtttatggggtcacaaagagtgagacctgacctagtgactgaacaacagcaaggagaattaagaacataaaatattcacagaacttggctttcactaaacaacaagcattttatagaatacaataatgcatgttatcagtttcatgtgtaaaattaagagattttagatagaacgagcccacaggaattaaacatcacacacagacttttgaagaccaagatgactctactcacagagcatatgcaacagggggtttgcagttgctgtgtatgagatgctgtgcggctgtgtttcagtgtcaataacactgggtgatgcatagtacaatatatctactgaatattgacatatctttgttctttgtcactttccatttttcattcctttcattccccccaaggaaataatctagaaccggggactctcaaagataattgtatatctcagcttggcatgaggaatacagagaaggaagtgaagcataagaatggacattagagcaagtaggatcctagtgtaaactataggaaagcgggatcatactctttttaaaattttttatgtatttttggctgtgctcggtcttcattgctgcgcatgggcttcctctagttgcggcaagcagcggcttctctctagttgcgatgtgcgggcttctcaccgtggtggcttctcccgttgcagagcatgttctctaggctgtgcacaggcttaagtagctgcggctgtgggcttagttgctccgcagtatctggaatcttcccagaccaggtactgaccctgtgtcccctgcattggcaggcgaattcttaaccactggaccaccagggaagttcgaatcatagtctttatagacatgtttcagggaaattctgaggttctgtttttaggagctcttgtggtatttctcaggtctgaccaaacttgggtcctcggaccaagaggcaactcttccga

SEQ ID NO: 62585 - DNA, 1510 bp, Bovine  19866880697606
  misc_feature (1)..(1): n is a, c, g, or t
ntgagatggctggacatgagtttgagtaaactctgggagttggcaatggacagggaggcctggcgtgctgcagtccatggggtcacaacgaagtcggacacgactgagcgactgaactgactgactgactgactgagacagcatattaaaaagcagagacattattttgctgacaaaagtctgtctagtcaaggctctggtttttccagtagccatgtatggatgtgagagttggactatgaagaaagcttgatggacaggagtttgagcaagccccgggagttagtgatggatggggaagcctggcgtgctgcagtatatggtgtcgtaaagagtcagacacgactgagcaactgaactgattgactgaaataatcatctttattaatttaaactgtttctgttctgaagatggtacatactacaaaaatgattaaggcttgtgattgtaattatatattcctttatgactgatgtctcatagtggaatttaaatttccctttgccactttaaagtaaggtgattgaggggcttccctggtggtccagtggttaaaactccacactccgttggggaactaagatcccacatgccacagagaataaaagcaaaacaaaacaagatgatcgcacatcttgtgcaatacttccgggggcaggtagtgtaagctgaacccagttaggatatatcccacatttccggaacttggcacaaaagtttagatcacatctatctaaaaacctgacaattaccagaccatctcctggtacccgcttaatttattcctaaaaatttaccctacttgttattgctacattatatgtaggttaagactttggtcaaatattttggtcttttcctacattttacaattctcctttacattcagtctttggtgttccaaaagacccttactaaaataagtactcactcatcagcaacataaatattagacccaactaaaatctcccttttcccccaaatttttaccaacatgctcttctgagagatttacaaaagttgcaagcaaaaataacaaaactattgttcatccttatagagaatctagctttttttgttctgtacaaaataatttttaaacgaagattttcaagcacaagagtaaagtaaaacagtgaaaaaaaattctgaaaattattttttaaaaaagaaaaggctgcttaaagattttgtgtgtgcatgatcagttgtgtctgactctttgtaacactacggactgtagcctgccagactcctctgtccatggaattttccaggcaagaatactggagtgggttgcaatttcgtcctccaggggaccttcccaacccagggatcaaaatcccatctcctgtgtctcctgcattggcagacagattctttaccactgacatacttgggaagcgcttatgctcagataactctcaaatgtaacattcagtcatttaaatttgatatgcatctattatggtccagaaggtgtttgcttattcacagtgaaatatttga

SEQ ID NO: 62586 - DNA, 851 bp, Bovine  19866880748307
  misc_feature (1)..(1): n is a, c, g, or t
nttaatcatttccgagagtccctcaaaacccccctttgaaatgtattcattgcttgcaaattctcccagaatcttatatgaaagggaagacttcaatttaaattcaacaaacttcaatagagttagtctgcattttaaacatttgggaactgatgaagaagcctgtatgtaatctgccccactttgcaggttttgaagatttcaataatattccctgaatttttttcaggtcaatttaatttctaggtgagtgtttctcaactcagaggcgatttcacccagagggacgtccagtcggacatattttaggtgaccaccacttctggagagagggtgctcctaccatccaaaggggagagaccagggatgctgctaaacaccctacaacacacgggacagcctcaccacaaagcattttttgatccaaaaatgtcaataatgctaacactgaaaatcctaagatagttttacttgctttctttagactttttacagctacattatctacaacagctacacgtataacagtacaactccacgatattccgtggttttgcatcactgaccgaaacctatccgaggaagccagtttactacggttacacagtttactatctttttgggtagatcatggcagtgtgagggtcctcagattcgatccatccacaaacccttcgtccctttcctgttttctaaacaaagaatccagaatcatttatttgagtcatagaattgaacttattttccccaaacgaattcttacactgacgcaaaacaaggctgacttgccacttaactgctttctcaaactcttgctttcctctcaggtttgccatcaagtctggcccatt

SEQ ID NO: 62587 - DNA, 1798 bp, Bovine  19866880802956
  misc_feature (1)..(1): n is a, c, g, or t
naagtctcctagggaggcttacaaaaacaactcgtttaagagaaaattggttgacacgtgtctttgccttttgcactttgccttgctctttctttttttctgcttgtacttatggatgatgtcgggatacgaggtgaaacgcaacattttaggaccatgaggacaaaactcacattatgatggtgggacaggaaaataaatggaacttgagtagtttctggtttctctggactctgatatatcagggtggaaaacctcttatatttttaagcttactatcttgttccttactatctaccttgaataatgccagacacaatgtagaaacaataactatggaatgaatagagataaagaagaaaaatcaaatgtagcagtttctgagggtcgtggatatgagctcctcctagactctatctcttcattccttttaaaggcttaaagtgttcaagattctatggaataaacacttggatatgaatatctaactctcactgatcattcatctgatttgaaattcaaaaagcttggttaaaatgcaggcattttatgggtagggaaggaggtcattaatatcaatgctcaaattagtttatcaagtcatctatttatggtgctctcttatgcctggggacactacgaccaagaccctacatacatgttcccaaggaaaaggaagcaaattggagataatgagaaaaggggtttcaaaataaagtctgaaatatttatgaagtgctcctgtaccaatatctgtgttggccaaaaatagagacagtttctaatttcacacaggacagctctccaaggatcaccgggtataatctgttattgcctttacgtttgaagcattggctctactgacacagccaccaaagaagtgatatcatttttactaatggttcagttcggttcagttgctcagtcatgtcccattctttgcaaccccatggactgcagcacgccaggcctccctgtccatcaccaactcccggagtttactcaaactcatgtccattgagtcagtgatgccatctaactatttcatcctttgctgtccccttctcctcccaccttcaatctttcccagcatcagggtcttttccattgagtcagtgctttgcatcaggtggccgaagtattggggtttcagcttcagtatcagtccttccaatgaacattcaggactgatctcctttaggatggactggctggatctccttgcagcccaagggactctcaagagtcttctccaatctacagttcaaaagcatcaattctttggtgctcagccttcaactctcatatccatacatgactactgaaaaaaccatagctttgactagagggacctttgttgacaaagtaatgtctctgctttttaatatgctgtctaggttggtcatagactgagatccagataaaaacagttacagggattctcgggtggtccagcggtcagtacactggtctaccactgcaggggacccagggacaatccctggtcagggaactaagatgactcatgctgtgcagtgtgtccccctctcccccccaaaaatggctacaggatatacagtatagtgatttagagttgtagttgtggtaggaattgttgatgggaataaaaatactttttcttccaattgccaatctagggtaccatccatggaaataatgacagattgccatatagcacataatttatacctgcttaatatgcaaaatggagaaggaaatggcaacccactccagtgttcttgcctggagaatcccagggaatggggagcctggtggg

SEQ ID NO: 62588 - DNA, 915 bp, Bovine  19866880848067
  misc_feature (1)..(1): n is a, c, g, or t
nttgcaaagtagactggaaagaaaacatcatatactacttacctctgtggtaaatatttaaatcatcaaagcaatgaaaacattatgaatgaatgaaaccaaaaaagtaagctgtaacaatatgggaggataacaagagaattagaggcttagaggtttgataggttacatcatcatctgcaattcctaaaattcgtgactcaagaaataatatatacacttaaaaatttcaaaggaaaaatgagaaaaacagcttaaagagttacaagtggtttcagcaaaatgtgagtttgatgcttttggttgtacatattttagctctctttgatgtttaaactatatgtattagataacatgtcatttaataaaagggaaaatgcgtctttgcaaagttataggaacgcctgattctttgtaattcttatcacagtggctggcacgtggtcagtattgaacaagtagctgtgggacagagggatggattctgactataaatacacatggaagatgacttctgggtttcactttaaatcctatagaagtaggatgtgttctttgacaagagaaaggtaaaatgcttcacagaaagctttgtttgtgatataaatcataggtgaaaactatacatgcactgaaattatggccaagtaatagcaataaaataatgtataagaaaaaaatttttaaatgttagaaaatgtttattatgagtgcttaaaaaaaaaagtgctgggcctctatacctatagttttgagcggtatcacgtggccatatactgccacctagtggcaacatctgtaagtacagtctggttttgatagctgggagagacttttcacatttaagccaaaaaagctatccctctatgtccatccacccttctttctcaattcattaaccgaatcctgaacagg

SEQ ID NO: 62589 - DNA, 1412 bp, Bovine  19866880916513
  misc_feature (1)..(1): n is a, c, g, or t
nctagaattttttaaaagtaagcaaacagaaactggttaatttacagagaaaaggaaaatactggaaggatactgggtagtgcatagaatgagtcaaatttggaaactggtggtctaggcagggaccaaagaagaggaggaggaggtgagagctggccttaggaatcgcacctcctccacacacactggcactgaacgtactgtccttggaccccagcaactctgtcaggacccttgatggcacctggcaacgtgaatctaatgagtggatatgcagtgtgcactgtatcctctcacgtagtaagggggattaagtcttcgatgttagaggtgaattagcttgtccgcagtctctcgggacatgttaaggcccctgggccttgactgcttctccatctgcgacagttttgggagcagtctgactgtcttgcaaaatgcatggtgacccttcaggagccactgttggttctggaggttctgaagtgaagtgggccgtgtaacctgtgttctacccttggtccttcccgagtctgaccttgggcaagttcaagcgaagtgagagtggctctttacctgaggatgtttcatgtcgatgagctcggggagatgctactcagcaattcagaagaaagcgcttctttctgagagtgagagatttttctctcaggaccaatttgatcctgtgctgtaaaatcctttattcattatcaagtagcactgattaaatgtgcaaatgtgcagagtgctgtcctaggaactgtaggaccttaaaatcaaaaacaggaatttattacctaagaggtgtcatttagcaccctggatctgatgggacatcagctgtccagtcactccagaatgctttaggctcctgagcgcactgttttggttctggaaagcttttggagtttgctgctccgtgctgttgaaactccacagtccaaggataatattgagtgtacagagaaaatgtaaattaaatgtacactatgattttacttattttatttccatgaactctacataatgcaaaggatgtttactccatcagtttttgaaccactactttttttggagcaattcacactaggtatttccatggagcctcagtaagtataaaacaatctctgtaggctctgtccagtgttgctctttgtgagctgcaggtattataaaccccatagcaattctgacctaagtggttgcactatgtactatatccacagcaacaatatgctctaaatattctggtgtgatgctggcttttctgaaccattttcttatattattggttccataaaccttaatgttgaaattatcctggaaattccaacttttttgacattcaagttttatctgcaacacttattttcatccttagaaatggcataaaaattcttcatgaaatgatctgt

SEQ ID NO: 62590 - DNA, 2073 bp, Bovine  19866880969687
  misc_feature (1)..(1): n is a, c, g, or t
ncttttacctttacctcttgctgtagaaggtcatgcatctcacagtatgtatctctctgttacaatttgcttccagctgagcagaaaggctgagccaagttcaatgtgtctaacacacctctcatgggcacgggaggctgcagatgctggcagagtcagagaagcactggaaccctctttattggcatgttgcagctaattgatgctccgtggattccttgctccatgtccgatacagccctttatgatccttccaatttcgttgagctgctgaagctcactgtctctgctggagctcagagacacacaggtcagtggtcaaggagaaagtcttaaagagctctgagtcaatttgcttcttttgtggccactgtggcaatgttacaatgaaaagaaagaaaggacagttgtattcatcaacaaattctaaacatggactaagtaaaatatgtcaaagccaaagagcacgtgatttcactatatgtggaaatctaaacaaaacaaaacaaatgaacaaagtaaccaaacggaaacagtgtcagagaacaaacaagtgttgccagagggggacagggggttggagagaaggtaaagaagtgggcggaggtagggatggggaaatggaggaaggccatcaaaagggacaaacttccagttataagacaaataagctctagggatgtaatgtacaacatgatgaatatactcgatctttaataaagataaatataaatcatttcaaatctttaaatgtattatttaacaacactgctgtatgttatgttattgtccagttgctaagtcgtgtccaactctgcgatcccatgaactgcagctcaccaggcttccctatccttcactgtctcctggaatttgctcaaactcatgtccattgaataactttcatatgttacatgtatgctgtaggttatatataaaagttaaaggagtaaaccctaagagttctcatcacgagggaattttgttttcctttttcctctcttttgtatctatatgagatgagggatgttcaccaaactcactgtggtcatcgttcaagatgtagataagtcatatcattatgctgtattccttaaacttatacagtgatgtatggctattaaatctcaataaaactgtaagaaaaaaaatgtttgtaataaaataaaaaataaattccaaacatacaaagtagtttcagagatacgaagagaactacctcagccctgggcctactctttactaagactgttaaccaggaccaaaggctaaaacctctgtgagacgtaactttctcttatataaaatggaaactgacaagaattccccagcaaggcaatatatagtaattacataaatggagggacatattaaagtattggaattttactgaagcatcagaatatccttgggctttttaaaaagtggtcacattagggaatttaaaacttttatttaaatacgacagctttgacataacctgaacagtttcaaaataatgttataagaagccacatgtgccacaaatataaagttcagggtaggttgtatatatatatagcatttctttccttcttggactatttcttttctctgttgcttttttactttcttgatcatttatttattcttttgatgacatacatggaccaagtttatttttctttgtttagcttaaaacatacaaaaccaatgtgccacacgtatgcatttttctatcagtcaggtgtatatttttaaaaaagtcttaattttttgattcccgcttttaccagaaaactcagtaacagaattatagccccaggggtagatattcacgttgatatatttgtagagctccgattagtgatctgaagtatataaactatgttttaaaaggttttcctatcctccactcaccccttcatgacctttgctcaaccagggtgcaccagctgactgccctgagggctgggcagtcacgctacataaagacagcattttttgaaaagggtaaagcaaggtgttgaactcagcctcagtgcaacctgcaaccttcctccaagactgcaggactcgagaggctcataaagt

SEQ ID NO: 62591 - DNA, 2209 bp, Bovine  19866880990022
  misc_feature (1)..(1): n is a, c, g, or t
ntcctggtgagaatttagagagatgagcgttaaatgcaagtttgaggtcagtcactttttctgaaaggcaggccggttggtatcgagtccccagccttttcaatatttcttttaattaccttggaagtaaacacacttcccttttgagttgtgtttcttcaattaataagataacacagtagtgtttacaggacattagctgctcctctgcgatagcaagccaagtgcagaagctacatctgtaattggttttctgatacagcctttgcaaacacacgtaagagtggagttcatggaagggataaatggatttagttaccttcacaccctgccttcaaagagtggtttaattatgtctccttacagcagcttcccttccgccaacccattagagctttctgatttatgacacagtagttgcagcattcccagtaaagacaggagttgctcttgtcagatactatagctccacggtgatactgctctgagaaaataaatgaggttctaatagtcccggattattaccaaaggcagggtcaaggagtaacttttactttttttttaattaaccacacacaccaataaaattctaaattactaatttgtatgatttgtgcttatacatatatacgtatatttataaatgagtcaaagagacatctaaagaatgcttcctagtaatatcacttttctatagcatttaaaccacttgaaaactctacaatttgttatacttaggcatacatgttacttatgtaggtcaaaataatacctgaagggcccaagggacatttgtttttactaacactgcacacttttctcttaatcagtgtcaagatgtttcttccttgttcttacaaaggaaaatccattttcaatgcaatctgttactattttctgactagactgtgtactggaaccttctcataagtggattgctaccaataaataataatcacatgctacaggccctttgactttaatgatttcaactgttttgaaatgtgtctcacattttgtatcttataggtattactacaacttgaggtaaatagcagtaacagtgcatatgagagaccttgttgaatgaagcaaagtctgtttccaatgagctcatggtccagaaagtgaaaccaacaagagagcaggtcatggcatcacaatatcatcacagaggcatagttaccatagtacatccaaagcaagtatgagtgtttctatgaataacatttaaaccaatgctttcatgtacctctcaccttattgtgaactccctaagcttagtcactggtcacagataatactggtaaaagagttttaaatctccaaaaattcactatgaatggataaagaatatgtggtatctatatccaatgggatattactcagccattgaaaaggatgaaataatgacattgcagcaacatgcacggactgacacattgtcatactgagtgaagtgagtcagagaaggagaaatattgtatgacatcccttacatgtagaatctaaaaagaaatgatgcaaatgaacttacttacaaaacagagagagactcacagactcaaataatgaacttatgattgccagtggggaagggatagttagggagtttgggatggacatgtacacacacatccgttatttaaaatggataaccaacaaggacctactatctggcatagggaactcagctcagcgttagatggcagcctggatgggaggggagtttggagtggaatgctgtgctgtgctgtgcttagtcactaagtcatgtccgacttctctgtgatcccatggactgtagcccgccaggctcctctgtccatgggattttccaggcgaaaatactgaagtgggttgccgtttccttctccaggggatcttctccaacccagggatggaacccttgtctcctgcattggcaggcagattctttactgtctgagccaccagggaagccccttaatgcttttgaaaacagcttgaatgaagatcattggctgtatttttaaaacatgacaaaatttagaagattatgacttttacccatgatagcggacagaggtggcagtttttaaaaaaaaaaaatacatgtgtagctgacccttggaaaatcccatggacagaggagcatggtaggctgcagtccatggggttgctaagagtcggatatgactgagcgtcttcactttcacttttcacttta

SEQ ID NO: 62592 - DNA, 1550 bp, Bovine  19866881008931
  misc_feature (1)..(1): n is a, c, g, or t
ncagggcataccgtgtaatactacagatatgcccaccatggtaatcttaaacattgttaaagatgaactgtgatgctctctcagattcctggtggtccaaacgaaaaggttaaacagaacaagttacagtttttactatttataaggaggaagctcaccaggacatcaaatgtcaaagtcacttttcatcacagttcaaatggaaacaaaccagagaagggatcagaaatggctcagagagggacagttagccagcacaggaccttaatgacacccttcttttactgttatttcagaaagaaatcctcaaaagttatttttctcagtctttaaaaacataactatattcccaagaattctaatagatttactttaaaaaatactcagaaacgtttaaagtttcctaacaaccacattctgtatatactgtcaactagactctgacattttggttacattaaagattcacccacaataaaaatatactggggataacagatttataaccatgtgctttctatttgttagtattagtgggctgaacaagtgcagaacagataaggaaaatatacatttgtcagggggagaattccttccacactacctgtcacaatctgaaatgggaatgtagctcatttctctctcagtttagtaagttcgtcttcttagaatctattctctgagttaattttaaggaactagggtctgattaagtattgaaggagctcaaaacagaaccatgactaaaataatgaaaaaatatatcctcagaggggaaaaaaaaaaacacctgaaaattgaaaataacaataataaagtactatgtattactgagaaaatgtagactcatgactgtttaataattaaatgatctaagtgaaggaagagtacccagaggacatgcccgggcaaagggcttttccttttacaattcaaacagaaagagccatcatgagatcctataaagcagctctggtttcatttggaccaagatgtagtgactgctaaaattatattgctcttcacaatgagatgcaaaataaaggaaggaaggcatgatttgtgggtctttgaaaacaaatttcaaatagatgttcattggaaggttttaaaaccttacaaaaagatttaaatacttttgagatatattagaaagctgatggtaaaattaatccagatttatgttgatatagttcatctcatcaagcagtcatagggattatttacattttgaatagaaaataataggatagacaaaacaatatatccctttttattgttctatataactctccttcataaaactcaatttgttgagatctcaatcaatccagcaattgcttttttgtcatgggctcccatcttggatcactggggatttcagactgtgagcaatgaacaggaaacaagatgagctgtgttacataagccactgagttttgtgtgtgtgtgtgtgtgtcccaaatgaattcaggtaaacttacataatttagatcacacaaattggtcttaatccatttttagaaggctaatcggcttgggtttattgg

SEQ ID NO: 62593 - DNA, 790 bp, Bovine  19866881047732
  misc_feature (1)..(1): n is a, c, g, or t
naatacgaaggactgaagagggaactcgtgactcgatcaaggtcatcctaacttacccaagggggcccaaggccttctggaaaaccacactcccacccccatctcgagtgagcaaggctggcaggcccctcactgggccggcgggtaaaaggaggcttatggagaactatgtggaaccaattccaaccccctggttggagtccttatggctggaaaggcattcagggtcagccgtggtttcctgaggctagggtgcagaatgacacacgtctggaaacgcaatgtagtgaggccactgctcagtgggagagaaactgacccctccagccgctcccaggatgaaccctaaacccagctccactcgagcttcacttacaccggctgcagtgtgtgaccaaactgcacacgaagaagaaaagcagaaacgctgggaggcctcgccccagtgcacacacgtggacggatcacttaggggaggctctggtgtgaggcttacctcccgtcggggaggggtggcagacgcccccgttctggcaggggctgctcgagcagtcctccgtcgccgtcagcaagcacccgggagacacatccaccgactcctcaatgtgtgcgtagctcctgggtctgttgtttaagggcagctcctgcccgttcaggtaaatggagtccatgcagccccggaaaccattgcccaccttgggggctccgtccgtgccgcgagccctgctggcggacgtggcccccaaaatacacatggctgtcgaggttgagggttttagtgtccccgggg

SEQ ID NO: 62594 - DNA, 1468 bp, Bovine  19866881064602
  misc_feature (1)..(1): n is a, c, g, or t
nagagaggacaggagctctgtgcctttttcccacttgctctatgtatgtctttagtttggctgttcctgagttatttattatctatcatctggtaggtaagatgattctctgggttccatgagcccctctaacaaattaattgaagccaatgaggaggttgttggaacttcccatctgtagcccatcgatcagaagtgcaggtgacgacttggatttgccatggacatctggagtgaagggcagccttgtaggactgagccctcgacctggagcttcaacaccattggctggtacagatggtgtcacaattgagttgaatttgtaggacacccggttggtgtcaaggaactgctaggtgtggggcaaagacccacacgtcggaattgggtgtgaagtcttaggcttctttctgggctctcattatcaaactgtgttctcaagaagattctcatctttggctgaaaataagctgaaagttaaggctgatttttgtctgggaggcaatatagaatagtaattaaaggctttagcttcagagtcaaaatgtccaggtatgaattttggacctgacaaaattctatgacattaaggaactaaaaccctccaaactttagtcctctcctcagaaaatggtcatgctaattgtctttacctcatgggatggctctgaagataaaatgagatgatgcaggcaaagaatttggcacagtgcaggctgtagagtgagcataaatatatattagaaattatgtataaggaccttatctaccactctttaattttcttcggaaaatctgagttctttatgttccactttgttaagaaagagacgatctgagtctgacaaactgaattaatgactttgaacagaaaaactcaaattgatttgaactaaaagtttccaacagttggaatatatttcagaatatagactttataaagacaaatggagatgttttagctacaggattctgagtcagcccacatttttcctcccaaacacacattattgtcctctaatattttaaaaaattccacagcccaagttgtcagcttgaagagataaagacctctctcttagtcttttgtgtattttttttttactaaaatggttctaaagttaactctcatcattatgaaagtagaattattaatggactcttgaggatacacataaggaaaaataagtccatgtacatatttctcatctggcctcaaagggcggtcatttggtcacagcttggagtcagccatcagctccaccatggaaagaaatgacctatttcacttcggtatttctcactgaagattaaaatatatgaaagtttaaaggtgtctggatagatctaggcaaaaaaatctgagtaaatatagagatgaactctatgaaactttataaaacgatgataaatgcatttcaaaggcaggcattttatttacaacttaataaattaaaattctataaac

SEQ ID NO: 62595 - DNA, 936 bp, Bovine  19866881086901
  misc_feature (1)..(1): n is a, c, g, or t
nacgatatttgtacagttacctaaaagtatattttgagaaaaactctgcagcacaaaaaccatgcttcctcttcagaaaatgtgttatctcatagtttacttttagagacccaggctgcagaactggtttaacatcattacgtggtcataagagacagtcttgctactactgtaaagatacagagcacaaagtcgagactatacccaagactactaagattctcccagcactgcggaactagaaagtggagagaccccatcactgagtatattcagaagcttggctatggcagctcttccggttgggtagacatatccaagagtaaaacacccccgcccagggcctggggttctttcaggggttctaaacactatatgcgtcttcctaagtgtctcctttactactgaagaatgatttgacttctggaagtaatttagttagtaaataagagatgatgatcaagataaagatggtctgtaatttggggttagacgccatgacccaacatagcaatttccccgtagtttataatttttgcttccaatcttgaactggatagggtacaagtgtaagaaaacaaatgactgtttttccttccaacattctaaatacttgattttgatttgggtacatgtttgaatctttagtgtgttagcaaagatattatctgaaatcatttttctctctatgcctactcatcagatgggcaccaaaaatcttcatatttttaatattgttttgtaagtttatcatatgtatacatataaatgcatacacatgaattacttatatttatttatcagtcatatcagttgtaatacaacatttgaagcttaaaaactttatatttgggcaaatattacattaagtaaaagtatactttcaagtgaacagtgttttagtttttgcaaaagaaagttggaaaaagtcaagtg

SEQ ID NO: 62596 - DNA, 1515 bp, Bovine  19866881086915
  misc_feature (1)..(1): n is a, c, g, or t
nctaataaaaccaaggaatatacgtttatatctatttgttgtcttctgagggtaatagctttaccacatccataactctatctacaatataaattgatataatataaatgttgagtatgaagttattctcctttcctctgcaatcatcccctttgtccatttccacattccctgtcttctggtatatgacacgatgcctggcacaaaatagcttcttaacgaagagctgttgagtttgttgttgcttttagtcactcagtcgtgtccaactctttgtgacccatggactttaacccaccaggctcctctatccatggagttctccaggcaagaatactggagtgggtagccattcccttctccaggagatcttcccaacccagggatcgaacctcctgcactgtaggcagattctttaccatttgagccaccagggaaagtcaaatactctcaagccagaaaactagtaatattttgtatgtttttacagaattatatataaatattagctgtaatcattttcttcatgccaccatgaacaaatgcaagtttaggtgttaaaaaatgtcactgaagagaggaaggattccagggaaagttttgcactttatgtgttgaaggaggttaatattgtataactctgtggggtccatttacatcaagcaagtaaatgacaggcatatatatacatggaatcagtgattttttttttttaatatgggcatgaatagacttgattttcttataatcaaatatgaacaatagtgacaaacttgagtaccactgactctgggaaaatccaagtcttcctaatagataaatgtatggtatatatagttcattagtttggttcattagaacacagcaaaggccccaatcagaagctgaattcctgtggtgatcaaattatctccactttataccacggccaactcttaactctgaacaacaaatctgagttggtggtctcaagatgatctgaatgaaaacagtgtgcagttttaaacttgtcgaatcaatcacagctgtaatgattgtcattctgggctataaagacttttctgcaatcatcgttaatccaaaagaacaaaacaaaaaacattttataacctttaaataaggtactatggtagcatttttctttgttaccactgatctgaaaataatctatcagagcagagtgacatctttgttaaagtctaatttctaacccattaaatttgctgttagggtaagtaaaattgagtcagttttcatatgcaaaatgaaaatggcagctacattattgactagaaaacaaagaataatttagatgaataaactgaaccccaagccaatgtatacagaaaatttcaatccaagaaaagagttacaatataatgagtctttttctcttttgccttcatgtaacactggaaaaggtcagttttcattccaatcctaaagaaaggcaatgccaaagaatgctcaaactaccgcacaattgcactaatctcacacgctagtaaagtaagc

SEQ ID NO: 62597 - DNA, 2216 bp, Bovine  19866881125370
  misc_feature (1)..(1): n is a, c, g, or t
ntggaaatgcgacaggaattaaggcaaagcaagcaaactgctctcactgcagttgactatgaagagtcctttttgttcatttaaaactaaactgtaatggtttcacaggtgtcaataggatcaacaatttcattcaaagaccaaagttgggaaaatagcccagctatctagagagaaagtttaaggggtacagcctgaaccccgtgtcccagaagcttcaacctgctgagacagcagctggggcaggagagctcggggatgaagagggaaaagggatactgggttccagctagaaacaacctgaatatacctctgattttaattatctttgtaattaaaatactgtgtagacataagaattaaaatactaagatatcaaagtctaatgtaaagttttcaggatgttgtacgactttctatgcctagctaaattaaatgacagaaaaaaaaaaagaattggctgaggcatataatttttttagcctgatttaatctagtgatcccccaggcggtacagtggtaaagaatccacctgaaatgcgggagacatgggtttgacccctgggttgggcagatcccctagagaagggaacagctacccactccagtattcttgcctgggaaatctctggacagaggagcctgatgggctacagtccatgggattgcaaagagctggacaggacttagtgactaaacaacaacaatccagtgaagcctgcttcctactgaaaacgaggtaaatcaaacttaaaagtcatagttgacactaccacttataaattagaaattttaaccatattccctataaaatactgacatgtgacaatcacacaggcagttattttaaacattcaaatcatattcactaaaaatagttacgtgccatatgtcatataccaagaaggaaaaattaagaagctgtggctttggaccaaacatttatatttctctgtgtccttttgatgtacttttaaaaaccttacttttatattaataaggtacatacacagtgcttttattttaaacacagtgcttttattttatttttatgttggttattaccgtaaaaaaatgttgcaggcaaaatgatgcaatttaaaacaaactctccacttacagatcttactatcaattttaaattctgagatgtgcacaaaaagcagaaaaccagaaatgggctcccctcagtgtgacctagacaggacaatgagaactatcatgaacacttaccgatgatgtcaaaccagagaggtatgcctggaggctcaacagatatgactccaatcatgtgagcaactggatcactttccattacagtaaaggtaaaaaatgattcttcaaatgaaattggctccagggatggtttcggtttggaaatccattcaatgtggagtcgagtggttgacgacttttgggggcgaccattatcaacagccttaatctataaaatgtgggcagagaggggaaaaaaaaccgcatataaaaagctgcatcccataactgaagcatgcattggtttgggctgcagcccatggggtcgcttagggtcggacacgactgagcgacttcacttttacttttcactttcatgcattggggaaggaaatggccacccactccagtgttcttgcttggagaatcccagggacgggggagcctggtgggcagctgtctacggggtcgcacagagtcggacacgactgaactgacttagcagcagcagcaacactgaaccaatttcaaacacttaatatcccgtgctgtctattccatgtgtttaatgcctgataaaaagagcaaccttttcatgcctcgctgaacagaaataactggaataatgaagggaaaaacaaacccacacttcccactgttaggttaccacagggaggtcagtaaatggagagaaagttgtgagagaagagacttaaggctagattaatagtcaaagcacgggaagaaattcaaagactagatcttcactcactgaaagaatatcatattctccagctccagaaaacttcttggacaaaaccactcccgtttttggctcaataaaaaattttgccgtgctcattcccctcttcgatgctgtaggagatttcctgcgttgggacccttcgtctttggtctgtgggcgatcacacgatacaaaggcttctcgttttggcggtttcttttcccgttctggcttttcccgctctgggaggtctgat

SEQ ID NO: 62598 - DNA, 1353 bp, Bovine  19866881130892
  misc_feature (1)..(1): n is a, c, g, or t
nacctggcattacaattttgattactgggacatttttgtcaactatattgagtactgactaagatacaagtagattaatgaatgaaaaccacgtgactgacggtgaaattcagaattactacgagaacaaaatgttatgtgaatccctgcaggcaggtcacacttcaagccttctaacaaaaggggcaggtgaaggcttttctagatgtatagcactaggcacttgtatgtaacaagcaccaagtttttaaactgaacctgggggaaagtctaaggtgaaatggtccctggaactgaaaaccatttcattcaaagtcgacaagaggcatctttagtgcctcatattcttcatcaaaaatactgatcacctctcagactatgcaaggctcacaaaagatacctaaagagttgagaaatgttttagatgctacataaacaatgaaaaaaaagtcatctatcttatagataggtaacaaccccatgagcatctgtttttaaaaaaaacaatcttactgtttccagttacttcctgcaagtacccatatgttccttgtttataaataacatttttaaaatatagaagcattttatattcaaagcatatagtactccaagcattatatcatgttcacttgttcaatatttttttttaaagaatgaaaagataaattatacaaagagtcaccatgagctctgaattcaaattctaaagcaacacagtccaaattactgaagttttgtcgcatctgccaatcactgtgaccctacagagagctgcaaacacagatcttgaaagaagtcagttacctttctcccctaaaacctgagtcacactgacagacagcaccatccaaactgtcaaaacacgttccgccgtttttacaaggttcatctttgcagtaggggctgagctggcacctgaaggacaagggaaaagtaagcataaaaacccagtgttttttctgtacctacaggagcaagtgaatgtggacactgcacgcacacacgacgacaccggaagtgcgactgctgcagtgagtggtggagtctgggcaaacctacgcacctctgaccagagtacagtcctctgcactggcagacgaagtctccgttgtccacaatgcaggtgccgccgtacaggcaggggttggaggaacacgggttgacgctcacctcgcagtaggtcccgacgtacaaggtattgcatttgcagtaataacctaaaccagcaaacgggaacccaaagtactatcactcagtaactcagaaagagaagtctcagggtattggtttttacgtttaagtgaaaatttggctctctaagacttgtaaatcctattcgatccccttata

SEQ ID NO: 62599 - DNA, 1096 bp, Bovine  19866881142885
  misc_feature (1)..(1): n is a, c, g, or t
natatgtgaaaactttctggttactgtgtacataaataattttttccctatactataagtagcttcaattatttataagattatagttactctctttctctctctctctctatatatatatgtttactctaaaaattatataaataataagtagctaatatattgataataaacataaatatggttgtatatagtatagctactatacataaatatctctatagttaataaaaattcagcacatcacaaaatattcaacatataatatccctaaaaatcaacatcttgggggaaaaagcaattgtttttcagatttttttttttggaaaattttttcttttgcttttaactagcttaatttttttttgtttctgaacaaaattttaccatatgggcactgccagtttccagcagtgattctatatgagtggataaaaataaccaacccttcagatacagaaatatactccatgttttttcatgtggaaatttgcttaataagaatttaatgaggatcaaccacatgccagattctgcatgatatataattacacaaagattaataagccaacattcctgtatttgagccaccctacctgtacctacagatcatgctgtcttagaataaacctctaattatttaaaaaattgaaatctgtacttgtttcttataatttgattataattcaaactgtgatcatgtattaaattccaccgttgtttgtgtaattatctctatttacgtacgcccaaataatttttagctaattgaaatcacattaataatttgagcaattctactgactatgtagcgactctgttagactatggaagtatccttatgcatagcgtttggcaatttgggggtgtaaattctcctaccgtgattgattttaagttacccacaatttaacagtcatcttgcacaattcctggatgtctaatgatcatctctaacaagctggtactagacagccaattaccagataaaacttaagttttagtcttttcaccttagtaaggagaaacaggaaagcatcttttgggatcattgcttttggtgaaagttctctggaggaacccaacaggaagtaat

SEQ ID NO: 62600 - DNA, 3139 bp, Bovine  19866881144324
  misc_feature (1)..(1): n is a, c, g, or t
ncatatgtaaatttaagttcatatatgtgtgtttgtatctgtgtgtatttccatgtattcctttctgatatggtttcatagcaaagcacctaaaaaatttctgaccgagattgaattggttaatatcaacctggtttcatataagtaacataattccaggcttaaaaatagtacattttagaacagtattgaattaataagaataaaaaaaaaaaaaaaaaacctaggctgtgcaaacaaaaaaaataaatcataacatttgagtacatggactttgaaatctaatagcctaggcttagcttccagggctattactgacagcctattgagcttgggcaggtaatgtaaatgatttaaagcatgagtttctctctcattaaataaaagcaagcaatgatatccatcttggatagtagccttgaaaattaaatgagacaatatatgtaaactacttgatacacaattaatcaataactaagagcttagtatctgctcagatgcggattataatacaattagacccagatctgcaactaactaagcaatggcaaagaggggcctcttgtgcatcatcacggatgggtgaggagacacaacgcgaagggtggcctgctgagtgcatctcacatttaaagcatgagtcctttgtgcctgcaattgtgtcaagagcctcagtgtattatctctaattatcatactatgatataagcatggtaacatgtttaatagatggggaaaaaaaacctcttaataagaaagagtaaccatttctagtacacactgctagttggaggtaaacagaacataggaaccctgctttctgaccccagaacctgtgttcacatttccaccggagctatcatcttttccaaagagcagctcctttcccagacatctctatgcctcccaatgaaatgaaagtcttagtgactcattttctcaagttgcatgttataaaataggcacggtggctcagacggtaaagaatctgcctgcaatgcgggagacccaggtttgatctatgcgtcaggaagaccccctggagaaaggaatggctacccattctagtattcttgcctggagaaatttcaaggacagaggagcctggccagctacagttcatggagttgcagagtcggatgcaactgagcaactaccacacatctttgacataaccaaatgaaagcagcatgttggtcatgttacctattgcagcttaataaacaatgccaacacacagaggcctaaacagctgtttcattgcctgtcaactctgtgcattggctgaggctctgctgggtgttgcttctgctgcctcactggcagtttctctgcacttgcagaaaaatggcagctgggaggaggtgtagctagcagtctagctccctaatgcctatctcactggctacacttttgttttaaacagagtttattttttagaacagatctatatttatagagaacttgagaagacagtagagcccagtttcctctataactaacatcttactttagtacagtacatttattacaattaatgagccaatcatgatgcaatttataaaactgaaatccacagttgttgttttccaccaaatttccttaatttctagctcttgtccttttttgttccaggatctcatcaggattctgtgttacatttagttgtcacatctccttagactcctcttggctgtgacgcttctgatttttgtttttgttttttctttttctgatgtcttattctcctggttctccctcatgttctttctctctgtctctctctctctcacataaacacaagcactcatgcctgcggacaggataattaaggtttcacatgtactggctcaaggatttaagatggaggaactgaaagttctcacactctggtctggacccccgagccttggaacatcacatgttccacatcctcttagtcaaagtcatctcagaattcaatggagggagcaaaagtcccatctcttgatgctcagagtgtatgtgtagggagcacaggccaacccgtcaagagccatctctaggccagcgaccacgtggatgccaggcaaacaccattgactgtttagttgatctttatgcagttcacgatgaaatcattatgataaagtgaaaacaaaatggcacactgatattgaattcaaattcttatttaagctatgtatctcaaaatcaattgttgtcatagggtatcacctcttaacacagatgcatttttttttcatggcattaaatcactcataaaaaatgtttaatgtgctatgtataaatgtgatactttactctttagtaaatataaaaatcaggtgaacacttacaataaaattaggttttacttttaccatagtattaggaaccgtagctctctttagaagtctaggttgtctccaggcataaaaatggaaatactgatactatgacaacacagcctgaattttctgctttgcagacaccagatttatttttaaatggtgtgaatcaaatctgtgctgagaggccaacttcaaaatataaaagaaaaattggcaatggaaggattttgctggtttggctgaagtgaagccttctatagtatttcattctagtggagtgtctgactgtgaaaatctttccaattgtaattctctttttgcttgccaaaaggggattatgaattaaagttaatgttgcaggaaatgtcacctgtcctttgaaggaaaataataaatcaaaatggatttgttcctcatatttaaaaggaaaaaagtactgacctacttgagggtcttctctcatgccttaacaaaacaggtaaataaataaagcagaatttcattgtgacttttcattttaatccttgctcatctctttccaataaatattcataaaaaagagaaaaacaaggaagagagagaaagagaaaggagatgaatattgtaacatgaccccagaagtagaattcttcaagtaagatattaaattaagaaaaatatatttaaattatgttttattcctttcacagatactacagcacaaactcaagaatgaagaataaataaaaacaaaatctggagacttattcctcaaaggtttgaagtatttgtgtattatgttttaagaaaataaagacaaacctaca

SEQ ID NO: 62601 - DNA, 1486 bp, Bovine  19866881201760
  misc_feature (1)..(1): n is a, c, g, or t
ntcctaaacttaagcagcaggaatttcaagttcaccagtaagtagaagctgctgctgccgctaagtcgcttcagtcatgtccaactctgtgcgaccccagagacggcagcccatcaggctcccccatccctgggattctcccaggcaagaacactggagtggattgccatttccttctccaatgcatggaagtgaaaagtgaagctaccctttggcaaaggttctcagtgtgagggaataatcagaaaggacaaatgttagtgatccattgtgatttttaggtttcctgaagcatttcgtagccctctgctagattaagatgtgcaaatgtctgtctcgaagcactgctcagtcgtaagagataagactcacctcctttgcttttcatggcctggaatatctgactgctcatgctttaaattcttcacctgacaatgaatataccctgggataacattcatctctcaggcagcacacatcaaacatttttaatccctatctttgacatacaccatacacctcatgaataattaagtaatgactcacaattggcccgtttttcttccctttcttactttgcagacttcaaaggacttttgtacaggtagaaggtgaggctggtggtaaaaatcaacctaaattatcttctccctcagtatacgcttttgctaaggagaacttcattcttcagtcatgatgagagaaagccaaatcttcagcttcaaagctttcaagtcttgaacaaatccctactcgcttcaaaccatcattgtgaattccacctgcaactactcactcatctgagcggatctgtgtgcagttacttaaactgtccctaaccaaagcaggatcctcctactgagcaaagctgtgcaagtggagaccagattttccaaggtcagaacacgtggtttccacagcagcagggcggtgtaggagcgcataaggagatggagtcagggcagtgtatgataaaatctgcagttcatgctctccattaaatattttaatggcttggttttcatggcaaaaagctaactgaaagtaatccttagaacaaatcctcagcgaatcaattccctttgaaaaaaagaaaaagtcaagtgactcactgctctgtggtgatctagatgggagagaaattcagaagggagggaatatgtgtatacatatggctgattcacattgctgtgccacagaaactagcacaaccttgtgaagcaactataccccaataaataaattttaaaaaaatgtcatgagatactgaattgaatccaattacagtggaagctaaaacaaagcgtacttcagaaatgtgctgcagacattcatttagtattgatgatggcatatttgcccttcagtgagtcatagttcagggcttcccaggaggcactggtggtaaagaatccacctgccagtgcaggagacacaagagatgtgggtttgatccctgggttgggaagattctttagaggaggga

SEQ ID NO: 62602 - DNA, 1162 bp, Bovine  19866881908415
  misc_feature (1)..(1): n is a, c, g, or t
ntaattgtgtttgtaaatttagtctcaactaaatattcaaggaattttaaagatgctcacttgactagcatattctgaaataatgctggcatagccatggctttaattattgtctttaaaagagaaatataacccaacagactaacctaatctattcaaaagaaattgcaaggggtcagaataaaagactgagattcctttagcagaactgatgttttccaaaagggaaaaacagctaattcaaagattcaacgacgagaactcataaccatgagatctgaattatatttgtgactattgatgataccataataaatcatttaacatgcttccataaagcagtcatttctgcagtgtttctctcctcctcatctaccacttttccctgggccctcaacccccactcctctggaggaaaacataatgggatccatactcccatatacctctacaaaggcacagggaagcagctgatctcctaagtaaacagcattttatgaagtttcgtggtacttaattactttttatgaagtttcgtggtacttagttactttcaaccatcaaactagataaagaactaaaaaacaagtgataaaaatcatctaattcaaccctctaacttcacagatgagggagccgtgatcgagagatacaagacgtgtcattaggctgcagagcttgaatcaaagccctaagtggaaccccatctcctgagattccaacctaccttcaagagcagtacctagcagagaaatgaagggctgtcttagcccaaattccagtgggagtgaaatgaggcttcgtgtttgtgggagagatgactggtatcaggaatagtaagcatcagtggcacaatctcaaggttaaccactagagagctcaaaatactcctggcccgaccttacctcgctctccacgactctcacctaatcacacttgccaatcactgatgaagggtattactcatttcagaactggagagggcaacgggattttcagaaaatgtaggctctgttcttcaaatccatcactctgaagcacattagtcttcaagaaatataatcaatcattcttacagtgtccttgttaacggtcccaactctgcacttcaataaatgtgtgactgaggttatttattactgtcagtgcctcagtttcctca

SEQ ID NO: 62603 - DNA, 935 bp, Bovine  19866882168753
  misc_feature (1)..(1): n is a, c, g, or t
ntaaataacatatataagtgggtaatagcatgctttatttgatgccatttgcaataataaatatgtttgtattttcctgcttatactaacatcaccatttttacacttgccgatagtccttttgtaatgtatctagcacaaagatgcttttccaactttgctcatcagtcttctacagatcttcccacttgcccatgaagtttagccagccctcacaatccttctaaccgagtggatgaccagagtatcatttagaagtagttataatctcaactggaaggtcaatataaaaaaattttatagaaattatttctgtggagaaggaagtggcagcccactccagctttctcacttgggaaatcccgtggacaaaggagcctggtgggctacagacgatagggtcacaaactgaacaacaaagccagaagtgctcttcccttgttaattaaaatctaaaactttagctacattttagtagcatacacacatatcttactaactgaaactgaacagaacccttacaattagtcttgctgtatttttgcataaaataatgagttggcacttgagttgaaaaaaaatggccttatggtgttttgcttgggaaaaaaaaaactgcctttgttttgaatatgtttgtgtaagtttccatgcatatatcagatatgcactgaactaaagtgatgagaatcagtttgtatttactttgcaggaggtatcatgtaaacatgcatacgttgaatgtaatatggatcatgtccaagtgagtattttggtggatacagtttataaatatgtcaattatatacctttgtgtacttgtctgatttggaacttgtaaagtgaggactcctttttacacatttagtaaagaaaatgtctgaaagtaaagtatttccaaatacagtccaagaaggagatatagttaaaaaaaa

SEQ ID NO: 62604 - DNA, 1355 bp, Bovine  19866880368620
  misc_feature (1)..(1): n is a, c, g, or t
ngctcacccggcaattctttatgtaggaacaggcccaaggctaaagttgaaccagaaatgaatcatttctcattctgcagtgactactgctctttctgaatcaaattggaggtcactggctaaacaaactgggaagaatgcatgttacaaaccaggagagttattttgtgggcacaaatctaaagctttagcttttttttttttttttaatctttacaagggaaaacattccccagctgaaagtaaatactaccgcaggactgacaactaagaacatggataaatcatgttatccatgtctggcctggcttaagaactgggaaccaggatataatatttgaacacaatccgtctgcaacgcaggggacccgatccctgggtcgggaagattccctgaagaagagaatggcaacccgctccagtattcttgcctggagaatcccataaacagaggagcctggagggctgctggaggagcctgctggactcacagcattgaaaagagtcagacatgactgagcaactaacacacacacacacacacaattctgattccagagaagctgtatgctctagtggtatactttcaattcttgatttctgcatataacaaaacctaaccagtatgtttaccagctataacgttcatatttcctccaaagatcgcttctggcctccctctcctctcttctttttatatttgttcttgagcagtagcagctcattcattcctgcaatttcaaccatcacctctacagaaattattaccaacctctctctaaaacccagttatctataaacgccaggcccacatctccattggccctttgtagggcactaatgatgtacccagagtgggaaagcaataccctctaatacacagacaccaagcaatttccacaggtccataactccttctgtggtttctgtttccttgaataacatcattacatctttattcacccagttcaaaaccttggaatcctcttctctctctcttgcctcctacacccagtttgatgcaaccttcattgattacaactgttacatctcctgcattgatccgtgaatgtcatttccaccatgcttttctcatgtaggagccacattttgaattaaatggtgtttcatggataaaactggaaatataaccactataatatatacctgcttgccaaccaacttcagctcatttctgactctggtttcagttcagttcagtcgctcagtcgtgtccgactctttgcgaccccatgagtcgcagcatgccaggcctccctgtccatcaccaactcccagaattcactcagactcacgtccattgagtcagtgatgccatccagccatctcatcct

SEQ ID NO: 62605 - DNA, 1680 bp, Bovine  19866880388716
  misc_feature (1)..(1): n is a, c, g, or t
natagccctaaaataggactgaaaatatataaaaacttaatgaagaatgataaatgaaaaatcacataccataaaaatgctggaagtagtgttggtgaatataaaactgatttaacagcaatggaatctatcaccaagcaaaagatacatagatgtgactgtataattttttaaatttgtataccactgaaataaaatttatttaatgtaacatcaatattttaaaagttaaaaacaaactctttatcagaaaacactgtaaaaatatttaaaaacaaattgcaacctgggaaaaatatttgtaacatacataataataactttactgtatagaagaaaatttacatatcaataagaaaaataagaacacattatgtattcatgcctgcttccataatatattaccacaaatttagtggcttaaaacaatccaaatttatttccttgcatatctggaagtcagaagtccaaaatcagtttcactgggtcaaagtcaagatgccctaagtaccggttctttcaagaggccctagaagataatccctttccctgcttcttccagcttctagaagccacctgcattccttacctcctggccccttccttcgtcttcaacgcctgcagtgcagtatcttcaggtctctctcttctctgacctctgcttccatcaccacatttggtttcacccttccccccttcagtcttcctcctgtaatgacctcacctgtataatataaaataatctccccatctcacagtccttaactgaaatacatatgcaaaacccctttggcatgtagggcaacatattcacatgtttcagaaattaggttatgaacatccttggcatgcattattcagtatactccacatcagttgaaaaacagatacagaagcggagacaatatacagaataaaaaacaaataaatgcccaatagacatgtgaaacacatagtcaacctcactactattccagaaactagaaaataaaatagtgaatactttttttgcctaaccaattgacatagatttttctaaaatgtaatacacaattctagcaagagtatagtttctgaaccattgtagaaaaaattaggtgatatgtgtctggagtcttcatttagtccaataatttcatttcttgaagtttttcctaaggaattacctaggtagatacttgaaatacataataaggctattatagtacttttaagaataataaattaaaattatattcaatattaaggcattggctaaagaaatggtgataaagctacatgattgaatattacactgccactaaaattaaacctccaaagatttttaatagtattggagatattctcacaatatactgctaatgacaaaaaaataaacagaatacaaaactgcataatctatgacatatatacaaagaggagtcttataatggcttatgttctttattatactttattttcttcatatttaatgggcttctctggtggctcagaggttaaagcttctccctggaatgcgggagaccctagttcaatccctgggtcggaaagattcccctggaaaaggaaatggcaaccgacttcagtactcttgcccagagaatcccattcagggaggagcctggtaggccccagtccatggggtcacaaagagtggacacgacgagcgacttcactttt

SEQ ID NO: 62606 - DNA, 659 bp, Bovine  19866880425044
  misc_feature (1)..(1): n is a, c, g, or t
natattgggagtgggtttctatgctgtcctccaggagatcttcccttccccagggatcaaacccaggtctcctgcactgcaggcagattctttaccatctgagccaccaggaaagtccagtacatgtataatggataataaatggaccaatgaatgaataagtggtgaatgaaggaatgagtgaatgacatggcttaatagcagtttgttgaaaaagagttttgaactttaagttgagcagcaaaaatatctaactgtggtcttaggtagaataacaaaagtatggtgcctggtttctgagtatctagaatcttggaatttcagagattagaaatgatggggaaacagactagacatgtgagatgacttgctcatggttccaccccaaatttgtggtcaaagtaggatttgcatttagagatcatgactctcagttaaatttgctttctacaagttctagtatattctgtgctggtcagaccacaactgtagcagactgtgcaattctgagctatacacttaaagatctatagctgcaaagtagcatctgtccaaggaaggatgatgcagatactaggggaaagtggaaaccatatcacgtgaagatgagatgaagacagtaaggatatttcacctagagaggaaaatacttgcaaagg

SEQ ID NO: 62607 - DNA, 1391 bp, Bovine  19866880469955
  misc_feature (1)..(1): n is a, c, g, or t
nggtcacctcttacatcaacaggtgaagtcattgagatggaatggctggcaatcttacccagttgcctttaattgtattataccctatgacttgtgcttccttggcttgttaacaatctacagcctgtgacataatgtatccttaacctattttggtgctcttaatttagaattattccttcttcccgcatgaaagagaagctgccaattttgagaatatccattaagttaagggcacaaggcagaacgttaacattcaacttaaagataaagcaatagactttataaattgcaaagcgcatttcttttttaatagaggaatgaggttgtctgctgagagatctggggcagtagaaagaagtttcctttcctaaggtacaagttttatttgcattccatgagtcatgttacatggaaatccttcactcaataagaaacatacacttctgctgtggttcgtgaccctccctgtctctcagttacgagcactacaaattccaaacatgctgtaaatcactgtcccccatctttcctccaagactttgtgctggagatggactgattcacatcttcatctccatgatgtacagaaacaatcaaaacaaatataagcctttattatccaacaggtactaaataaaaatccaaaggcttctgataaattggtagtctttactcagatgggtattttaaacccaccaaacaacttcagacataaaatggcgcatttgcaactttcctcctctccattgtgaggtgattgattttgtctggatgtctagagaaccagccagctttatatttgagttcgttagaaaaatcaagaaagaaggaaaagatctgcctatctgaatagcaaagtccccatttctttcccttttgacctaatcaatatgagaaggcactaaaaataatggtttcaaaatcttaactagaaatgccagctggccacaaaaggcttccttaaaagggcatgtgggaatccatagggagagtcatcattatactaatccattcagaatagttgatttctctacttctgagtccagatatctgtcctggattctgcagcagccaaggcagtgggagttttttttttttctgaagcaaacaaatctccctgtttcatactgatccaacctaattctagccacccagcctacacattatatatttcctattttgagaaaaacattcctggaacagggagtgggcagtggactcaattctattttccactaaattaagacaccttacagataaggaaagctacattttctgtgacagggaagaaggcagaatacttgctgcagtgaaaaaaattacaaaccaagaatcagaggataagaggaaaatggcagattgacttccggttaaaggacagctgtaag

SEQ ID NO: 62608 - DNA, 1499 bp, Bovine  19866880492211
  misc_feature (1)..(1): n is a, c, g, or t
ntaatagataatgaatagtcgagtattacacatttgagaggtcactttagaatggagcaaaagtaaaaaaccagaagatacttattctgccctttaagtattagcatacaactcaatatgttgttgagagcacagggatggttgcaagtcaaatgaaggttatgttataattggtactctgaattgttaaagagaagcaaaggtgaagctgaacactttttattattattttcattgaaatcttattaaaaacttttaatggaatgcaaactagataccatcttcaaggtcacaagttaaatcagatgtacagccattaataatatcactattaacatacagctttatgaaaataactttcccaacatagacatgggctaacatgttttctatcttctttgtattttctttgctattacagagaaagtcttgagcccaaacaaaagagagtatgaccatcataatcagtccactgaaatagagctgcaaatctctgcattatgttagattcaaaaaataaaaactggcaaataaatttagcattttaattcagtgattctcagtcatgcttaaatgtttaagcacctgaaaattatgacattcattgcagatttcaatgaaataatgatattttaatttagttgaaataattagaaggaaattcacctgcagaaatatgacagtttgtgtaagtatgcaagtgtctatacatagaaagtaatgatctataacacatatttgagaactaacacatataaggtttgtctcatttcttatgtgctcttggctcattcattttgtcaacttacagcagcacatgccactagacaaattgataaagcaatgaaacttaaaagaggggaggggagtgtggggagagaaatttacaaattagaaaaaagttttctctgcttttcttaaggaattgggtaaaagctgttattattttattttagtggtagaacatcttggttgagctcccaacagaattatttcctagaagcataatatgaaacctactatttagtgtgtgtgtgttcagacacatttccaaaagagaacatttttatatgaggcaaacaaaaatatcataattacccaagtttcttcacattatgaaaagtgaaggcctttaaaataattctcatcatgtaaaaccaattccccatgtaatattctgatcactttttaacataatttatgtattattctaattatttgactaatctcatctgtcctattgaatcatcatctaacaacttctcaatgccttttattcttagtaaagaaaaatgtgcaaactttaatatagatatgctatcatgaaaagccaatgcaaaatacaaggaccctgaagagaaaaacacaaagacaatatttataaatgcattatcttgtgcatgttataatcatcatttcagaggaaggaagcaattctaaaaataaattttaaaagctatttttacactaacattatttttttctgaatgcacacccat

SEQ ID NO: 62609 - DNA, 1238 bp, Bovine  19866880500901
  misc_feature (1)..(1): n is a, c, g, or t
nagaaactgtcttccacaggtgttttaaactgggtagacactcttgcttgtcttcgtgttttacttccaaacagtaatatattgtatgtgttggttcatctaaacaacaaatcagcaagcagtccttggcagcccacatcagtctgccccagaaacattccctcacaaacacaaaatgtaatatcgaataagtgattgaacaaattgtaaaattatatgcaacatccaatccaaaaatcaataatgctgaagaactaaatgtttattatagtatacagaagaaaataaaggaaacaaatatctggtttttctagcttcccgttccccacccctgtgcaaagtaaaattaatcaagagtgggtccattcatcccttcaccactaagctatgaatgaaacataagaagccatgactattcacttgggatgggtgatcgtctaccatagctcttttgagttcattgcagtcttttcaaagtttctaacataatagtttaccctgttctctgagctcatcctaaaatgaactttctccaatcaaaattgtattatccagggtaataaaagtaatgctaggtcccaactactcataagtgcctataatcagcagatattaaaagatgtatatcaggaagatgtgtacaacagttgtggggaaaagcaagaaataaaatattatcttcacattagcagaaattagtgatgtattttcctttaaacatagatatctacataaacatgatactttaagacattcgaatataacatcaaatgatcagttatacaaaaataatatatgtggttgaagtatgcagtttaattttaactaaacatgtttttccttctctaaaaagatttgtcaatttggggaaaagaaaatacaacagagctatttgtactacagtgacattggatggtcagacttagggggttcagttcagtttagtcgctcagttgtgtccgactccttgtaaccccatcgactacagcacaccaggcttccccgtccatcaccaactcatggagcttactcaaactcatgtccatcaagtcagtgatgccatccaaccatctcaacctctgtcatacccttctcctcctgccttcaatctttcccagcatcagggtcttttcaaatgagtcagttcttcgcatcaggtggctgaagtattggagtttcagcttcagcatcagaacttctaatgaatattcaggacgaatttcctttaggatggactg

SEQ ID NO: 62610 - DNA, 1257 bp, Bovine  19866880574217
  misc_feature (1)..(1): n is a, c, g, or t
nttatagggttaagacgttatgtacttgtggagttgctgaagaagtaagaagactgctgcttctgaatctagtgttggtcctgatggtactatggctcagcaggggcattggtcaggaacataagctgggtgtgagataaggaagtcagcaaggaccgactggaatgcacatctgcctctcacaacctccaacctcaacaatgtgggtgacttgcagaagaagttgatgtcttattatggagctacatacccagtggcttagggctcagagaaactgatggagaaaatctagtgggaacttgagatgccacagccttcactgctgcccttcaataatgaagtgaggtagcaaccgtcagtgtggctggcagccactcgtggtgccttccatgaaccttcacaggagaatagctgctgctttacttccagttattctcttgtggcacagaacctgtgcaggagagcagtttctgggaattgtaattccatttttattacaataaattccatgtaattccagtttatataccttcaaaagaacatgaaaatgacctcagacttctcctctacaaaattaaattccagaagacaatggaacggtaacaactgaattaggagagaaataagctatgagctaaaaatttagttcctgtattagttattttgttcatgtttgaagacacctgtcatcttcagttcactcagattttcaaaatgttcttaggcttcccacgtcttcacctgccattgttcttcctctgtttccagtccttttctgatagctcagtgttgctatacatgatgatgctcctggggcaattctccaaatctcacacttctgcttgtgtcttgtcacttgtaagctgtggtacctgaagtcattaataatagaataagagactgaaagaatctttctatgttttctctccatgtcatattcagccacagtctgaaaccactcttctgatgttttatggttcattttgtccaagacaaggtttaccacaaaatcagtagctaaaaagaccatcttcaggtcatccatgcttggttcattaataaaatcttaggccctcttgattcattatctttttgatcccaattcctgccctgcttttctccatatgattcttaaactttgtttcccagtttgtcaccatatttaccacataaattatagatatctataatatgtgtttgttttgtttttacctgccttatcaattaatgtataagttaaatactatatttttagga

SEQ ID NO: 62611 - DNA, 2149 bp, Bovine  19866880760335
  misc_feature (1)..(1): n is a, c, g, or t
ntgtttctaggccaggatgagtgagtcatattgcagcaactttgcaaggccaaattcttcaatttcatgaatcctcgaggaaaagtcagtacagactactgaaatatgacagagattatctcaaagtcacattagactctctactagtgtttatcttcagaggctacttccattttccaaaaccatgcagcaccacaccagctgttactgttcctcaattagaggagatgtttcacttacataattaatcatctggatatcaatcacaagaaccttttcattgaattaattgatatctttatatgagcatccatattatatgaagtgtgaaggattatataaggtaatggtattgtttttttttttaaataacctatgcgtgaatatgtaaatgagaaaggccctttgaaggcaacatcaggaaggcggggatgatgtgcaacccaccgggtcagagtcaggccttcttctagcctcaatctagacaaaaatcaactttactggtcctcttactttgggaatgtaaccaaattcaatctagcataaaaacctaattcgaagttactgagagtccaatatcaggtattacaggagagggggagagaggactggggcagtcctagttctcttttcccagtggtcccactgccactgctaaacctgccagtcatcctgattcatcagaggcactccttccacaaaaggctttacccacagtgatcttggaggtggcggcttctcagcacccatccttgagcagtcaacccattctgcagggcacatttggagatggctctgtgccccgcctccccaggggagtctcccctgccaggcttcctccccttctccagatcccaaccacctttttcctttacctcatggagcctccatcctctgttaaagcacttctctgccacatatccctggacttagaccttgaaaacaaagacctttttataagccaggctatgaaaacaaagcagagagtaatgacccaaactgtcaccacagtacatcaaattagtaataaatagattacataaataacacttggttaactggcaaaattagaaaatgtagataagccaaacacataaattaatctcacggacaaaagataaacaccaaggtttgacatatatcctttcagataatatcggtgaatgtatgttgaggtttttataagacaaaagaatttttaataaactgaatgttcactaataataagctacagagtttcacagtcatttaagcacaacttaccaacagatatatggtgtggctcttgtgtaagtttcaatcgtgttcagttgcaaatcagtgaggccttcaaaaagtttagatgaggatctctaagccatctgtttgcatgcttatctttcttttcccccacaacactaatttcccaccatgtcccacactatttccaagggacccttccagtcccagcacacatactattggtgagctattctcagtctccaagtctgtccaaagcatgtgacctcatctccagagtttctcctaattgtccctgtatcagcctgaatctaagtagatctagagatgctagaccagctttaccctccactcaccctcaccgtgaggatgttttgtttctcttttcacttcgtggaagcctggtaggctacgtccgtggggtcacaaagagttggatatgacttggcaatgaaacaagcctctctgtgattcctagtctagagaagggtttggccatttcaccatcatttagcttcaaggtactcatgccaaacctgtcattgctacaagaattcacattgcagttaaagtcagctcgggtattaacctctgtgctgtttcccacactgggctcttcactgccttaactgaggcaatcaacttggttcagaaccagcagatagtataaaagtatagcattaaataacacttcaaataacatttaaataacacattgatagtacttattatttttttgtattttaaaaaatatatatcctgattatactgaaaggtacttgcaaccaactttcaaacttgagcacaagactgaataattaaaaatagcataagaatattatatcacttaaaggaagtgcacaaattagttccacacatcaagtgtgcgaagttagctactataaaaaag

SEQ ID NO: 62612 - DNA, 2338 bp, Bovine  19866880840530
  misc_feature (1)..(1): n is a, c, g, or t
ntattatatgactttcattatactgcctttctatcactttcattcttatttcatgtctgatacagcctctcagtccacctgtgtttcatttaatgtaaaataaggctaagttccaaaaaccctgacccaaacacatatctagtggtgtttgaacatccaccatttgaaacacatttctactacacagccaaggggcaaacattcttagtaagtgtgtgtgtgcctgtgtgtgtgtgtgtgtgtgtgtatgtgtggtgatatgcatgaatcagttcttatcttgactccaagctatttgtggctgatgaggatgctactctggcagaaagaagaaaccattttcaacttgagaagtctcctcttaaatcagtatatatctgattacagataacattttaaaatttagccagattttatttatactcacttgaagccctttaagtgtatcctgagattttaatatgtaattaagaaagcatttggaaatatcattcctcccctctagtaagtgttaaattcatccttaagaattattatactttctatttctgtcttgatttgcaaagggcacagtaatcaataataactgtaaaataatgtggaacaattagtttttcttgcatgctcataatttgtgttgacatcagttggcattagttaatgcatatactggagagggggaaattaagctgccaataatcaagcttcatgttcactgctattaatagcatttttgctttaaacaaataatttctgaaaatttgtattctagcatccaactagcaacagaatggatgcattttcttctagaactcaatgactttccaaacataatgattcaaaaaataagatgagtcaacatgtttctctgagttttaccagaataactgcttatgcctatttcacaacagagtctctgctatccttcatattcctagaagttcatggtaaattcacttgagttaagatacagtttaaatattcatgcaagcacaatatttgatcacaaaagctgaatttgtacatcaggttgaactttcctcaaagatacatggttctctacaatcactgatggtctgccatgttcaactgttcttctcattgttcctttcttgcctttattatgtcctgaataggtttgctattgttttcttacttccccttcatctaatttttttccctatgtgattctgagtcatccacagacagctttcctttctctagaggcaggagagtcctctcaaacttttccattcagattctattaatatacaggtgggagttcagaaggtaactttgataagagtatataggtatatagctgagtcatttagagggtcttacttcgaggctcagtgtctggtctgatgatattttacaactaaaactctagagatcagcagagttgattatatatactttattattttggctcagaacttgctgattattttgctactgagcaaaacccctcaatgatcaactataatttttaattatatttaggaggaatattaattaaagaggaacataattcaatttcttttagtaccatatttattggagatggagaaaatttttgaaaatataaataaaggaagtaaaaattgattccaatgaaggacaaaaatggatggaaatacatgcttccagcaagatagaggcttttctctacatgctcccatgtatcattttatgtatatggcatggtagtaaggccttaaggaagttttgaaatagtaacatcatggaattcagtgtgagaaatatatgctcaccattcttgctgtgaaaataaattctaaatgtgtattttttactgacaaatatagtcacacacttattctaattttattttcaagagtgtttatggcaatattaaaatcataaggttatgtggcagtccaacaaagccaacatttttcctgcagcaaaagaaatacagaaaacaattatttaaaatgaaaacaaagacaagaaacaacaataacaacacaaatcctcataatacagaggattgccccggtggctcagacagtaaagtgtctgtctacaatgtgggagacccggcttcgatccctgggtctggaagactctctggagaaggaaatggcaatccattccagtactattgcctggaaaatcccatggacagagaagcctggtagactacagtccattgggtcgcaaagagtcagacacgactgagctccataaataaataaatttatcactaacttactttagaggcagagatcaaaatacatattaatactgggataagctaatggcaaagtcagacattatcagagtattcaatttaatttggacttctaat

SEQ ID NO: 62613 - DNA, 1861 bp, Bovine  19866881054112
  misc_feature (1)..(1): n is a, c, g, or t
ncgcaaagagtcggacatgactgagcgactggtctgatctgatctgatctgatcgtaagttattatctgaaaccttggcaatatttttactattttaactttattatgactatatatttcatacagtctatgttagggatttagggcatggcaacccactccagtgttcttggagaaccccccatgacagagaagcctggagagctacagtccatggggttgcaaagagtcagacatgactgagtgactaagcccatattagggatttaaattatccttacccattttacccatccatttaataagccgtctgtcttctatcttaggcaacctaaattatcatttctttgaattcaaaatgttatcacttattattatatatcttttatttttttcaaaataagtacatttatgtggcacactatgaattggaatgacaaagtataaagaaattagtaaaattacatacaaattaaaaattcttttctctgataatagaaaaaaggagaggctaattcagaattaggacactaaaatgctaggaattaaaagacagctaaagatgagtgtacatacattctaaatcaccagggaaatgaatgagcctctgaattactctctctgtttctactctgcctccctagagtcagttcacagaacagccagagtgatgctttaaacatgtaaacgagatcaaatcatttccttacttaaaacccagcaaagtcttttcatggagcttaggataaatttgatggtttgtaccatggtttatgaagctttacatgatctggcccttggctacctattcaatttcatttcctatcagtcttctctgccctttccatactccaaccacactggactgtttattgttctgaggacacaccaactaagtttgtgctatcagaatttttcacttactgttccctctgtctagagtgctcttaactcagatatttgcatgactcaaatatgaccttttcagaaacgctttcactgaccacagtatcaacatcagcatttccatttctgaatcctaacattatatcacatacttgatttttaaaaattgtctgttttctctacctcaatatatgctacatgtagaaagagatttagtctgttctgttcattgttatattcttcaggcctagaacaatatctagcaaataataagcacccaataaatatttgttgaataagtgagcaaataaatgaatacatatctgatttcaaatatgcttatatatgtatatatgtactattttagtggtttagacaaagtttttatttgaattatgtagttaattgatgaattcatattttttgcttcaattatcaagaaaagcatttcttcattcttatgtacaataaatatttattaatttttgttaaatgcttagtttgtagtggatgtgcaataaatacttgctgaataaatagagtacttaccatgtacaagatattagacattttagtatttaattgcctaaaagaaaaatggacccaaatctccctgttatgtggactgggttattttaaacataatgatgaatattgtatcccaaggatcaatgttcaataattagtatgaatggtaatagtccccacagcttgacagtccctggctacatgcaattcatacaattcatgttttcattatctctgtgccttttgggcattgcaatccatataatatcatttcaatctttttttttcccatcgaggtgctctaaatggtttagatttcctctctgtcagaatcttattctgaacaaaaactcaatcagccttgtttctttcaatgattatttaatttgtaccaactggtgctattgctatcctttatatcacctat

SEQ ID NO: 62614 - DNA, 2060 bp, Bovine  19866881133335
  misc_feature (1)..(1): n is a, c, g, or t
nttcaggcaaattggcaatcccttggtattttcttgggctgccctggtagctcagctggtaaagaattcacctgcaatgcagaagaccctggttcatttcctggatctcgattcctgaattgggaagatcccctggagaagggataggttacccactaagattataaacaattcctttcaggtttttctatcattgattttttttaataattctgagttccttatcagctaacaagttttgtgttctcgttctaacatagaaattcttcaaaaaaaaaaaaaaattagcaaatgactcatcattaaaaaaagaaaaacttgcagccaacaacaacacactgaactaagtcaattgaactatattgaaacagttagtcaaagattttcattttattttggcactagaacaaaaataggggacataatacccagatagtaggtaaacaacattattgtcatttttccatgggaaaagcatgattttgcttctataaaaacaaatgaaatattagggagaagatactttataagacaactttgacctcaaaccataacctacattttatacacaggatcagtctctgacactgaattcattgtttaataacataataacaacataaattgaaagactgtgaatgacatatacaaaccactgtataatagatgactaataagtacctattgaatagcacagggaactcttctcaatactctgcagtgacctatatgggaaaataatctgaaaaagagtggatatatgtatatgtatacctgattcacttggctatacagcagaaactaacacaacattgtaaatcaactatactcccaatattttttttaattaataacaacaacaactaaatcacaaagtacttcatatgtggcgggtgcatcctattctaaatcctttgcatataccaactcgtttaaacagtaaaacaacttataagcattattactattattgttttagtatatcatcacatatcactttatgagatagataccatcacattactatcatttctacttaatggatgaggaaatgaggcaaagaaagacccagcccttggccagggtcacccggctggttggtagtcgctctggcatgtaaatccagtcattctggttccagagtccatgcccataaccattccactgtccttcctctccagttggttaatttttccaaaatatcctattcatctaaagcaagccagactcttcatagtgaggataatggacgactaaagccaagtaagaaagttgtctacagatttccacagatggtagaaaacgcctttccctacaaattcatgaccctattgaaactccactgggcagcaaatctcagatccttgatgcacttgagaatattccagaactagaggaatagcacatatgccccagatgtctggcacagtcttacccagatcatcttcccagcagaacatgaagattcttccgaatatttacagagatcaatgaaatcattctattttaattttactgaagtatagttgatttacaatgctgtgttaatgactgctgtatagcaaagtgacttggttatacatacatgtatgcttcttcatttcttttccattatggtttatcacaagatattgaatatagctccttgtggtatacaaaggaccctggtgtttatttatcctatatataggagtttgcatttgctagtcccaaattcccaatccttccctccccaccctccttcccccttggcacctacaagtctgctctctatacctgtgagtttgtttctgattcgtacataggttcatttgtgtcgtatgctagattccaaatataagtgatatcacagggtatttatctttctgacttacttcactctatgacagtctctagatccattcatgttgctgcaaaatggcattatttcattctttttatggctgagtaatattccattgtgtgtatatatatatcatatgttccttacccattcgttgatggacatttagattgttcctatgtcttggctatggtaaataatgctgctatgaacattg

SEQ ID NO: 62615 - DNA, 1002 bp, Bovine  19866881190801
  misc_feature (1)..(1): n is a, c, g, or t
ncatatttgtatttttagatcagataaaaggaatagaaggttctttccttgaaaaacgtagtgtgattcaaagaaaatgttattgaaaagaaatacttaaagttttgtgaaatattgatatgtagccactaattttgtctctacaatcaattgctttttctttgtgtatctcaagcatgttcttatggaattacatagctgtacaagcgctaggatcaacagaatttttaaatggaggacaagggggtggggaaacaaggcactaaacaccagttctttcaaaataatcctaaatttggaggtagtacgtaaggacaaatcctgtctttactgcatcgtattcatttttgagaaaaaatcacctccatacagaactattttccatcagcacaaatacaggtatcaaaatgaagaggacttttgctgggttgttaaattccttggaaacatggactgtctttcatgacaacagtctccttcctcttctgttcccacacagcttgacaagcaggtcacagagaaaggttgttaattacattcctttgcctaaaagggatttggaaaaaaaaaaatgtaccttagctttactctcaagagggtcagatggctgaggcagtgatttgtttgtgtacagatgggctagtgcaaaggaatggaaaaaaatactcgggtgaagaattttcaaatgggaggatgcgttttaaagacagcttctattatacaccaactacatctggtggagtcacagggcaaggtgaatatactataaacaatgaagtctcctgagggaaaaactgctgcatattgagagagaactgtgcatgggacagccaagagtgtcccttgtatagtatatgtttttgaaagcaggtttcacatcagttttagtgtaactgggaaggatttcaactttttttttttttttaagacaaattacttggacttaactcctactaaaaaacccaagattcaatatatgatcagtagatacattaaattaga

SEQ ID NO: 62616 - DNA, 751 bp, Bovine  19866881200458
  misc_feature (1)..(1): n is a, c, g, or t
ntcataacagagttctttccatgcgttggttagaaacaaagttttgggtagagcagaaagtggggcatctggttgaagaggctcctcggtagaatgaagaaatcacaaactctgttccccagagctttctccacactctcccattttgaatatcacagaatgtgtcagaaacacggtataataaagtaagaaactgaaaggtgctcgggattcccatgagtcgtttataacatggacctttacagagagcagctctgccatgttacaagtctcgatttgtctctttctcgttgatgtgtattccctgagagggtggaaacttttgtctcttgttcactgttatgcctcagtgactagagtagtgcctgacagctagcagctatctgttgaatgagtgtgtgttgggtgaggaggcttcctaagagagcactgaggatggagcttgcccctctgtcggacactatgaaagaatggacttagctctgtgtctggaaggacgtttgctgactgctgctgccactgggaaaagagaagaaccaggcctatggggctcgatggttttcatttttaaggaaggattttattctcagcggatgagtagcagactacagaaatagctagggctctgatacttagtccagaagcaaaattacttctgggatttgacaagagggttgggaaggtttgacaggagttacttgcaggaaaggaagaaaccaagagctcagtgaaatgttattaaaagtcctta

SEQ ID NO: 62617 - DNA, 834 bp, Bovine  19866881219903
  misc_feature (1)..(1): n is a, c, g, or t
ntcctattatgacaggacatcattctaacttggaaatccaagcttttagaaacagtgctataaatagagttaatattagacaaactacccacaattggaaggaagggaacagatatcagtcagagttcaaatttccaacctttgcggctttggtcctttgccaaccatgcttcttctctatatgctgatggatacaggctgcacagagaacactactgaactgaaggaacttttcttcttccattacaaaggcttattacggtcaatagaatagacttcaacaattcagagagaatagtttattgttgccagaattctggttgaaagctacattgtattgtttaattcatcgggacaaaataagttaaaatatatgggcagactcactgtcatatgtctggaaaatcaaagcctgagacagtaggtacctgaagttcattgaaggagagttcttcaggaaaagctcttcagggcagggaataacaagcaggagagagaggaaagggctgagaaaggatgtggtcccatatacagaccagtcttgacttgatccatgtgatcacaccacagaattatgaccctctcttctgattcaagagggccagctatttgtagccccatttccatcaatcactagctgcataacctcttgggagatgcagctgccatcagcaattctctggaagaggacagagagagaggagggaggtggggcatgcagctgtgggtctttagctaccaatagcagctgaagaagaaatggaaagagatttaggcagggcacccacagtagctactatgctacttgtattcactcagaaatagaaaaaaaca

SEQ ID NO: 62618 - DNA, 1320 bp, Bovine  19866881254504
  misc_feature (1)..(1): n is a, c, g, or t
nattgatggagagaacacttgagggggatggaggggttggaatgcatgataggttggccctggacaagaaatctctcccaaggtagaaggaagaaaaagaaaacattgcttttcagagcatcaatgggatcgaggtgaggtaaagagtcaggagttataaaaagcaaatggtaaataagatatggaagccagatgttgtcctgtattttaataagttcttaaatgcatagtctgcatggtatactggaaagagccctagttttgatgccaattctgcttatcaattgtgtaaatttctaagacaagtaatgaaatggcaacccactccagtattcttgcctggagaatcccatggagggaggagcctggtaggctacagtccacaggatagcaaagagttggacaccactgagctacttcactttcactttcatcatctgtataaaataagatttttataaatctgctttgaagggctgtattaaggaacatatttttgtcatgttaagtattaacacaatgctaggcatgttgtcggagaaggcaatggcaccccactccagtactcttgcctggaaaatcccatggatggaggagcctggtaggctgcagtctgtggggtcgctaagagtcagacacgattgagtgacttcactttcacttttcactttcatgcatcagagaaggaaatggcaacctgctccagtgttcttgcctagagaatcccagggatggtggagcctgatgggctgccgtctatggggccgcacagagttggacacggactaaagcaacttagcagcagcagcagagatctcttcaagaaaattagagatacaaagggagcatttcatgcaaagatgggctccataaaggacagaaatggtatggacctaacagaagcagaagatattaagaagacatggcaagactacacagaagaactgtacaaaaaagatcttcacaacccagacaattacgaaggtgtgatcactcacactcacctagagccagacatcctggaatgtgaagtcattatggaccttaggaagcatcactaggaacaaagctagtggaggtgatggaattccagttgagctatttcaaatcctaaaagatgatgctgtgaaagtgctgcactcaatatgtcaacaaatttggaaaactcagcagtggccacaggactggaaaaggtcagttttcattccaatcgcaaagaaaggcaatgccaaagaatgctcaaactaccacacaattgcactcatctcacatgctagtaaagtaatgctcaaaattctccaagtcaggcttcagcaataa

SEQ ID NO: 62619 - DNA, 1253 bp, Bovine  19866881309218
  misc_feature (1)..(1): n is a, c, g, or t
natactgctagataagaattgcaatggggagataacatgagcaatcaggttgtaagtaacatccataatcaatgatttgaaataaatctacataaaccttgactcaagacaaaactgtcagaaaaaaaaaaaaaatcccaaaacacataactgaatgtaccaaaaacttaaatgttcttagttatggatagataggaatgaattctattaccagtagcttgttaaataattccctttattttataatatcattgttgatttatattggccaaaggtacaaattttaccaaaataataataaaatttaatgtgccatatgttaactactttgattttttacaatggcctgtggaatttgataggattcattttcctaatgagggaactgacacacagaaagatgaaaaaatctcctaaagatcacagcagccattttcaatggctccacaatacgttttggagatggatcctgtccataggaataaagctttgaaatgcagagatcgctggagtgctgattgcatgacgagtgaatgctgtgagatgatggtaaaagtcatctcttaagagctttgtgatcagattcgtacatttgcaccctagatttctctgacccaactttgtttactgaatcctgaaattaccttttcagtgtgttttttcctggttccatgagttcaccttctctctatctcaactgatatggatttccccttcatatacctcttgcatatgattatcagacgtaacctgcttccaatttcagagtcaaagagaaagagaactaaacgtactgtttggaggtctgcgttctcccaggttactcctcctatggctgcatgagatgggattatgcctcaccatctctcaacaaagactttcagctgctatcagttttatttaaagaactcatgagtgctgcctaactatgtggcactgttttatatgcagaaaatcctagggtatatgaggagcgcatagccctgttgcattgtttatctccttctggccttgcagagttggttttcactgacgtgctgcctctttttaccactccatctcagttgactgaggtactgggagctcaagaaacttatccaaagtcacacatgagtggcttaccagaattcataccccagaactgtcatggttcctaaatcctttattatgagcattataccataccatcttccaggtctcagtattaacatcatgtaaatttattctccagcatgattcattaaaatgaaaat

SEQ ID NO: 62620 - DNA, 3129 bp, Bovine  19866881333401
  misc_feature (1)..(1): n is a, c, g, or t
naaattgctttccaggaagtagtccatctgagccctctttaagataagggactcttcctggttctgccagcaaacctcttcactaccataaagccaccagtgagaatatgggggacattctatatatcatatccattcaatgtttaaaaacaaatagaatccatactaattacaggaattttaggaagtactctctccttgtaagaaaactgaaaccaaagaaaatatttcactaactgaatcccgttcaagaagtattctttcttgagagtacatctctgactgcttctatctcaatctcaatttcaattgttgagattaaagccttaggaaaaatcaggacagcagaaagaatcatttcaaaaacataatgttcaattgtagatgaaaagactacagctagagcagtgactagtttgctaagaaagaggagaagatatgctgcaatcaggctgaggcagacagaatatagaaatcccccacagacttacatggtgcaactgtcttctgtagaactctacccacacatctgtgaacagtcattgttaaaatgcccaagagctatactaggtataccctcagctaaacatttcataaaagcatgactgtcaggttcctcctgggtaaacaggtcatagaaatttgaggagatataaataacatagttatattatgtttctatgatttgttttattcacttccagtgagaaatgttatatccactctcatggggcttcttccccctctttagggcagaaaattggtgaaaacaaccggtcttcttcttcctcaattcttggtaattctccttttcatgtggtttttgtcctttggtctattaatatggttttgtacactaattgcttttttgatggtaaaaaaaaagtcatacatttttacacgttgtggcactcagagttaatttttagattaagataatttggaattggatctagtctatgaactagggaaatattcaaagtgacctttagacagctgccttaattttaaaaattaaataagacactgaaagaagcaatgtttgatctaatcagatgttgatttattttaacttgatatcacctacaactaggtttgctttccttataaccagaactgacaccttaaaacaagatgatgcactagacaaatattctcagcataacaaaattgaagcctgactcgggtcatctataggaaatgagtaggaacccacataaatataagcatgaaaagtgaggcagcatctttccaaatacaatcaagtatatatagaatgttaactgttaagcaaacatttcatggtgagctagactcttttccggagtcacttcatattcccagagaacagaaagtaggtatttagaagggcccaggtataacatttggggatgcccagggtaacattttccaaactttgctccaaagagcaatagtccctctgagatagtataggtgtttcttaaaaattaatttcagtggtcacagaggtttaataaactctcactttaccataggacttcgcctttgctatggtactgtgtgttgggactcttctagagtgaatcatattgtacagatttctccagatgtatttgaccaagcaaccttttcactgaatatctgttagcatctcattgggtcccatgtgcctcaaggcacatagctgggaaaacgctgcatttgtgtaatgtgacaaagcccacagagcagtagttataaaaagaatgaaaagatggtcattctaaaataatcctattcccatgatattgccatctaaacccaagtaacagcatcaagtatttcactgtaccaattcttagactcctagcagtcatcagaagtggcaggttggagtcagaaaacaaacaattgtattctctaatgccattcaggagcatttctcaagatcccttcttggactgttcctcaaattttatgcaattgtacatttttggtgccagaactatcttgccatacatttaatttccagttttgtttcagagccttgtcatttcatcaatcagagctattccatctgctgaaatgctggcaaatccagctgctttgtgacttctaatcaatttcattaatatctccacgttctgtttcaattagtggcctattctttggactgtttgataacttgatactacctactgtctgtagattaaaaatcaaattacaaattgctttgcccctgacattaaaaatccttccttctttaccagatctttcctatttagcacatttagtcctcttgagttaaattatactctaccacgctgtgaagtagggttcaattgttatacaaggattggatccatactgggaagttcatcttgacattcacttaatccttgtgcccttactcagaattgaatcttgtttcatctaagtcttttcactgttgtgaattttttcagcatattaaacacctacttgaaatattatttacttggccataatcctcaagcatttttttaaattcatcagcataatacctatattgtctactagctgcaattcttgagtttgaaaactgtttaaaaggaccagtgggacagtcatccttgttactgattatattaccatgtaacctaagcagttaggaagtagttattgaatgctcttctttaagtatattgaacatctcttcacctttttactctttatgtcataaaaatcagtctgtgcttacctattttaattgcacaaaaatgtacagatttttacttttgtaacaaaatttagaaatagcatagaattttgactgtcctttcccatgcctcatggcacaaactgacagcgtggaggtttagtagcctaaagcaatacagcaacagtgctgtgggtcatatttttaactttaatgacaatctgtaattgcctgcagcctgccttatttctggccctgctgatttcttgaggacttgtgataacacagctccaagttggccctctaatcaggcttgtgacctcttttatatgttttttctatttttttcagggttatcaggtcttacagtaaagtagtcagagtctacagttctacctccttcttcagggcattccagggaattagaatttccttccagcctgtaaactttcataactgtctgcctcttc

SEQ ID NO: 62621 - DNA, 2512 bp, Bovine  19866881347241
  misc_feature (1)..(1): n is a, c, g, or t
nctaaggaaatgcccgctagaactttcacacttctcccccaccatcctatcctaccaattcctctgctaacatactaggcggaaagatgtctcttcctattgtacctaaacaaatcagtgtacagggaagtgatttatcattcatgaaaagcaatcagattgcttggggctgacagctgttcccaaaatgcagctgagaaacagacctttggcaatgtgtaaaatttggaacaaaatcatattactgtacttcagctggcaacaaataggctgacagtgagcttaataaacaaaataccatgtggcccagaatgtattagctaatctacatttatgaataaaaaaaatgatcactttccccattttttgtaagttactttcagtcaaacaaaacactgaggaaaagtaaaaaaaacaaaaacaaaaacttaggaaaagtaaaatattctctctagaatgttttttttttttttttttttaagatttaggcaaatttttggtaaaaaaaatttttccacacaattcattatgggaaatgggccaggaaaaaaaaattgatgaaacatatatagaggttaaagagggacagagtttttactagaaaaggaagaattccagtatattctggcctccgagccataattcatttcatttcccttgtcgagaatgctttcccatatctctctgcctgtctaagatctgtcttttcaaacaaaatatagatcctcatgcaacctccaaaatgttgcaattttgagatgattctcctgaccattctgacatggggatctcgccttcctgtgaactcctggaacattgctttcagcagcctgcctccctgttctccctcctctgtgtcccctctctctctaacctcttccttccctgcccactccccattcaattacactgaagcccttgccctatccaaagtaaggtgtgttttctttgtacctccatgtttcttcaaacactgagtccttggcaaagaaatgtgcttcattcaccccttcttcctggccaaccatactcagtctttcaggccagttcaaatgtcatttcttccttcatttaataaacatttaatgagtttctacgaggactgctgccctgaactaatggctaggggttaagatatgaagaaggcacaacttccattttaaagacatccacatactcttaatattaaaaacccaaatccttaacttcttctaatatcactgagtcctgtagcccctgacagtcactagactgtcactcctcccttatatccacagactccagccacatcagcttcctctcatattctcaaacttccatattccctcccaccacaggactttacacatcccatttcctcctgtcccacattcaccttggactagatgaactcttgctctgctttacttctcagcccccatattcatttcttaggaatatcttcttcaagctttttgaaaggtccaattctcttcttaagtactcttacagcaccatgtaaatcttcaaaaccatctggcagttaacacttaatggttgtgcatttgcaccttcaatgcctgcttcttccataaggctataagcctcgtttagcacaaactttgtgtcagtttaccagtagatcttcagaacctggaatatcgtctgtacatgttaacatgtacagacaatgatatttgtagagtaagtgacccccaaaaaaatgtatatgtgcaataaaaggtccattgggcaagataacaacaaagccctttatcatgggatagaaagtgtgatgaaggggaggcaagtatggtacaggatccttgaggaaggcctgatctaatagtatccaccgatcatttttatggaaataatttcttgtcttagacagctggaactcaaattaaggcgtaaataggaaatgaagcagtagacacagcaagtgaaggctttctttcaagaagtttagttgcagggaggctagagggaagatctggaatggaaagaatgatttattttatgagagttaaaaataagtatatgctgatggaatagaattagagacatgaagagattatataattagggaatctagattcctaaagatctagaggaaatataaagtcaaacagaggtaagatgaaccatccgtagcaagaagagagacctcttttttactaggtaggagagaaggatgttaaaatgtgtaggaattcgacattcattcaaaaaatatttattgagcaagtacatgcaaaggaagtacagtatgtctgtggagggtgtggaatgggattcaaggataaagagggtaagcctttttgagaaggtgacaactaagcaaagacacaaaaaataaaagtgggtttgccatgtcaacatctgggagaagagtaattcaggtaaagaaattgggtggttcaaaggtccagaggcaggagcatgcctagtatttagaaagaagatcagaaattgatgctgttgcatactaatggtttctaagttttctttgtaaagcaaagaaagttac

SEQ ID NO: 62622 - DNA, 1411 bp, Bovine  19866881409222
  misc_feature (1)..(1): n is a, c, g, or t
ntatgcattaagtagatttaatatttcaaaatttctcttaagaattgattgctgaatttcactaatctctctcagacagaaatagggcttaagatcaggtagaaagtgactgtatctgctcagggttttctcaaattctaactcaccaacagtgctttcttttattgagtttgctttcttcttgtataaactctcaacgcccttagaatttatgtcacacaccattacttagtcatatgctatcttgtacaggacaggttcccattgtattattaaacagctcctcatggatcctgtgattatacggttgggcagcacagcaaattacatcataatatgaaactagtcactaatgaatctgttgttgttttactcaccaaatcatgtctgattctttgcgaccccaaggactgtagccctccaggtttcttgtccatggattctccaagcaagaataccagagtgggttgccatttcctttctccaggggatattcatgacccagggatcaaacccacatctgcttggtaggcagattctttaccaccgagatgcctgagaagcccactacagaactgatcacctataatttccaatcattcactccaaatccataaaaataattatttctgacaaaaggtaaaaggaaatgaaagaaaagtggtgactaatagggcctttggttttatctgtaatagtttcttgaaagaaaaagtatattcatgctgaggcagactgtcttcaaagatggctacaacaatcttcgccatgctgctcaacctgtatcacgggacttggttgctcctcccctaaagaagtgaagcctatttcctgtccccttgcaactgactgacctgctctgaccaacagaatgtgaagaaagtgacaaggacacagagttccagagcctagctttaagagatcctgcagcttttgcttccactgcttgggaacccggttctctactaaagagatcaaagggagagtccctggaggcttaaggatagaagacagagaaatcccagaattccattcatctcagttaaggagccagacatgagactgagagcatctcagattcctaggtgaatatgtctagtagagataacccattccatctgagccctgcctagccaatcccagaatcatgagtaaagaaaacacaggatggttgttttcagccactgaatttcaggctggtttcttccacagcaatagacaactgttacttgtgttattcaaaattaattttaaaaaataaataagccacctgcaaaccttttttcctgtttaacaactagcctctctccgtttcccatctcattccatgtctttaatgtttctattcatctaactgattatacagtctccaacaatgcaatgcaaaaatcagtgcaaatcaaggcaaaat

SEQ ID NO: 62623 - DNA, 1331 bp, Bovine  19866881747504
  misc_feature (1)..(1): n is a, c, g, or t
nagataatctatttctaaaaatagtaatttattctcaatcttccatcgctggaaaaacccatactgctgaccaattactgtggtcctggtgaaaagcattattatttttatactttgggggccatgcaacatggcatgtgggatcttagctccctaaacagggatcaaacctgtgccccttgcattggaagcttggagtctcaaccactggaccaccagggaagtgaaaagtcaagagacttacgtttctcatactttaggcaaggatcttaaagtatatcaggtctcagattatagaagaaactcaaaaaaggcaaaactttacattataaaatgaatatataaagcatcaaaagactgcttagagacggtattaccaacaggaagcaaatgtttaaactaacaaaggtcaggaaaaatatttactatctttatagaaatatgagaaaacaaggcttaatgacggaggaaagggttcattttagaacatgttttttctttatcgtaagtttaaatttcacatgacattgcaaacataggccaaatattatgaattagaatatactcacagcatttagaaatactgtgttaggatctacataagtgattctgaaataacatttgctctttcaatagcattatttaggcaataagaaaatgtgcatgtgctagggaaaattcatgttcactgtagatgaaaaaagcctgaaagaatacatttgttgaaatttgcatttggtttggaaaacttctgtttaacaattgaacacagccatattttaacttttaagctcccacatggagagagtgtcaaggcactgcagcaatttacttttacagacattatgcggggttttgaaattcacaaaataagatatttcttcctgaattattttatgatcaatgtactgtctctacacaaggaaagttaaagctgtctgacaactcatagaaacattactggctcttaaagatgtaggaaattacatcaaagcatgaaaagcactgggtaatttttgcagtttcatctctaaacacaattgtaaagacatctgtcttttcagttctttctccgtctttcttctgaagcatggccttttaattcttgcccttgtaaatattttttgtctactgtagctttgcttcttaatatcctggttgatcttaccaggctaaaaagtatttacagggggatgttgcttttatctgtattcacagagaatgctaacaaattagaagaaagtgccagagaacaccacataccgtgcccagaacactacaatggcttctgcatgcacgggaaatgtgaacattctatcaatatgcaggag

SEQ ID NO: 62624 - DNA, 1110 bp, Bovine  19866880407034
  misc_feature (1)..(1): n is a, c, g, or t
ntctgcctttactttggaaaacatgtttatcaactcagcctgaatcattgctgtctttatgttaaatcggcaatccagggctacgtagttattttccactgccactgcaggctttctctccttttcacatctgaatctcagcccactcctgctgaatagaatgcctggcctccttccagacttcccaaatctgattatggagtcctctgaggacaggtctgactggtctacactacctggagggtcaacttcagctggagacagccctgctgctctgttctaattggtgtgttatggagatgtgtctccctgaggcatcagcagacaagagttggagaacaaggtgtcctgaaatgatgcagggcccaacagagttagtcttgagttccattcatttttgaccactgacgatgcacaagacatttcgaatataaagcttcatgttgacttttataattctttaaaagcaatgtctgtccttgtacgttacagtggttaaagatgttggttaatgaatcagacagaattggattcagattctagctgtgtgtccttgggcagcttaattggtgtccttaaatcacagtttcttcatctcaaaattttggccagtcttagtatctaccctctagggtggtaggattttaaggattaaatggaatttggtagataaaaagtagaacatagaaccaggtggggacatattattaaaggtattatattcattgtttccataataattcaatgttcttttaacctgtcactaccatgatttatttctttttattatttagtgattccttagcttaactctccttaggctaattcttgatatcatatcttaacaatctaatcatccaaaaggaataaagataaaaatttgctaagatctgaggaaagatggcgatttttttattactttaatattactttgaaaacttaaatattaacttatttgaaattgattgaactcaaggcctacttacaacctagttgggggtgtttgctttcatttgtctgtcctttgctattatgtatgatttctaaaaatatgaataaacttaaaatcaggtatttgggcactaaatcatagaatatttactaatatgc

SEQ ID NO: 62625 - DNA, 1263 bp, Bovine  19866880410362
  misc_feature (1)..(1): n is a, c, g, or t
nctaccaggctcctccgtccctgggattctccaggcaagaacactggagtgggttgccatttccttctccaaggcatgaaagtgaaaagtgaaagtgaagtcgctcagtcgtgtccgactcctagcgaccccctggactgcagcccaccaggctcctctgtccttgggattttccaggcaagagtactggagtggggtgccattgccttctccaaaacttgcattacttcctgaatttatagtgtctcatttttttttttctgataaaaaaggagaaaatatataaattcttactatattaaaattttctgtcttttaaaaatgtgacaagggttcaactaattttgtatcaaatttcagtaagtttattcattcagtttcaagataccaaacagctgtgtactacattgtctgcagaaatactccctaatacacagttcactgaaggtgactctgaagagcaaaagcaattcttcccagattctctatacagttgtagtagaaagccttctaaggttaaaaatccagagattagcaacatattagctttcaggtgggcctctcctaaacactcacaattcacttattctcctgcaaatcattattccaaagatttgattcacttgtagccccacttgagtcttaaatagcatttcaaagcacttctatcattcatccattttcagaactgccatttagaagtgatgggaatttggcaccaaaatcaatgagaggatatgatatgagctctttccaattttttctctttgaacaccatctcaagtacagtctgtgaaatctgttttttaaagttatttttccatcttgatatcatttcaactaaattgagttctcgagcttgagatatgtattcacatagtttttcagagaaagaaattcattgttactattgttaatttatacctaaagttgttttaaaactttaattaaatgtttttactgctgatgtttctcatcagctttttactcttaaaaatatatgcctagattcaccactgtcatctcaaaatagttgcactagttacatctgtttattactgttatttagtcgctaaatcatgatcgactatttgtggctccatggactgtagcctaccaggctcctctgtccatgggatttcccaggcaagaatcctggatggccctttctttctccacgtgtttgttattaatacctactaatatatgtatacactgaatgtgttgattttctttcccctagtcagtctagattttatgtca

SEQ ID NO: 62626 - DNA, 781 bp, Bovine  19866880663570
  misc_feature (1)..(1): n is a, c, g, or t
natttatgcatctaatacctattatggagataaaccagtaaaaatgacttagaaaataaccctcctgatacaactgttctcaccttcctcttcattctctctttagaaatgaacttaagtttacttcaatgaaagagtcaatttatcagttaatcttgtaattatttttgctttgataattccttccattgctcttcattttcattagcatgtgtggttgtattttcacttatagtcttcctttttgaaagttaatgaggtctactaagacgcatattgtctcagcaatagccaaatggctggaatgcagcagcaggggaaaaattcattaaggaagagaaatttaaaaggacggctgcttctttaatgccgtagccattaagatggcagcttcctgccaccacagtagcacgtttcattgactttcctccttctcaatttcgtgtttcctggtgatgaattgagatgtaattcccacctgctatcgaaagcatatgtaagggttttcacattatttgtttctctaatagtaaagtactgctgcctaaacaagagaggcttctaaagtttgaaaccatttcatagatttccaagaataagactgatttttattcagatgttctagtggaaaatttaacaaaactcatattgaaatattttctcctaatgtgctcattatacattaaaaaaaaagatggttaaaatgcacatttcctgtttgaagttttttcatagagccctttaagccagaaatcaaggctccctattatttctacttcat

SEQ ID NO: 62627 - DNA, 1828 bp, Bovine  19866880673420
  misc_feature (1)..(1): n is a, c, g, or t
ngctttgatggaaagcaggaatagaagtcaaatacatatttcataattcctttgattaaaaatgataaaggtaatattagtgtgttttcgtcttcatctctaatttataagttagaaataattctaccatggaaaagctaactgaaaaaggaaatgagattgattcaagatcatatcattgtttcatttattcttacaccttgattatgacagaatacctgatatccaggatttaataaaaatagatgcatggaatcacaatcatagagttttagggtatggaagagatctttgaaatcagttatttcaacaccctaatgtttcaggtggacaaaaaatagtctctagaaggaaaagtggcctaaccaaggttatacctcaaaagcatttaagataaacatttttcacttcatttttatttttctatttattgaatatttatttggaaggtcaagataaatgacaattattttacccattgtcataaatgactaataactcttataagatctttaaagattcacttcctaagattaaaagtctcatagttttcttcacgatcatattctgcttaacattaattagatattaaattgacctcaagtacccatcttggtccctgatctcattttgacaattctagatagactgtcaacttggaggttttcaaaacttgcagaattactatttcttcacttttcttaaatatttccttctagctatccaaattatatctctgtcaaccccagagcaaatcatatttatacataagatgaggcaataggcagacagtaaagatggaaaaaatagacaaataggtaatatgaactgtaaatttttcttttagtacaaaggtcagagctgatatgaaaagagattatgaggcatattagatagagtgcagtctcaatttacaaaaataaaaactatctcatgtacttaggatacaattaccctactcgccttggagtcatccagtgaaatgcctttaatctcttccttgattcccttccagccacacccttcacaactcttatgttctcagaatagccagtgtacacttatcttctgattctcaatgcatttgtttatttacaagtctgtgctgggattttttgttattgctattgtttctgtttttaatcctcatttgactatgagcaacttgagaacagagtctggaatatgcatacatatttagtaaagagaaatgaatacctacaagagaaaatgagcacatgagtaagtgaataaatgaatgttactacatgctattctgttacactgtttctagagtgtttgaatatgaacaaaccaaattacagtatttttagatctcagcagagtacagaatacttccaacaaaacacgtgataaaatttattttttgctttctatttttcagttatttacagttccaggccaaagtattcattttctttctgtcagaacttttaccaatttatttatgagtaccaatctttccatgaaagtgaaactttaacagttttatccattagtgggaaaaattgagcttaaaggtcaaagataaagaaaactagcttcattagcccaatcaagatataacacatccaatatattctgaatctacagttacccctaaagtgcaaagactatgtaaattacccattgtggtatgcttcaagcccaaagaattacacacctacacatgtaacccgaaaagaatattagtaccagaagaaacttaagaatttactgagaaccctgaaattcaaagaagctaaacaacttgctacattgacctaagtgacacataagtatgatacagaatgcagattctcaactc

SEQ ID NO: 62628 - DNA, 1810 bp, Bovine  19866880860977
  misc_feature (1)..(1): n is a, c, g, or t
nccatgcactcctccagaggatcttcccaacccagggactgaacccatgtctcctacattggcaggtgggtactttactattagcaccacctgggaagctctgtgctatacctatctcacttcaaattataaaaacacatggttggtcatagtatctcattacaaataattagaaaactcaaaatagggggttccagtgggaggagcaagggcttctcaggtggctcattggtaaagaattcacctgccaatgcagaagacataggagatgtgggtgcaatccctggttgggaagatcccctggaggagggcatggcaacccactccactacttttgcttgtccatggggtcacaatgagtcctacatgactgagtgactggctattcattcaatgggaggagcaaagagaatatctgggaaggaagcttggaaccagatggtgaggggacttacacaattttccatttatccaaaagtgctttatttcatttggtttagttttatgttaccccttacactttattcctttataaaggagtactaatcaagtataagatctacaaattatcctttattattggttgataaaatccctattcccaaaccaaatatccaccaccaccatgctttgggatcattaacctcatgggactatagcattcagcttttactcagctcttcaaataaggctgcatttgaaatctataaggaaaacagacaaagagaagaaggaaaggtgaagatgggaactagccctcagtggccttcaagcatgtttgtagtaggacgctttatttgcggggcaaagagaaacaaagctagagctggagaaaacaccgcttcttttcatgtaagagccaagcttcatggaccttacctgataagtttttgtaatccactaagtcaaacataacaacggccacagctgaccatgtgatgatgagagcgatgaccagaagccaggctgctggggagctgaatgtcgtcactaggtcctctgtgactgtcctcttcagcacttttccagaggccttgggcacagatccattcttgctgtctatcacagtcgtggttgtagatgcatttcctaatcaaacatttgagaaaggagaattacggtttaggatttcacatcaaatattgatgacaaaaaaaccctcacaaatcacagacttatataagtacatatagctcttttaccgcactttctacggcagagtacacctccttagtggtagggccaaactccctgtccattaccgcatttttacttcctcagcatttaccctgcactctgatacccataggccctcataatcggcattcctagtctcctaagttccataaatactgccacccaggccataaaccttggcatcgccttcaatcatttttacatctcccttaccaccgcctttattcactaccatcaagggcaatggcttttctggtcaagttgctttttaatacctttttcacttatttaggttcatacgtcaggtctaaatgcaagcaaaacatctcctctgggagagaaacaaaatcagggataaaatagttcaaatggatgaaattccttttggatatcctggtttaacagcgtaacctgaccctctatttgatgtcattcatttttatttgtgaaaggggcacagaaaatctaagagattaatgttggaaaaatcttattatatccaaaacctttttatatttgcttttaaaagtctacacatttatgactgaaaattcaaaactataaaaaatagcaaaatacataaatagataattatttagactctttattaagt

SEQ ID NO: 62629 - DNA, 2167 bp, Bovine  19866880911145
  misc_feature (1)..(1): n is a, c, g, or t
ntataaagtagcagacagcagagagtagaagaaggacatcctaaaagctaaaaagaaattttcaatattagctttataacatgccactaaatactaattgattttctatttcataatctgcaaccaggtaaatgtcattcactggaagacgcaccattcctatgtcaattccacatgatggcccctccacaaaaaaagagtaacaaaaatccaaattaagtctaaagaagtaattcaaaacagtgattccacatcttaggcatgaaaatacatattgattgactggctttccaacagttgtcggaccacatgaagatattgctaatcatcccccaaattcaccaggttaaacgtaataaggaagcaaacatttagctaattaacaactatacacagaaaaagaaagggaaacaaaaacctaaatagctaataattaaagtccagatttcgttctgatgagcaagataaaaatctcagctcatcatccacttaacgtttagacatagtgagggctttgccaagtaccacaaaattcccttcattgaaaggcccacatcttctagcttttcttctatgatcctttatcttgttagtgtttcagtgtttgtgcttaaaaactgttttttaattattattattatttaagtaagacatcctgttactctactagagataagccaaacacgggagactgagaaacttggcaatctgtaaatcattacctgaaggccttcgatagccaagcgcagcatgcttggtgtcagtttagaagcttgcttgaagggtgaagttactccagtctatgatcaaaacaaatccattcacctgaagctcaggatcttcaatcatggcttctaaagaaagtaagatggcacgcaaaatatccaccagcgtgtacctatcagcaacagaaaagtactgcattaaatctgacatttgtagaatgtagaatgaccatttgtagaaactatggaatgtctttagcatactaaaaattgcctttaaaatacctcagaaagcttaaggaaaatattttgtttacaaatcttctaagatgaaatttactttattcactatactcaggggacatattagaacttaacatgcattctaccaaaacaaattccaatgcttttgaaaattctacagtttgtttcatattttataatcatttcctttctttgcaggccttcttataaccttacaaaatctcattttcagcaaatgtactattccctaaaaactaggcatggtacttttaaatagttcaggaatgcttttaaaagtactgacatttcatatcttcacatgtggaaaatttgagaatgagatttgaaggagtttcatcaataaacaacaccatgtgtaaacagttgtggttgaaagtgtcaaccaattttaattacttggactgagtttatatcataaagataaaagaaaagaaaaaaggaaaggtgggatgggtagaaagaaaggaaaatcagtaaaatcaatgaaaataaaagggaaaatgtatctgcctattattacacaagccacccacattcaggagttgagtctttatctttttctaccttgcagcttagcacagtccctgacacactgtaaaaatccaataaatgctcttcctttcttgtaaaacagagctcgagtgcaaagacactaattgtacacgacggcattgtctcaacaaaggcagtggaagtaagaagaaaagaagccaaatttgacaagtatgtttgaagtaaacttgtgaaaatttaatacttaattagatgtgggggctaagattgagggaaaagtaagagatgacacagattctagtttcagatccttgcctttgacagtaccagtaagctatctaaagtaaatggtacttcaggttttaccatttatcaaatggtaaaatctttcatcaaaatcaataatgcaaaaaaaaggatgctgttaaggatggctggaaatgtagaatttggaatagaatagcttgtatttgagaaacgggtagtatacccaggaagatatatcaagtaaacatctgagaaagtaaatttcaaactcaggagaaagctcaaaattgaacattccagaaccaaaagcatatcaatcccatgttcacagaagtgaaggaggtaatgcaatcagagccgagaggaaaacgaggtaa

SEQ ID NO: 62630 - DNA, 1711 bp, Bovine  19866880944555
  misc_feature (1)..(1): n is a, c, g, or t
nggttcccagacagacagtctttgcaacagccagcattctgtcaaccaaccacagacttctcgcagctggccaggaaagagaatgataattgcagcttgcagtatgtggaatatggggcgggggaagctagttaaatccacatgagtctaagggcttaggaagtagaatagagcaaagcgtgggtagaaagaagctaaaggagacaacaagggattattctgatttcatcacccatgatgtcagctgactttaatcactgagctttttcactgatgaaaatggtttggagaaatcttgaatttagttcttctttcctctttatcttatccagaattgttttctattttgttttagcctcaaagagggtcagtaacacaaccctcacccctgcaccctcgccaaggttgtgagagtttagggttaggggttggacaggctgcagagaaggaaggcagtaatgctgggcctgcatgaaggaggaacggcagagccagtactcaaagcgggagagaccatcagaatcaggctaccttccagctgagccttctcgttcacaggcactgttctgacatttattttattgatgccaaatggttgtgagtgaaaatatcattgtagctggacattctagatcttctataaaaggctcatgaatgtcaaactatacaactgcttcatggaaagataaaaatattgttttgctatggtaaatcccccaagtgaactgaaaatattcgacacttctgttttttactaaaaagtggaattattttatttacttacttttatttaaaatttttattttgagatcattgaagagttacatgaagttgtaagaaatgatgcagagagagcccatgtatctatcacctagtgttcaccaatggtaacatctttgagaaatgactgatactataatatcccaaccaggagattgacatcaatataatccacctgtctttaataattatttaagaaataagagattttgagtattatgtgatacagccacaaattgttacaagtaggtgaacaattgggaaagcactgctatataaatcaaaaacatgcttagatgactttatggattttgcaaccatatctgaaagtattaagacaacttatttatttcttatttcatacaacctgatttatgaaggattataatttgttatccctcatctgttgcagtagccgcagcatctaaacagtgcttaaaacatagtaggctcttgatattttttcaatgattcacatatattaatataacaggaagtgtttgctattatagaggtcatttttgtaacttccttcagaaatacatttaagaaggattgttgaacccagagaacattattgacattatttcctcagataaatgtctattttttatttcaaaagcattatgtgaagcaaactttggttatacttatttaaaaaattccttcctttagtctgtgcagcaatgacttttatgcatatgtgaattcaagatgtattgctttaccatctgaagaaaaaatgtctaatttggatgtgctggaataataagaaaataggacattgaattttataactgcatatgaatattgattgcattataaaatcaacgatcccaaagattgaatattaacagcctgccacatagcgagaaaagttaaaaggaaatttgaatcttagaagtgagtttctaagcaattgaattgctga

SEQ ID NO: 62631 - DNA, 930 bp, Bovine  19866880951798
  misc_feature (1)..(1): n is a, c, g, or t
nggactttgctgaagatgattaaaaagccgaaagagtaattcaatttacttcctgagttaatgtgtcataagttaaattgctactgtaaacataataaaggtcacagtggcatgacatttattcatttatttatttagactgtaccacgtgacatgcaggatcttagttccctgaccagggatcaaatctgtgctcccagcagtggaagtgtggaatcctaactctgccaggaattccctggcatgacttttattgttgatagaagaatgtagttaaaaaacaaaagtgtttatatcactgagagacaaaggatggcaaaagtatagctgttttccccagtgatgcatcatcaaataagttaaagattgttattcatttcattagcactggtaactaattacctaaaaaacaagtaagatatctcatggcaaacttaatggttaaaatgtgttccttccactttgatgacatttatatatttttttgttttgagcaataaaacctatttaactccatagaatgatcctattaaagtgaaatgaaaatcctcttgcatctgtcgcccaaatttggtgactgatctaaaatttcacccaggtgacattttactagggcacagtctggagaaatctggctagtctacatctcatttgcttgtatttaaacaaatgattcaccagacttgcctaattggatggcgtatttccactggagtgaatttcctaattgtaattcaagacaaatcttagggataagattcatcaagcctttccgctcaatcttatcatgtctaaagttcagaggtattttgagctctaaaagagcattacaaggaacttaaagcattctttggtgaaactgttacccatttttggagaagagtcacaagtaaaatagatatatatatacagaaataaaattaaactatg

SEQ ID NO: 62632 - DNA, 1750 bp, Bovine  19866881089170
  misc_feature (1)..(1): n is a, c, g, or t
natgttacaggtgtagagagttaaaaaagtgaccaatggtctcagaaaagcgtgagcatttgcccactgtcacagtagtaaatgtatccaaagttgtgtcagaattgtgaccttggctcttgaatgatatgtatttgtgaaacagaggcttagatgaagatatgagtgaatatttgtcaaatgttctctggatcagtatgaaaatgaattgacaagatccaaagatagatttggtgaggacagttaagaagtcatattagtgattcaggagataaagtgaaatatatggaccctaaatagaatgtatttacctcctagaacttattgcatgcattttgaatgcaatataaaatatatacagtttgtattatctttactttaatttttggagtacttttgaagttctattattatcacagttttagtaacttgattattggcttgttttattgtgcatgcttatgtaacattaacatttatacaattttaagatcatcgaaggttcattcttgaatgctatcaatccttactttacaaatatccaattaaatcttatgaaacatagatcccacagttccccacctacttcactgttggtgcaagatgatggggagaaaataatattgcttgtggagaatctccaaattcaggctgagggaaggaaaggacaggtaaagcagaacagctcagggggtaataagcctgggggtgattagtaagaaccagcacttgggcagtgatctattctatttccacataatcctaactccattcaaactatcctactctaaacagctttatttgaaattctacttctgatgaaagaaaaatatctcctaaaatttactttaattcaaatatttttcaaaggtctgagaagaatattaagtacatgttgtgattccagttgtcatgtcctagatttagttgagattcatctgtgagagttctaactgaacctaaaatgagagggtagtccaggaaaatgaaaatacaaagcgtgatactttctggaataaagcaagtctaggttaaattggagaaggaaatggcaacccactccagtgtttttgcctgtagaattccagggacggaggagcctggtgggcttccgtctatggggtcgcacagagtcacacgactgaagtgacttagcagcagcagcagcaggttaaattttcaataagaaacgaatgaccagcaccaaattgcttctgtcctgccaagaagggacctagaagaagtcagagaggtaaaaaggaagctcataaaatgccaagacaaatatcatctgctttaaaatatctccaaagaatgactcaagcttcagcaaagaaagaaaaatccttctacaattattctcctttttgtcatattctatcctcttcttataccaagagggctagcatcttcaaagtatcttacaggatgccctgagaatgaacctgatcttgtttataacatgtttccatggcaatatgctttctgtgttccaagtgacatgcaaatgactttgggagcatgcttcccatacaaactgaggattacctccaaatatatagatgagaaatgcttgctacacaaacaatctacagattgtgagttaattcttatttctctctctagaaaaagctgaacatcaaggaaaagaatctccatctatcaaaacaggtgattttgcctttttggtttgcattctatcccaattcactgtttttattacctttgaaaattaaagcaaagcacataa

SEQ ID NO: 62633 - DNA, 770 bp, Bovine  19866881142048
  misc_feature (1)..(1): n is a, c, g, or t
nattctattataatacagctgtgttaacgtaatagtatttgctttcatgattcacaagatccttccaaaatattcagtgttttactgatgccagtattgatatcatttataatactggtaatgttgacttggggctccccagatggtgcagtggtaaagaatctgcctgccaatgcaagagatacaagagacatgggttcaatcccttggtcagaaagatcccctggagtaggaaatggcaacccactccaatattcttgcctggagaatcccatggacagaggagcctggtgggctacagtccatggggtcacaaagagtcagacagaactgaccatgagcatgaatgttgagtcactattgagatactttaaaatatcatatctaattgtacatattatatttcactgaaaattaattatgaatttcaacttgttataatttcttaaaatagaaatcatccaattctatagtagcttaatacttttaaaactgtaattcaatttttaaaatatataatacttagcatggttcaacaataaagcaaccagagattcactgcaaaaataagcttccctcctccccttcttttcctgttttaccagctcccatttcccaaatatccaataatgtctgataggtaatcattgttattttttaatgtgtccatctagcaatatatgtaaaagacatatacatataaacatgtgcttagtcactcagtcatgcccaactactctgcgaccccatggactgcatcccaccaggct

SEQ ID NO: 62634 - DNA, 856 bp, Bovine  19866881168009
  misc_feature (1)..(1): n is a, c, g, or t
ncaatttatactagatataaactggcacattgtgattaatttaaaatatttaattatttttctaactttgaacatttaaaacgattgtaaaatcagtaatttccacttaacattgtaacacagttcctagttcaagcctcaatatagaataacaaagtccagtatcttaaaaacaaagaaagcctaaaggagattgggggctggttactatatatatgataaaacaatatatatttcatgtgtgattaatcatcactgataaggagaaatgaaactacctgacaaatgaaaagagtctcctttgaaagttatttgtcacttgtcagactggtccctacctgagtttcaaaatgtttatgatggctttggaaggaacacttgtttctgttcattttctatagctggaaggaaatctaatatgtagagtcatatttaaattaatgattgaggtatgagatctaattaactagaggcaaagtaaataatgccaatattccattttcataaacaggttatttacctccttgcatttcattctgagcctagcaatcagttctaattaatcccaaccaaaatgtttggccttactctaaactcagagatcattcttggttgaatatttcagtgaattcacttaattaagattcaatgttaattcagtatgtctgtttactcgaatgggacttgactaactccatattatgtgtgctcatatttctaccctaaatatctaggctccaagtgattcagaatctgtgtatgggtcagctactagttttcgaatctttccttttaactctgtctccagactgtcttgacaatcaaagatttcttgacgctcaatatgtgaaatcta

SEQ ID NO: 62635 - DNA, 1124 bp, Bovine  19866881201268
  misc_feature (1)..(1): n is a, c, g, or t
ntgaatgataacgtttgaagtgtgtgtgtatgcatgtgcttgctgtggatccctttcttcaaatgaaatcttacacagaagtccaaaaaattggttagaccatcagtctcacgacagtggagaagggcactgtccccacgccaccccacttgccctgaggcactcaacaagaaccttaaaatacagtttgaaaagccactggattgggtgacttctaaggggccagctagactctgtgaatctggagcagaactctgagttgaggttaccttgaatgactttatctttgactcaaaactcctagacatccaaatacaggagcatgaaaggcttcaaaatcccaccaagtatctactttagaaaaatataaaatctggagttgtatgaagcgtccccaccctggcccagcccacttcccaggtaccctcagcttacctcttcatggacttgggggacagttccttctctacctccttgacaggcatgctgtaggagtccacactgtactcgctgtcatcatcatactcgtggtccagcagtgttcttgcccaggttcccatgtcgtaaggggggagcattcctccaaactcagagggcagaatctcagggtgaattagttggtgcaggctgttcaggttgttaccatgcaaaaatatctacagacaagaagagggtggggaaaacccacagaggagaatgaatgccatgtggacaccaggggttggggtagggtaggaggaggaactgaggatagaaagagccagaacaagagttttccatgtctgttagcatatttaagcctctcttctactctgtgaaacaggcaggctggtatcataatcttaatatttcatataaaaatcctgagggtcagggactttaagtagcttctagaaggtcagatcgtttttaaagaattggaactgaaaatttagtgtcctgcttcatagctgggaacatgagcagaatctaatgtgcctacttcgatctgcacattatcctggtgttagttgtgcaaagctgatgatgtgcataatgaacgctattaaaacagacttttctcatgagggactcatcaactgctgagcccattcaagttactgaaccccaaagctgtcaccagt

SEQ ID NO: 62636 - DNA, 956 bp, Bovine  19866881330847
  misc_feature (1)..(1): n is a, c, g, or t
ngcctatccttgaggtgatttttttcaatcttttggaaataatatgttttccagttcttcatgtgctgaaggcctagcctatgcttcttgccagcgaaactggaatcacaataatcaagggctaagttaccattctgtgttaagcaatatgctggcggtaactaattttttctgtgaagaacactttacatgctgctggcaatagggcagaattaggactgattctacctgatatacacatttccaagtgttgccctctctccaactcatattaagtatctctatggagttaaaaaggaaatgttgttcaagataaggtagcagcaaggctgactcaccacgagcaagtcaagaagcctgcatcaggaaaaacatattcatataaaaaaatcagttttttattcactccagaggcaaaacccaaactgtgaattcaatttggttaggacgccctgctgcttggaaaagtgaccctattttagggggtcatcatccatcactttaggtgcctttagacacagtcagaaattattatgaagaatgaaggaggagaaggggatgacagaggatgagatggctagatggcatcaccgactcaatggacatgagtttaagtaaactccaggagttggtgatggacagggaggccctggtgtgctgcagttcatggggttgcaaagagttggacacgactgagcaactgaattgaactgaactgaaagctctagataattttagttatttgacttaaagagaactaacatcctggcctaatgaatgacaaagataaaattagttattttatggatattttcattggtaaaagttacaaaaatttaactgcttcaaaattctaaatgcacgttgaacacactaagaataattactgaataacatcacttaagaattaatttgcaaatctttttaagaatttaaattttatttccataaatatt

SEQ ID NO: 62637 - DNA, 717 bp, Bovine  19866881352855
  misc_feature (1)..(1): n is a, c, g, or t
naagtggaccaaaggaaatatatttcactacaatgaacatatttttatttaaaacttttttcttttgtagaatatcatagaaacaatgagtttttaatcagcatgtattaatttataaaacatttgtaatacatattctgcttttaaaagcatatttttatattattatgtggggagagattctatgagcttatctctaccttatggattattttataaatttcacattttaaaattttgttttaagaattttttaattgtttttctataatctggaattatattctctaaaaatatttgattttcacctgtctaaatgagtattaatcttttcattagtactctttcccattcagataaattgaataatatttagccattttatactacctaaattatcaggttgtggcattatttatttaactgtgtctatgtgaaacattttgtttatatgtgctaaaaatgttggtttcatttgtccagttctagctatttttaccaaaatgaaaattcaaccaccttgttatttatgagtggggtttgcatttctaatttgataaggaataattgtccagtcacataatctcaggtttataggattgattattaaacaggttcttaatatggatgatgctttagaatctgctcctctgtggtttatgttgttatatagtgaactctgggagttggtgagggatagggaggcctggcgtgctg

SEQ ID NO: 62638 - DNA, 1038 bp, Bovine  19866881362721
  misc_feature (1)..(1): n is a, c, g, or t
naaggccctgcaaagattttgagagaagggaaatgcatcattaaaagcattataggctgaggagcagctggggggaaaaatagagatgaaaatgtacataatgtacataatgggtattagaaagtagattaatttaattgtatcttagcattcatgaaaaagtaaagtaggaaataaggttgcaaaagttaattgactcctaatagtaaaaggtcataaatgctacactagagtttgaatgttttttctgtgggtgatcagtcaagtgtttgaattgacaggaaaaaaaatgtattttaatagaaaagtctagcgggcctgtcataaaggatggattaaacagagacaaacattgtaatatttgcaacatgctgttggttaacttaagcagatcatcaacctgcttgtagtaaacactgatcatggaattcaaaggtagcaaggaacttgtgtatgaaaacacagattgatgaggcagtttttgctaaaagcaccatgagaatagttctcatacgtcatcttacatggagaatgctgttggacctgaagaagcatcaccctccttagtgaaatgctcataacctctgcacacgggacctttaccgagccacacagagagccgagtcaaagccctgtgccagctctgcagccctgactggaaaaaagacaggaagttaagagtttatcaccgttacactgttgccttttgctatcctaacatctcgttttatgtcatttttttccttgcttctttgaaataggcttttaaataggctgttaataaaagtgtgtaaatttaggtcttttcttgttcagttctatctgtgcttgatctttgatctcatctcttgtcttatggggctattataagagacagataagagactggattcttgaaatcttggtgtcaagtttaatctgcagtggagtcctaggtatccaaaatccttatctcctgttctgtttaaatgttctcagggctatgggagtgagcagcaggaatgagtcatgtgaaatcaagctttatgccacttaaaa

SEQ ID NO: 62639 - DNA, 1360 bp, Bovine  19866881410125
  misc_feature (1)..(1): n is a, c, g, or t
naaacttctgtcggagtcaggtcagataagccctgaagatgtatggtgaaggaaggaaaaggattcaggcagaaggcaggaaaagggctggttgacaccctggtactgtcagaaaggcagctgtcctgctggtttcagagcagggcagagacagtccttatgcacatgtccccatgataaagcttcacagaagatacgaggatggagctgtttatgccctgctgctgctaagtcacttcagtcatgtccaactctctgtgaccctttgtatgtagccctccaggctcctctgtccatgggattctccaggcaacaatactggagtggattgccatgccttcctccaggggatcttcctgaccaagggatcgaacccatgtcttttgtgtcttctgcattggcaggcaggttatttaccacgagctccatatgtatacttagatctgggatgggggtggcaggaggcaaagagaagcaagggggagcttttttaaaagaatctaggaggaggaaactcaactgaattttagacaagctctaaataccatgtatacattttgaccttgaagtactattattagttggtcataccctattcatttaaaccttagaaatagaattcacaattattagtctatagatcctgtaaggtatttttacaggacatagcttttcattttaatgtcccatatacattaatgttacatatgttgatttaaagaaataattctatatatcaattaataagtcccctcccattgtagatttctagggagatattttgattactagcaacttatactttatatgaaagcatgagatagacaactaaaacatagtttctttagtaaatccagaataatcaccttctcatataggtgagaactacaagtgattttcaacttaattaggtttataaatcaatgtgaatattagatcacttataaaaataaaggaaaataggtctaatgtagatttatgtctctaagggctatctgcctccctaaggatatctttaacagactctgacacatatttaaacataccatttccacagctcccactccatggtagctcaataaactaagttcctgcctaactgacatatgaaatattagattctttcttgaataaattttttcgactttgatctacacaataactggtttgcataaatcttcaatgtactccttagatgaaataaaaactttttaaagagaaattgtggtcaaagatggcatttcatgagactttcaactttgctacctgataaaaagcagagtaaaatctctataaataaccaaagtaacaaacagaaagagaacttcatttcacctcaacagccaaatccttcaatgag

SEQ ID NO: 62640 - DNA, 1686 bp, Bovine  19866881587167
  misc_feature (1)..(1): n is a, c, g, or t
nctttgaaaattattctatatgttataaaaaatagtctaggaaccttgtgccagcaaataaaagcaatactattgctttaacatacttggcaatagttttcttattaatttcaaattttcccattttatgttcatcatagatccccaggtggctcaggggtaaaaaatccgcctgccaatgcaggagacacaagctcgatcccttggttggaaagatctcctggagaaggtgggagatggcaacgccctgcagttttcttgcctgggaagtcccataaacagaggagcctggcaggctccagggttgcagaagggtcggacaggacttagtcacctagcaaacaatgacagtagatgcacaaatgctttaaatactattgacagaatgcattgggataggtgtttgtaattaatcacagtttatactttctcaagatgtaaatgaattttaactcagtggtcatttacaagagtgacactccctctgtcatgagatctatcacttcattgtttgcggcgcaggaggcctttcaaagtctgtagtctcctggatgtactgggtacccccttgaaaatgcaatgggggcccaagggaaaaaaaaaataactatcagcattagagtaaaaaatatcctcaatatttgtttcaagatttaggaggtagactttagttatctagagatggtttagaactaggaaatctcctttgattaaaaaactaggtaaatcaagcttcagtattgtgatttgctttttccttcacattacctgaattctgctcatagcctccttcttgatttgagattctgagtaattcattatttctagtaaagtaaagaaaacatcagtaacttagatcattaggaggaatgcatactatatgtcatcctcagtggaattagactaaaccgaaagcaatcatattgacttgagtgagaaaaaactcagaacaataaaatattggcagcttacaaacatgagattcaggtattatggaaataagccagtcaaaatcactcacggaacaaaaataaagccaattcactgtgtttgaatgtcagagggattttcaggtaatagcttgtaaaatgaagggcacctttagagatccaatgtaaatttcaacaacgtaaattcttcctttagagagtaacaatcctcacaaattccaaagaaatatattcctaataaaatgataagcctctttcctgtaaatgagttctgctatttctgtcatgtttaattttatctgttattatgtctttgttgtcttacttcaaaagtctgtttcaagtcctcttgtgtaattaggtgggatataaattgtaaatatattgtatgagaaagaatattttgagtatttactatgtgttagatgtttcatttcttaatcctcacaacagctgacaaaaactctcctcattttagaaaggccatgaagcttggatacttcatgacattttcaaattcacacagattataggcagtggagctgaaactcccatatttatttgattccaatcatgtaggctttataataaacagcttgctttcattataaaattatattactatatccataaattattatatagatataattttatattcattcatatagaaaaaatagtgtgtaatttcagtagcattttctgacattattgaacataaaagaggccttttctg

SEQ ID NO: 62641 - DNA, 1118 bp, Bovine  19866881596912
  misc_feature (1)..(1): n is a, c, g, or t
ntgagaattgtcctgacttactagaatgatatttaaggtactctttgtatcagtaagagtgtcatcttaataatctgtcaacacagatccagctggacagtttcaagactttcttctactacataatcctctctagtaagccagaagataaacagtttgggaaaagcacttgaatgtttgtaactgtagcctaaaaggaagtgaaccaatggatatctaaggaaggcactttcaaaggatgatttaactgaactggaaaagaaatcctagaaaaccaatttataacatacagtcaaatgtcaaaaacaattgctttcaagaatctaaaatatttcactggtatattatgtggtctatttccacttaaaaatgcccacttatagttggaacacatagggatttttttaactccacaagttttacttttcttccacttgttttcagtggtggcctttttgcacatttaatgtgtgctgaacacttggggctataagcagggcaaatatatgtatgacttccatgcgctttttgtacaaaatttacttcaaactttcatgaagtttagctaattatgttccattagaacaaacctaggtcctattaactgattgttaacagatatgacacaataacaggattctcaatattttggagaataaaaatgaaagagattcaagtttgagcagttggtatgaaaatatgttacaactgaaattatatgcctcaaagtaatagcaatgaagcagaactgaaattgttcttatctactaatgagacatcatcaacaggatgacatttagtcgcaagcatattcactgccgcggacaagcctggatatgctgcctttatttacagagtgacaagtctgggaaattcagcacaatgttagttttctacatgtttttctcttgaagtatcttccatttgacagactctttagtattgtatttggggggactcatctggggtctagtgttgcttataaaaaactgctgcccagggagtgagcattcagttggtgattgtgttaaatatagctgaggttcatatacatccatccagaccttcacacacacacacacacacatgactcttaaaccatttatggaacctttttc

SEQ ID NO: 62642 - DNA, 1041 bp, Bovine  19866881888363
  misc_feature (1)..(1): n is a, c, g, or t
naattcctataaacccccagtaccactatttagccttgtgtaacacaaatcatctttctatactttgataaatagtattgtgttgcgtgacccctgaggtccaggtattgtatttgtcttatgttcagtgtgcccagttcttaatccagtgcaagtatataatgttctctcaatatcttattctttaaactcaattgaatcattagccagaaaccaatctcttctgacttttgagcaaggtttccattatgacacgagattatcaacaaatagtagtaactgaagaattaatgtttgagtttttacagaaactgcagttctctgcattcacattgccattccattgccgttccattccattgccatcttgattgaacagtgcaattacatagagtgttaattgtctgctaataggaggaataatgataaaattgcatagtacattcatgtaataacactcaaattactgttttagattcctttcccatttataatcaagttcagcgatgctgatccaatttttaacaaatacactagcaaatagtgttggtataagtattttattgaaatcaggaatctaaagtatatagtggaattcagcaatgcagcaagatacaaaatcaacacacaaaaagtatttgcatttctgtacattatcaatgaacaatctgaaaataacaaaaacaattccctttataatagtatcaaaaagaataaaaccctttgaaattaatcaaagaggtgaaagacatacaatgaaaaacaaaacactcctgaatgaatttaaagaagataggtaagtagaatgacattccatattcatgaatgggaagacaatattattaacatgttaatactatcccaagagatctacaaagttcatgagattcctaccaaaattccagtgatttttttttttttgcagaaatagaaaaactcatcctaaaattcatatggaatttcaaaggaccctaaatagccaaaacaatagctctaagactcacacttcctgatttaaagacttacaataaagctacagta

SEQ ID NO: 62643 - DNA, 1826 bp, Bovine  19866880571393
  misc_feature (1)..(1): n is a, c, g, or t
nctcgaggtcacacaattaatcaggacagcagaggcagaactcataaaaagatgccttatatttgagggcattctactaaagttagaagaagaaagtgttcccctatagctttcaaggttttctaaatagtaaagaaaaaaaaattaaaagcacaaaattttgcgtaaatttgtctacgtttttgtcctatgttttgactcaaattctaacactggtatattgttttgcaaatagggccaaacctgctggcttgttcctaaggaaccttgcagtattatatatcatttgtttaaaaggcataaaacatccctaagttagaaaaattcatttaggaaagaaaatattatctttgctaagccatgttctgaaagaggaggatttacttttctaccttgttcttcacagattctcagcacactgaaccctgaataataaaaggtaaactaagcagtgcgctacacgggccaactatgtacaatccaactggaatgcaaaaagccctgctcaatcagcagtcatgtagtgtcatgaggcaacacatgtgtttttataagcactcattaaaagttagttacaattcgagatcctgtccaaccagtatggtatgccccaagttagtgatcttaagagagacaaaactactaaccaacaattgtttaacatgtattaaacaaaaaagaacaatgatattaatttccttctaatagcatatttttggaatttatggaattaactcttccaagcataataattggcagtggccccaaaccaaatgattttatcttttaaaatacatcagcattgtacatcatttacttggggacaggatacaagggcaattgccatactgaagctagttaacttcttcaaagacagttgccttgttctggtcacattagaatgtcctaagaataatctgtacctgatgacgattgattgaggagtcaagtcacatcaggaaaaaattaggtttgtgccatgattcgtttagtccagctattcacatgtgacttacttaacttcagttgagagcattttctcattcttaaaaagaaaggtattttttatgacaagaatagaacaagctaaggtattaaaattaaagtatgttctgaaatgaaagatacaagtcacctacaacaaaacactactctattttatttctatagttttttttttttaatctaaagttatcctatagttcttatttaattctcacatcagccttgtgtggaaggaagaaagtggtattgctatttattgctattctaatttatagagcattgatataacttacctatggtcaaagagcgactccacagccacacagggaggaatccgaagtgtctactcctgtgctaccctgactccaaatttaggactctttcaaacagtcaaattataaaatgtatcacagcttagaagtaagtacaggatgtatcatgaccacatctctgctgtctacaggaacaatttgaaaaaaagtacgagctagtgtctactcagtaccgtgctaggcaacacaaagattcagaagatttccaatacacagttctttcctcctagtgcttcaaacctagttgggagacaaaagtaaagggcatgatgtaaatctgaatagtgagcaatatactgtcaagagttaaaagggtgtttaaaataagagattaattgccagcttcttcaaaggtggcttttggaaggatttagactgagggatggggcttcccaggtggcactagtggtaaagaacctgcttgcagatgcaggagacatctgagatgtgggttcaatccctgatcaggaagatcccctggaggagggg

SEQ ID NO: 62644 - DNA, 1068 bp, Bovine  19866880664380
  misc_feature (1)..(1): n is a, c, g, or t
nagatttttatttaaatatactaggaaacagttgaccttgaaatcatcatatgagggtcaaagaaccaccccacggttcgataatgaggagtttaaattagagcaaaagcatcacatatataaaagtaaccctaatatcgttttatatggatgataaatgacaacttatcccacatgactattctaagtttattaaaaattagatccagcattatgtcctacaagtattcacgtttacaggaaacatgatatcatattgccacaatgtcttgtgataaagcctaatgatggtatatagaatattcacatttgcaagtatataccatgatgtcaaatatattactcaatgtgatgacttcagggtcatgagtaatgtcaaaacaaataagtcagccacctggtaagacagggcggagcatttaataatatataaatctttataggacaacaaacatttaaaataatccctaatttagcttggtatttcacatccctgttgaaaatggccttcaaaacaggtgtgcttaatataaagttaaagcagaattctaatgccaatgaatcaccactgaacattattctacctacatagttctatcacctacaagaatatttctttgttaataacatataactctgccaaaacaaaaacaaaatgtgttacaactcagtttcataagggcaatttgaatcatattatcttcagaatataactaatatacttggaatacaactattccagttaggagtgaacctgataaaatatctaagaaaatgtccaccataaagttcttaaaatgcaattcaacctcatgaggaagtagatcaagcggaagagatttaggatgaggttgaaataatcagctccaaacctaaaggaaagttcaaatttactcttgatagttttagaagtcaggaatcctatagggactaaatcaatcactcagaaaatcaaatcacaccaatttttacatttcaaagaaggattattatgaagtcttgttgtatatttaagtagttaatatgatccaccaggatgcttgtctacacccactaatactatttctg

SEQ ID NO: 62645 - DNA, 1614 bp, Bovine  19866880813984
  misc_feature (1)..(1): n is a, c, g, or t
nctgagagatctgaatgacagcatatgcctaaattagactttaaagaaccactaaaagttgcttgagtatgatgtttgtatttcccactttggtgtggcttgttttcaaaatggatcatatatatttgatatcagagattataatttttaatatattttgcatcaacatcttgattttcatatctcaaatgtgcagtgcctgtccaacaaactcttctggaacagaatgatggctgaataagaccaactgtaatatttagtaaactaacagtatgcattgtgacacatcattctcacaaatcttaattgttaatattaaaatgtaaatgaatggcatttattcaaataattcattctaaaatcaaccacattcatctcatacaaaataactagttcagtgataaaattattgagagtagaatattttttgctactaaaagtcactcagttgtgtccaactctttgcaaccccgtgaactgcagcaagccaggcctccctgtccatcaccaactcccggagtccacccaaacccatgtccattgagttggtgatgccatccaaccatctcatcctctgtcgtccccttctcctgccctcaatctttcctagcatcagggtcttttccaatgagtcagctcttcgcatgaggtggccaaagtactggagtttcagctttaacatcagtccttccaaagaacacccaggactgatctcctttaggatggactggttgggtcttcttgcagtccaagggactctcaagagtcttctccaacaccacagaagaaaagcattgattcttcggcgctcagctttctttatagtccaactctcacatccatacatgaccactggaaaaaccatagcctcgactagatggacctttgttgacaaagtaatgtctctgctttttaatatgctaaactacctggggcagaaactgtcttaccctttcatggattctcccatagcacctgggacagtttagcatgagtgaatgaatgacagtacttcaatgttcagagctgtgccataacatgtccacagatccatttataaggcatgataaaaacaaattatctgaagaaaaaatctgccctatgtattctgcccaattccaatggaaggacatcaaagtgactggagcataatgaaacagagcacagcatttcaaaatgactgactcagggaaaactctgacagcatttaatgtagtcccagctgaataaagatttcagctctccttgaatgatttcagctctccttgagtgatttcataggtaggcggcagccagtccagcctctgcttttgattagcagggcttaagatgaaatcatatctctcagcgtgtgcctttaaagtgatagctgagtaatggatggtaatttcccatctattatgataaggctcccttccaatgggtttttgtgcattctgctaagtgactctggttttcatttccccaacacatttttcttcccttaaatgcccttctaatatgccttattttgacactgaatggcttagtacaatttgcaaagatttgtttgtctctgctatagattgattctttctgatctctcctcgatttggtaaggatgcatttgacctc

SEQ ID NO: 62646 - DNA, 1350 bp, Bovine  19866880876569
  misc_feature (1)..(1): n is a, c, g, or t
nactctgtaatatatatggctccctaaaaaaccgtaacacatattttccttgttgctgcagtttggtaaatgttactacagataacatgctggatgttagggcggcagtgcctcagtcacttggtgccctccaggaagactgaagtgagcttaatttgccttactttgacacacccctaggctactgagctgaatgtgattaaccccctcggtatagtagtattaatggtaatttcctttgcattagtcagttggggtgtgctgggatcatggcctgcttgcacagaaccaaccttaaatcttattttgttttttttttccctttctttttcatagttgagtatcttctgtgccatcacttctgacttcattctgatctttgctacctcttgctcttaatattcaaacatctaccttgtttatacatctctggtgttaggcaggctctgctataattctaacttaatttttacttttccgggtttcttctggcagtttgaaaaaacataagtctttaatttctagttcagttcattacaacaaactcttgaaccctaaaagaatcaattatcctttgtacatggtagtaatatgagacagtctgcattaccaagaaactattacaaaagagatcaaagtaagatttttttttcagtacacgttattacatcaggaattgccacaagtcatttcagttatttcttgtgtcagaagaaaggaaggagattatagtatgtcattttatttaagaacgatctttaacactactagtcttactgttttgctgagaaaggactcaggtgttcatcttttttccattgtcattgagcaggaaaaagttaccaggagaagcaagttcttaaattattatttcattcaatttttggaacttccttctgctataaaagtaaagtaactgagtcccccgccaaaaggaaaaccttaattttcacaatgggccatctgttttaacattgagctgacctttcattttgtgaattgattgccaaaggggcaagatttccttctccctgggagactgttaatattctgtgctttataatgcactgaacgattttagtaactagcaatgcttttcctgcctcattcagattcatacatttttatttgattggttctatgctgccaccatacagaacacctaagtaattgtcacaaaatatgctggcttgctttcttaacatgttgatttgtaaactttttgccttttgtgggaacttctgaggtaaggagaattgagttaatcttaataaacttattgcttccttgatacctcagttggtaaagattccaccctgcaatgcaggagacccccagtttgattcctgg

SEQ ID NO: 62647 - DNA, 1928 bp, Bovine  19866880881527
  misc_feature (1)..(1): n is a, c, g, or t
nttcacaggtgccagactgaggaaactggctattactttgtatgctctggggagtccataatgttttctgagcaaggagatcagagatgtgctttaggaagagagctgagtctagtaacaagtgaggagagattgaggaagatggagcaggggcccatttgggaggctgttgctgtagtctgagtaattgacatgagatgttgcacaaaggtgatggggaagagagagagggcacagactgaggatactgggccaaatcaatatcgatcagtgtttgttgatgggaaatgaggaatgggaaaggtcccgaaagattcaactgcaactttctcataaacagaaaccaaaaggtaagaggaggaggcacctgtgaggagaagatggtagaatcactgctggaatttttggctggaggccagcctgaacagaggatggacagatgggactggatgacagacaaaagaaatgttgggccagtgaagacattggcagcgtgtgcatggagatggtgttcataaagaggaggcgaagaaggagggaaaggagctggggaacaggaagagcactgggaaagaaagcagagaattaggaagccaagtgagggaggttcaaggaggaggctgtggtcagtaactcagagtgctctgccaaaactgaagaggatgacgcacgggaaaagctggctgacatagagaacaggcttgtggttgccaaggtgggaggaggggagggcagggaaggattgggagtttgggagttgcatatgtaaaccagtatagacaggatggataaacaacaaggtcctattgtacagcacaggatatccagtgataaaccacagtgtaagaatacatgcagtgtattatatatacatgtatatatatgtatacctgaatcactttgctgtggaacagaaattattgcatgcatgctaagtcacttcagtcgtgtccgactctgtgcgaccctatggactgcagcccaccaggctcctctgtccctgggattctctaggcaagaacactggagtgggtcgccatttccttctccagcgtgtggaagtgcaaagtgaaagtgaagtcgctcagtcgtgtctgactcttcacaaccccatggactggagccctaccaggctcctctgtccatgggattttccaggcaagagtactggagtggggtgccattgccttctctcaacccatccaccacccgtgcccaaatctcctgggacttttgtgaacgccacttctgaggacttcctccagatctacagattcagattctctggaagatgatgcccaggaaatggcattttaacaaacaccccagatgtttctgattcatcccaaggtttggaaacagcattgggtgctcagtaaaaatgcaaagatcaagatgattctgcatatttacttactttgtggggatacaattttctgtaagaatcttgaaaacgttttaatgaataatatatttatcccagcaactctaaagaccaggcagtcccactttcaaaatgagggaatcaagtcttaaaatatatgtgacatgtccaccctttacaatcaggaatcaactacttgcacctagaggagagggataaacagttacccattcaccgattagtgcattttatactgtaaatctaatccacttgattaacttatgtttgtatgcaattcctagttaattctttcttgtgggggaatggtatttttctaaatttataacttcagtatgctccttagttacaaatagactccctgactcaactactaattgcacgttcaggacactcttttattcttctgtacaacccccaggaatggtaaattttttagataaattacttccttttcttcctccttaccactgattaaaggcaatccactagccaattctctcacctgctatcctaccatttcaat

SEQ ID NO: 62648 - DNA, 842 bp, Bovine  19866880898887
  misc_feature (1)..(1): n is a, c, g, or t
nctgaaaaaggtttcttataaataatttggaaatactttcggaatcctttcttggcaatggaaatagaacattgcagatccttttatcatcaagtgattgatttatatgtgggaagtcctcggtgcttctggaattacttaatgatgctatgccactgtctataaatctgagaggatattgtacagaacatgaaaatcccaaaggaaggaagccacgtgagatcatgctctctttgcacagtcatctaatacaaggttttgctggagaactgggtgacataatctgtttcacatgaaatggccccttggggatagattagagccaaaacaggaatccacaaaagaagtccattatgtttggacaagcatctaaccaacctttcttgtgtttttctgggcatatgatctcctctttttttgtgactcacttgtcaagtacattttgcccacacacaggacatataatagtctgaaagtcaattacgttcgtcccagctgtaaactgactgcagagatgactaagaacaccatggaattgaacctagaatagtaattttgctgtttttgttcaatgctgtattaggagaaaaaaagattttgagggctattggattggtaaaacttggtatgaattggtgataatatagtgataatttatcatgtgtggagacagggtggatgcaagaattatttgtattgttattttactggagttggttttgttattgactgtacaaaggaaattagtcccgtgtcatacatattcacattttttccatagtttgcctttttctttggattttgtttagtgcctttatccacacatacatttgaaatttgtg

SEQ ID NO: 62649 - DNA, 1851 bp, Bovine  19866880986185
  misc_feature (1)..(1): n is a, c, g, or t
ntttcaggcaagagtactggagtggattacccccaaaaaagcatatgcaaccattccagggaatactgtacttggggaagtaaaaccccataagtgatgcagggagctcaaattttaacacattctatttttactagaaaagaaattcaggtcctaatatattatcagggctaaatttaacatttggcaggctggttgtatatggccattcttcctgcttctgatgctacacttacatttactgcacatgcgacctaaatctaaatgaaaactaatgttcagcatcaaaatgtacatccttcgggaaggtaacgtgtgcaatctttccaaggctaagaacagtttctgctgattagcagatcttgcatgtcatccaaattcctttgcccactcatgtgggttagacactagggtaaccaagttcctttggcagggattgaggagatagagcagaacacacctgccagcactagagagaaatggaacgagctttgctggggcatctgtgacatggctctgtagcgaggaattctgggaagactgagactaagactggaaactgggtttttactgagttaacctcacaacacaaactctataaaaccaaaatttgttctgtctttatgtgaagtgtatgcacaagtctggaagtgtttccccgggggtgagaggccggagactgagcaaatgattactgaattagcataactgtataagaataaaatttatcataccagagaagaaattttcttcttcattctgtagatatggagttagtgatattacatatagttctctattatgaggtgataataaggagtcagctctaagccctaggtatgagtgttattatatattaagaaaatctcctttttcttgttggtttatagggtttggagttaaatgagaaaaatatagcatctaaataacatttagtatagcatttaaatatagcatttaaatatcaatatttcttagtgattttatcataaagtcataatttgtttttaattctaggttataggaaagcacactatattaggaagcataaaaacactatttgtttactgtttctagatgtctagtacagattaagtcctattaatataaacattagtggggcatctaaatatttttcatcatcctagaattctaatgtcttgaaaattattaggaattaaaaaggcaaggtaaaattgaaaatagagtaatttcaatatgcagggtttaaagatttttaataatatttatcaaataggatttttccttcattttaaagttctaacagattgacatgagtatgaaagtccaatgactattccaatgactgtggaatagttctttgggaggacaggtcatcacaatgaaacccttccgtttagtactgacaccttctggatgcccagaacttgccccaatttatgaagacaccaatctacacaacggtgcagtatggaatttgtttctcttctgataaaactgaagcaataatagcatcacacagttatactctaaggtattttaaagtacacaaaagtacagctatttatgctatgtagttacgtgaataatattcccaagagacattaaatctttaataaccaacttctgtcaaacacttaagcacagaactatattaagacagcatgtggcattcaatatctgacatttcatcccataagaaggcaaagcacaacaataacatgtctctgaaaagcaaatgccattaagtgcaaatttctagaacacaaggtcaatctagaaacacattttaaaattcaacagattcactttttaaattagtatgctcagtatataattttcaaacacaatccgaagtgattttccaat

SEQ ID NO: 62650 - DNA, 1036 bp, Bovine  19866881019293
  misc_feature (1)..(1): n is a, c, g, or t
nttttaacaaataaaaattgaaagctattaccctagggaattctatcagaatgtcctccatgtatatttaaaggtcctcctactcacattgacttcaccgccccaaatcttcattaataaaagtgacattgaggtctgttaaaaagctgtgaatgaaatgtaacttgtagtgtttcagatttataagcttgccaaaccaagttactgaatggcattattttcttcttgatagctgatgtggggaaattaatattttacttttagaagtgaagatggcaaagctaaagagtgaaaaattatcagtacaccaagcaggatactaaacagaaacaaaatatctaggtcatctgctaatgccattttgggggaaattttattacaggaattatttcaattgattttaattttcaaagcacatttaagaataatctaaaatcagaagtcaaacaaatttgttgcaattggtaaactgataatgtcttctatttttgttcctggaggcatttgcttttatttcaggtttgttgggattggaatgcagacttgcctataccagattaatgacgttttcttcaacccccactcttcttcatcctgacctacgtcaagcatatactaatgctcttaatcctattcttttactgtgggtatcttctaaaaataaatcttagttatgccaagacagacataatgaaaataatttctttgcaatatgtattttaagggtaaaaacccctaactctattgccaattctagtaccacctccttacacactgtaagaagctatacagggaaaactgaaaagaaagtcataactaaaatagcatttgcatctaatgattttctaaaggccactaatttaacaatataacaaactacatatttttgcttttatgctttaaagagagtcaacttagcaatactgcacaaagaaaaaaagagcatagagaaaacataaccataatcagatttggcccagattctccttgactttttgtgtaactttatgccattttaacagtttcaattccttca

SEQ ID NO: 62651 - DNA, 723 bp, Bovine  19866881600053
  misc_feature (1)..(1): n is a, c, g, or t
ntcccctccactcaaccattcctccctggagtcagatttagtgcaacaggcaggttcctaccttggtctgaacactcttatcaaacttgtcatttttgaagctaaaagtattctggtgcctctgaggcctggaacgagtcacgttccctttctgtgagctcatcgcagaaacgacaatcgcctcgttctgggacaaggaaggtgcaggcaagagtaagttgcgaggaactatcccacggagctcacgcttctactactgacccggaaggaacttaaccagcctttctgtccccgcccccggcctacccacgtgattcctcgagggggtcaaaggacaccctcaggcctctcagcgccctcaaggcccttttaaaaccgcccagtctcgatccttcccccttcgctcagcctctctctctcaatcccggcgtaaaaatcccgctttcttcgaagcgagaattcccccattggtccgaatgtagcagtccatcaaagtcgaggggcggggaggccttgcttctattggctctccttttccgcaatccccgcctcctgccgactctgctcagcctctccggagcgctacacctccgggttgcttgtgattggtggaagtcgggctaaactagactccgtccctccccctgcccgctcgcaggctggagccggggtcagctttggcatcttcctacagtcagtgaccaactcctagcttagtgagct

SEQ ID NO: 62652 - DNA, 870 bp, Bovine  19866881672459
  misc_feature (1)..(1): n is a, c, g, or t
naccacaggaaaaaccatagccttgactagacggacctttgttgtcaaagtaatgtctctgcttttcaatactgaatatcataatgaaagaacttaccctcttctgggctaaaccataactgaacccaattgtggcaaaatatttgaattataaagaaaaagaaaagaaggttctaaaacgctgaggcagggggaaaagtcatttatcagtaaaacagttaaaaaccaatttttgttggcctgcaaaatatcaagaacaagagtttggagagaaagtggttgttattcaagaatattatattgggccacattctcccttatgtgtgaaggcaacaaaattctcaaatgtacaaaggtttggaaaatattctccccatgaatcctttgaaaaaattacttgaaaatctatatgattcaatgagtgatgaggcaaagtgaagggtcattgtataggaaagtatgatacaacaggatgtcagggaaggctaaattcatttaaaacagaaatatgaaaaaaagttgtaaaggagtttaaaaaatgacagaatgtgtacaatgttaaaagtaatacctttttgaaaaactatcagactatgagttttaaacctggtctaacagctttaataaacaataatataaacacttgaaaaatcaaaatggcaacataaatcaaggtatttccctctgggaagaggttcctgggacctgaatatataatactgtctttgaaactgagtgttaggtccttgagttttggtattatattttccctgtatcatttgaatgtctttaatattttatcataaaatcttaaaataatgtacaggctgcaagaaagaacttcccaagtactaaaaattgttttacttt

SEQ ID NO: 62653 - DNA, 2084 bp, Bovine  19866880348804
  misc_feature (1)..(1): n is a, c, g, or t
nttgcacagtgactatctttgagtaataatttgcttttttttttagcaatgttagcaatgtttctttaaattttgaaaatatattacttttaacttcagattaaaagctgtttgggccaagtgattctagagttgttacttgttatctttctgtcctttggcactaccagtcttatttatcctttgtcctcagtatggactcagcacttttgcaatattcctgcagaagcatgtacatccacacatacatatacatacctatatgtgtggttgtacacggctgtcctggagtattacaaaaacgttgcttgatatacacatatactgctatttgatacacacacacacacacacacacacacacatacatatgagaacatactttgtcttatgaatctatatctatatatttacattatttttaactatttcacataattctaccatgtggtttcaaagttactttgctctttttactattgtctctctccttttgtaagcctttgggaccatcccaaggaagaagtggaggagataatttgatttttattgtgtgaaaaatactgaaaaataaaataagacagcttaaaaacaaccttctttctttcaatagtttaaacttggtacattttataactaaagaccaatcttatctgcaaataaaggaccaacttccctggtaatgactccttgaattctgattatgcatttggtgcgtggccaaaatgtcttcagaatgtatcctatcagcatcattgaatgtccccaggattgtcaaagttcattttaagcatcaatacagatcctcaaaccccatatatggaatatgtgtggcctcaaatttttgatgatgaagaactgataggtaaaattcgcaggatactgaggtttttaatagatcatttatgaaattatcatggcttctctattctacaagcaattttcagtgaaaaccaacttctacgatcatttgctacaatgtgatgactgccattattgtattgaactatttcctgttgggcgtacaatcacagatgcaggctatttaagtgttctttatttcccctgtttatcctcaccactaacattctatggtacatcatttttaatcccaggatactttgatatcagaaccccagaagactgattgatatggacagatagaaccagaaacaattaggaatatacactcagatattttacaacctctgtcgtgtcgtttgcttagatgaacttttgtgaagtaaatattctgtttgcctttatagacattaaacagttaagaatgagaccaactaagaaatctggccatggtcacataacttacaagtcagggagctaccacgtcatacttccatgctcattctacccttcttcacagttcagtcaacctctcacctctaaccacttaagtgcactccaaatcttgatcctcgtttaatgtttctagagcttattaatgtttctagatccttattaatgtttctagccagaggactattctctggctcaaagtcatcatgcatcccatactgccctcagagcttcctaaaacatgtcccctaaactagctttgcaaactcaccagccattctcttagaatatatgccatattttccaatcaatttaaatgattgctccaggacatagttcagtgtgtcttgccacatattcttctaatgcactggatacagacagtattgctctcctactctccaaaattctgaggtcatgctattaatgccttcatacttggtccttcagtcgtgcctgactctttatgatcctttggattgtagcccaccaagttcctctgtccatgggatttcccaggcaaggatactggagtggattggcatgcccttctccagggattgaatccagttctcctgtgtctcctgcactgcagatggactctttaactgctgagccatcagggaagtcccatactattaacagtaatcacgtttgtaaattattttgtgacaggatcaggctgggcactctgctgctgctgctgctaagtcgtttcagtcgtgtccgactctgtgtgaccccatagacggcagcccaccaggcttctc

SEQ ID NO: 62654 - DNA, 1312 bp, Bovine  19866880385367
  misc_feature (1)..(1): n is a, c, g, or t
ntctcttttgtttggggggcagttaaaatacttagtttgctttcagctaaccgggctgattctctcaactctgcatgacggcagaagtattcgctgcagtttctgctgtggaagaaaaccgacaccaaaattctggacacctgaacatcacttcatactaactcaagtgcactgtgcatcagcttagaaagggaggcgtttgagagcgtgcgacagatatcatacttaatgccagggcccgcaaactttccatttatagctgtcacttctcctgtctgaggcctgtcattcctctcaaatttcagtgacatactgtaacgccaactcaaaattctccactcctgtttctggcaccgtctatccgacaaatgtctctagattctggcaacatcaggagttcagaactgcgcctgagagctgaccccacggcagctaaccagccttgaaggcctcctaaatcaagaaaaggactttcatcacgcggcatgaatcttccactgacattttttcacggctaaatatctaaatcccatttcttgataaaaatttacatttccaaagccagttactctccagttttcacatttttcctatcaccacgtggctccttagcctttctcagtctagcagactcacccaggcctccagggccaggccctccacctgaatcaccacgtcttaaaatgtacagctcacagaattccaattaagatctctcagagaagcttccataacatcaccgcctccgaggtggtgtataaatcccaagtcttgcctgatctgtctcaaactgactgcttcacattcaaggatttaacaggcacagtgagaatccattctcaattcaagtctgaaggacagtttaatctaaaacatactaggtacttcatctcagtacaaaaatcccatgcgaaaaagtacatgtcactaaagacggccacgtactttaagactggacaaatttagctctgagcacctcttccatagctttgaagaacccaagctgtctccagagcttctctgaacccctaaatcttttttcatttttttaagaaaatttaaccttgtttttctgtctgctctgcttctattcatgtgccccggcttcacttcttactttctttttttaaaaattaattaattatttttcaccatgctctgcagcttgcaggatattagatccctgaccagggatccaacccaggccccagcagtgaaagcaccaagtcccaatcccaggaccaccagggaatttccccagtggcattttctgcttcagccctactcaggtctcaatcagtgtgtgctttca

SEQ ID NO: 62655 - DNA, 1381 bp, Bovine  19866880519518
  misc_feature (1)..(1): n is a, c, g, or t
natgcctttagctatggccgtgctacagttaattatgaaacgagcaccctaacccacggtttcatctaacagaaattcccatattcttgacgatccagctgcatcaggcttagctctgaatgaaagagatcagattagctcatatctgtccatcctactttgataattagcgatctaattccgagtacaattatggaagtttgtgtcttaaaaaaacaatcattaagaagctctaagtgaaagatggaattcaatgttcttaaaatcactcccctttttccacccctacagactacagtgagctgatctcaaagctcctaggtattaaacagatctttgtagttgtcacagagataacacagggctgctctaatgagaatggctacagggtgaaccctgttcatttgtctattaacatttttacctgtttttaattgaaaggacggtacacctacaattttccttttaaatcatgcgagtctcatgctgacaagcattgatcttctccaaaacagtagacatgaataattttaaaaaatattctgtcttattattttagagggacagccagaactctctgccggggaacaggttattcagttagctcattttctgtgccctggggtttctctgtctccttctcgtcctgttctctttgagaaggtggatcttattagcatcatcattgcatgttgaagagaggcaagcttgagagcggttatgcttcttcaaagaagctcaggagataaataagcttaagtaaaacaaagatctgtgagagtatctgatgtttctacgtattcttactatttctcatctacatccatttggaaatcgttagttgaaaatttagctgtatcttctgcaggctctattttctgttagaaaaccagagcatggcaatagataataggattatttagaatcttgacaaagtattaagcttcttccactggtttcctgattttaaatttctcagttaaaaaaatgcattctgaatatttataagagaaccttaatgtttttattagttataatgctcaaaatcttatttctcaaactgtgatcctctactagcccaggaaaaatcccatatgagaccagaaaacatgctcagaggccttctatagtttcacattgagtgtttaattaaacattcagtgtaagtgtattctgggtcatctgcattactttctggaaccgactcccagctcttttcttttgctactgtaattacttttgtgtttaacttcactccaggcagagaccacaagtaaacctttgcagtgtatttcaggaaagaggattttgccacaatttgagaaaggagtagaggaattgagccgtgatacatgtctccctggcagaggctgggtaagtt

SEQ ID NO: 62656 - DNA, 2210 bp, Bovine  19866880665269
  misc_feature (1)..(1): n is a, c, g, or t
nggatgatgtggacaatgacaaactgaagttagcaggcaaataattttactgtctattaaggagggaagaaagagtcccaagaccaaaagtttcaagaatttctacttttgagcaatgacaataattgaaactgggctgcctaaatcatcctgggtgactctaaaaacaatgctgaaaaataaaaagcatgattagagataaattaacaccgtatcagtcctttcttataaatctgataagcaaaattttaaaatgtacatattattcaaggatatctattattgtgataattctacaaagcaataggaggaaatgactgtcagcacattaagagaaggaaatggcagcccactccagtactcttgcctgggaaatcccatggacagaggagcctggcgggctacagtctatgccgtcaaaaaagagttggatacgacaatgacggaacaacaagactggtaccatgtccaaggagcaatggggacaggatagagagtagcccacaagaccctcactctaaagtactaacatatttagcaaagctttgattcatggggttcatttttttcccagcgtattttttaaaactaaatattggctgcagttgctggattttctctgcttaatggacatcaacataccaattttcattaataacaaactgtaactaatccttaaacagcacaggtttgaactgtgccagtccactcgtgtgtgtttgcttttatttttttttttccagtaaatacagtactacatggtctgcaattggttgaacctgcagagtggaactgctggcacagaaagctgaccacaggacgtaagcaccacgggttctggtattgaagttggctactgggaccagtcccccttggacactgaggcaacaccatacagattttcaactgcctaagattttcaacactcttagcccctgcattgatcaagggtcaacagtacatgctagagaaaaatttgcattgttggtaatagccaagagttcataagagttgaggtgcattgtcatgtcattctgagacactgtgtagttctttatgatgggtttgaagagtctgtgccattcttttttctgttttaaatacgctaacagaaagttgccagagtggtgataatgtgataatgctggtgagccaaggcacacagttattttagaaagcaaagtatacacaataaaaatgttgtaagtgatggaaaaataacaaacgttacttgtttgatttctctttgaatgtctaaatagttctgtgcaaactaatgtgttcttagctaaaaagattgtttcatatactaagctgttcttttacttttgaataattttcatatttagttcattctattcaggttatttacttaagcaatacgtattgaattccctaccatgtgccatgcatacaatacaggtagtaaatttctgcttcactctaagttgttttaagcagttgttgaataagtgatttatggataaaaatgaataaattataaatttaccaaaattcattcaatgaataagcatcaaaactggaatttgagcccactgttctgtatctgaagcctttatgtctatgctgtcttcatttaacagctgtgtgaattgtaccctcatgtcaggttctggctactctcttcagaacatatcattattatttgtttctcccatttacagtcagactgccctgtgccttagaagattagtttaaatgagtcagcatatttactgacccaagtgacatcattcctcatggttagaaacatacattagagtcaagtaaaagtttatatcaacaaacacatggagtggttggaggtgacagatggggtgtcttgagaaaggagtatgtgactaaatctcatcacagcattttaaaaattacctttgagatgtagggtgaaccaagagtctaaaactttaactgatatgtgaagattgcctcagtagtattctggcttcttctacaaaccacattagtgaatcactggagagatgttttcatgtcaagaaatgtactgagggaatgtgagggcaaactgcctaccttcatttatgccaaagatacccgaatgttcaaaatgcaaatagacacggtcctttctctgcatgcctaacactatgcaaatataaacttaggaaaaggcccaatgtaatatgcagcagaaaagtaaataagcaagcacagtctcttgacatatt

SEQ ID NO: 62657 - DNA, 1483 bp, Bovine  19866880781341
  misc_feature (1)..(1): n is a, c, g, or t
ngagtaggtatcccttaggtccgttctcttgtgaaagcatcacaagaaccctttgatccatactgcccttgaccacacttttccagcaagggaggcaaaggaggctcagttgtgttccttaggggaggttcggggtgtgatgaagagaaaggtagagagacaatatggcggattatttcttttgaaaagcaatactattttactgcattaagagattacctttgggacaaaacatcaaggtttattgagattctgccatcatttctttccctactaaaaggtcactgcagtatcttcatcttcaacggagctcttgagcaaatctcatttcagcaccatggacagcaacacttctactaggacatgtgcccatggtcacatttgccatttcttaagaaacttgcatacactattcctttgtgaatcagcaaggtttacagccattattatattcaacaggaaggggctgaagataatatatgctattaatgagttcagtattttttagtcatggcattaagcatttgccaattaatacttcctgagagcatcctgaaaattcaagctaattacataaggtgactaataaataatctaacactgatcagttatcaccagatacgtaatcaaaattttctactcatactgagcttctgatcaataactatacacatttctaagagaaaacaagaaactcgtgtgagtaaatacgcttaggaaggccccccaaactttcaaaacaacaagaattactcctggaaaacacataaaacgcttttagttcttcccacataaacaatcacaaacactttctcttgtctctttggccaaccagcttaatttgtcactatcagagacttcatgtgtcaggtccataagccagaccacacatgcctgtcttagcctgttctgatttcagctgtggtcaccagtatgcagtcccatcacagtcttcctcacaagcttcactcaaattacattaaaaaaaaaaaaaaaaaaagtggcagaatctgaaccaactccgtagctttaagagatagttaaagcactgactttatctcagaagaccagagtcctcttgatcttccaaggattctcagaaggcactgatccatcagcaattcacaagagagacccaagtcaagcagcaggtcaggcgcttagaaccacaaaaacaatggtcgaagtaacaaaaccagagtcaaaaagcgactttaaaactctagaagacacctccacccaacacacacagagataacagcgcgaggaagggggaaaaaatccacgggttcctaccttacagtcctcaggacacgatttcaccgagtactcctccgattgtaagtatttatgcagcacgctttcaaactcttcgtacttctcctgagcggtggtggtcgtagtcttggtaagcctcgacgcactgtctgcaggtggtcatctccccgccctccttgagcaccacatccagactacagttcaa

SEQ ID NO: 62658 - DNA, 928 bp, Bovine  19866880809704
  misc_feature (1)..(1): n is a, c, g, or t
nattaaaataccttcagtcctttaataaagctaatcataatacagtaattacatgaatcatgctttgatttgaagaaatccaaacccactgatagtttgacaatagaatgaatatactttgaaatgaagacatgagtttgcttaagttcttttttcctaattcaaacaagattttgacactgtgatccagcttgatttcatctcagaatcacacagaaaagaccacagctaaattctgcctgatggtaagagtgtaacacaaagataagtgcttctgggagttacagaagatttgccttccccactttcctatgattatggaattaaaactaggttttcaccaaatggattaaatccagtcaacaaatatttggtgaacaattatgtaccaactgtgctgcaaggataaataataaagacctggagctaattttacataacacattatttctaagtcaataattatgcataagacagacgaaaaacatacatagcttaagagtcagttcagaatgcctaggaaaatgattcaatttatggaaaaagaaaaatccagagataatcttttaaattcttgaaagtgaaagtaattgtccctcagttgtgtcccattctttgcaaccccgtggactgtagccctccaggctcctctgtccatgggatttcccaggcaagaatcctggagtgggttgccatttccttctccaggggatcttcccaacccagggatggaacccaggtcccctacattgcaggtagattctttattgtctaagccaccaggaaagccctttaaattcttaattttatactagtaattctcatcactttggcatgacccaagtccagatgaaggatagttaattccattgtcttctttatataccaagatgctgctgctgctgctgctaagtcgcttcagtcgtgt

SEQ ID NO: 62659 - DNA, 3208 bp, Bovine  19866880822384
  misc_feature (1)..(1): n is a, c, g, or t
ntgaataaacattcaactcttcctctcgcatcatttagattgataataaactctaggtatttggaaaaaagccttgatggctgctctagaatcatattttatccaacagaagaaaatcaccgacattaaccaactatcttacatgctaaaaccagttcttgaatcacatttcaaggacaatggtttggataatcatcttgctacaggttctatataatttgtcagttaaacaatttaaatgccttgagtaatacttgttcccatttgctttgactagtcctgtgtcccttgtacacattaaaacaaaaataagaaggcatactaccagcataatattaagatatttgttagaaaagcatttagaactataacagtgtgactgctgccacagaaatctagggattctagataactgcacataattctttcattaaaatactcttcagtgcctccataggtaacttcttctcctagctacccagtgtatgtgcaaagcgtagcactaagacacctcccggatatctcagaagagtaaactaagtggtacaccaggatgacgtcaatctgtgttaaaatatttgcaggaaaggttacgagtaaatgagcaattattgggagggggcagggtgcgattacaacagggtcataaggtaatgctggggtattgttcttctctttatgtacaagaattccaagggaatccagtaaaaggtaataagacgaagacagatggatctggcagaaccttggcagctgtcaatagaaaatagagatcagaaccttccgttccttacaaggtttttctagaaactgacagcagaaaattaaaatcctgtcaggggccaactaaagatgtgccctgtattgctgacataatattcagttggatgtgaacagatttttaatttcatatcctaattaacgctgatagagagcaatttcaaaaatgtctcacaaggatgagccgggtccactcagtcagctctcaaaaaccggccaggaagccctgcgcagacttcgccctcccggtggcctgcctgcttcccttcctcatcacaccctgccccgtgctggctggctgactgtggttcctctgccttctgaacacatcactggctcaggtctgtaactatttgtgtcagcgatttgaggagccatctcgtgtgcccacgttgctagttgggaatatattttagagatttttaaaagttgaaatttgcatgaaatctatcttatgcaaatatcccaatatgaaaaatttctcactagaaaatatctttagctccattatcaataagttggttgctaaatgtctcttctcacaggtaaagaaaagatatgtgtatctaagctccacagaggtcactaatcttatgctatcatcttttttgtttcagtttgtaacactcttccatttttccatttgggcgaagaacagactcattggaaaagaccctgctgctgggaaagactgaaggcggaggagaaggttggatgaggatgagatggttggatggcatcaccgactcaatggactatgtttgagtaggctctgggagttggtgatggacagggaagcctggcgtgctgcagtccatggggtcacaaagagtcagacatgtctgagtgactgaacagaactgaactgaaatttattattcacttagcatattataaatgagtatgctgtgtagatatacctagaaaaatgttttattatcccaaatagaaatgacaaaattagtcttcccaaaataggtctttggtatattttcactttttcttttacagcctacagctaatttattggtaaatatatctgtatatactacagatcattaaaataaaaacaacttttacaaacaacatcaaaatcatactctttgtaaaatatacccttagaaatatttcttgcatatagattttctaatcacaatctgtgaagatcctataaatcttaaaaccagtaaaatatacaatattctgtattttttctgtaacccttttcttattttcttttttctacagttatctaaactttactcaagtgcataacatatatagacatacaattcctagaataaaatatatatacaaaatatgggttccttgaggaaagaaactaatttttgtacatcaatcatggtacctaacacaatctttagcagagagcatcatttcataaattgttagagtgtagacggatgaatgaataaaaggaaggttgctgactgtgccaaacagagtaagaagggaaaagccatttttataccatccctattgctagaaattttattagttcaaatgcttggtttgaaaattgagtataaccatttgcctgacagaacaaaaagaaaaaacccaaagttgggttcaagcgaattcaatgaccaataaactcagctgcactagatattgaaaacttcatcacgcctttcatgcagaaatggaaagatctcttccatggagtcagaggaaaaactgcctgaaaaatctcgtttggtgtcactgtatcagcacacagctattcagaactactcactcagccccttctgagagtcagcatcatgctctttataggatgtcacccacaaatcagagcagcgggcctcgccctctcaaagactacgaaaagatacaggagctgttcctgctatatgaaataagcaagtgaacagctcagaaaaccagaggagactggattcaatttgtaaataatgttagtcggaattcaaagggaaatgacaatttaattctaaatagaacatttctaaaatgaacacaagttggtcaacatttctctcagaatcaaagttggtttccaggacataataatgagaactaacagacagcctgctcaaaagcaggtaacaaaagtcaaattagtattttacggtctaagacctttaaaaattgctttgcattattcaggataaaaaccatcgagaaatatttgatatggcatttgcattatctgaatattcattttcaaaacactacatatgcacttttctgtcctttctctgcacatatttttataatgatgtccccaaggcaggtgatacattcccccagacaagtgctaaactctctgaactacaagtttccttagaaaaattatcttagaaatatgggggctaaattttgtgtatgcttttaatttgctaaactaactagaaataaaattatctccaaataacaaatttag

SEQ ID NO: 62660 - DNA, 1796 bp, Bovine  19866880899361
  misc_feature (1)..(1): n is a, c, g, or t
ntgacctgaactgaactgatccccagttattaaaaacattaaaaacatgaagtttcacaaaccaaatgtatttcaatacatcagttttgtgctgattgatatgcaggtatggactctttactatttcattctaaaaatccaactgcacgtagaacctattgattttgatttctttatcaagagcaaacaatcaatatccaaattacttaagctggcacgcatatgttaatgtttcttgataacttttttgagatatttttgtatcacccatgtccctcacccatttgaggtgtacaattcaacgattttagtaactttagcaagtagagcaactatcatcaaaaattaattttaggggcttccctggtggtccagtggctaagactccatgatcccaatgcagggggactgggctcaatccctggtcatggaactagatgccacatgctacaactaagagtttgtatgccacaattcatagagccctcatgccatgaagaagacctgctgctgctgctgctgctaagttgcttcagttgtgtccgactctgtgcgaccccagagacggcagcctgccaggctcccccgtccctgggattctccaggcaagaacactggagtggattgccatttccttctccaatgcatgaaagtgaaaagtgaaagggaagtcgctcagtcgtgtctgactctgtgcgaccccatggactgcagcctaccaggctcctccgtccatgggattttctgggcaagagtactggagtggggtgccattgccttctctgcaaagaagacctagtgcacccaaataaatgaacacatttttttaaaaatcagtattagaatgctttcattcttctaacagggcttccctgggggctcagatgataaagaatctgcttgtaatgtgggagacctgggttcagtccctgggttgggaagatcccctggagaagggaaaggccacccactccagtattctggcctggagaattccatggactatatagtccatggggctgcaaagagtcagacatgactaagcgattttcatcttcactttcacgttcttctaataatgtcccccatacccatttacagtaaatcccaatctccacctggagccccaggcgaccaccagctctggtccttgttcttgaatttagagacaggacttaatgggtttacatcacaagttctctttttcaatagaagagtaattgctagttatttctcacaggaagtttcatatgtttagtgattctaaatgattttagaacccaaatgacaataactcatcaaggacaaaacatcttaacaccacttaaagtaaaactgagggcctagttcattcagatggctctgttaaattgttaatatgagagttgaaggtaaatgttctttagtgacataaatcttgactctcagttctcactgaaagtagactttataccatggttctgcataataaacaggaagcagagcttagttaacaaaaaaacttgcttactggtaataagtcaccatatccccggcagaatatctatcagaaccagccatttttgttgaaacaaacaacctaattttgccatttttctagtggcttccattctggagctcaggagttgagagttgttattgagcttgctcacaaagccctgacacctgccctcttacatatactggctttaattgtcatgtacctgatgaggatctgaagcatctctctatccctccaaagtggaagaagctaagatgttacacattgcacctccaattactgaagcatggcacat

SEQ ID NO: 62661 - DNA, 1287 bp, Bovine  19866881175356
  misc_feature (1)..(1): n is a, c, g, or t
ntgagtgcagtgatatcagcgcagcctggttgtgggagtgcatatgtgcacaaatgtctcttcaaatatacaaacatggatattgtccctcctccctgccccctccctgcttccctccctctttctctgctataccctcaatgatcctgctgggtgaatccatctgaaatgtatggtgatatccctcatcctcagttgcttcatgtggtactgtgaaaacaaaaccaattttagcatcaaaggatattttcaagtatttttcttcactaggcaagctgtaagaatcttcagctgttttgttgccatggtgagtggagttgaagcagtatttctagtcagaggaaaatctagaaaacgaatgctaatatgaaataaactaacagccatcattctttaaagcaaggaagtttaaatgtgagagtcatcacctcctgtcagacattcagagaagtatgtacttgtgcctgaagtttagggaataaaggttgcccattttctcttatttgcaaattcagttttgaatatagctaaacttttaaattgtattgacattttattttgagaatgaatttaaaatttgattgcagttagaaaataattttttatggcggtggagtaactaggtttcagtcagtcctccagaaattattacctcctgattgacccagagaaatttatatgtttgtaggaactcattttcttcatctacaaaaaggaaaaatgaaaataaaaaagaagaaaactaattctttttgttcttacagaattattttagtagtagtaaataacgtactgtgtcctgaaagcttgtaaacttagaccccagacaaacatttaattttagtattgtcacatgataatgttgtcgttgtcgtttggttgctaagttgtgtcagactcttttgcgaccccgtgggctgtagcccaccaaggcttctctgtccatgggattctccaggcaagaatattggagtgggttgccctgccctcctccaggggaatcttcctgaccctgggattgaaccaagtctcctgcattggcagatgacttctttaccgtctaagccatcagggaagccccatgtttatcatagaaccctgaaatgtcatttctagatattttttcaaaggaatcccttctgtaaatccaatttcatttatgtaggtttatttgatttccttttggtctctgatgtgtgtactaacttgcttcagtcatgtccaactctttgcaaccctatggaccgtagcccaccaggcttctctgtccatgggaactccaggcaa

SEQ ID NO: 62662 - DNA, 563 bp, Bovine  19866881321900
  misc_feature (1)..(1): n is a, c, g, or t
nggacctcagttccaccccaggaaagttttggagtgggacttgctgtctgggattattctacaaggtttttagtctccaaaacccctcagccttttagctgctgacaactagctgcctaagagaattgccagtctcccaccactgtggcaagttaaccactgttttaatgcataccactgtgcctggcaattagtaagttctgaacaaatatttgtgaaatgttattaactatattggagaagggaatggcaacacactccagtattcttgctggaaaatcccacagacagaggagcctggcaggctacagtccatggggttgcaaaagggtcagacacaacctagcaactaaacaacagaaacgacattagctgcgtgcctaggtgcctgaaatgaatccagtttttcttctcaaagtctgtttctacatgtcacttcgtcttcatcttattattatcctcccagacactggagcaagagatttctcagtcaaatgtatttcttacttgcctttattcactcatacataattcattaattctacaaatattgctgctaggag

SEQ ID NO: 62663 - DNA, 3273 bp, Bovine  19866880388100
  misc_feature (1)..(1): n is a, c, g, or t
ntccttttttccctaatctagtttgagtcggttttggtcacctacaatgagagggttctgacagagacttaagggtttgttttcttcatactatgcaataccagcttacaaaattattaaggaaaatggagaactagcgtgtatcatgtacttaccatgtgccaggccattgggtaaggtgctttcacgtgtgatttctcatttatgcatgtgtgcgtgcatttggtcatgtccagctctttgcaatcccatggactgtggccccaggctcctccatccatggagttttccagacaagaatactggagcgtgttgccatttcctactccaggggatctttccaaaccaggaatcgaacctgggtctctcgcacctgctgcattagtgggctgattctttaccactgtgccacctaagaagcctggttagttcttataaacccattgagcttggcaatatttttacctcattttaccaagagcacagatacgtttgatgccagtcttgctggcccagatccagtgtttgaaggttgaatggagcagcttgcaggaatttggggggcattgagggaacagacttctcaggtccattttctctcccacttcactcccctggaaagtctgatggaagaatcagggcacgcttaatcccttttctgagaacgagagcacacatcgatgaggaatccctgctgtcccctctggccatcctgggtgctggggaggtggccgtcctggagttcccacccagctgcctggtggagaggggatgagcagctgaggcactgggcaatagcccaggttaatccaggatgcagtttgcaaccccgttgcaggaccaatcaaggatttccttcagaagtatcacttcccagcagctggctggcttgattttgccaactgcttgtgacccctggctgcacaggaagcttcagcaggtagaacttggccagcctgaggagcagacacaccccggagcttcttaggacaggacagaaaggtttgcacaaatgaggtttgcatgatacaggatgagaaaggtgccagggaaaataatcccccatgtccattagccctcttgatatatcagccctttgagttttggcctgaagactaagagctaccatagcaacagctacaggtacttattggagctactgtatcacctcccatttcctattaaaatagccaccattggttatcaagcaatcactaagtgccaggcactttacttatattattctcaatcatttcaacaaccctgcaaagtggacattaaatattacctactattttatgaacaaggtaactgagatggctagaggtcaagatatgacgaactctaggaaggaaggggaatttgcacctggtctgtctctatttccacctcactgtcacaggggtaagggattaagtgagaagagaggggcaatacgtttccaggagctgctcaggatgggtcaagccaccagaaatagaaatgcgacttgaggcttgaatcccttttcaggctttgggtcacttagaagcagagatttttgttattttgtgtttatcccgtataccctccacacccaactcatacttagctctgagcagggacacaaagagtgtttgttaaatgaatgagaaagtgaggcccggtgtctgctttctgtaaaacaggaagtggctgaggggccactgacttgatgaggtcttctctctgtgtatgtcacttttaggagctctaaaaagttctcaggttcatcctgagaactctcaggtgcagccacactacaatttagtgcaatggacagaagtttacaaaagttcacaggtcatttgataggcagtgatttcacaaatgatatcctggaagtgaaagtgttagtcactcagtcgtgtctgactctttgcaaccccatggacgtagcctgccaggctcctctgtccatggaattgtccaggcaaaaaccctggagtggcttgtcattcccttctccaggggatcttcctaactcaaggatcgtctcctacattgcaggcagattttttactgtctgagccaccagggaacatactctggtggtgtaaaagagttaatgcatctttcaaaaatatgtcccactggactgctggagagtagcttgaagtaaggaatgaatttgattgaaaaaatttctttctttttctttttttttttttgctgaaccttaacaggctctgattggagaaggaaacggcaacccactccagtgttcttgcctggagaatccgagggacggaggaagcctggtgggctgccgtctatggtgtagcacagagttggacacaactgaagcgacttagcaacagcagcagcagcaacaggctctgatcaagtgctgagtgctaaaaaaagttaagcagagacctctagaaggcaagtttttcaaaaacggaaggtggaatacaaaattaaaagtcttttttaaaaaataaaatgaatcaactatacttcaataaaataatttttttaagatatggaagaaaagggaaggaggaaaaattggagaaaaagttaataaaccggagctttgactgtttccttcctagcagggaaaccctgagcccaattcccctttgcctgctctttgaggcaaggctgagttagcaagctataaattccacgcgcctaagtgtgaggaatgtggagatgaatgtggggaagtcttcattccagaggaaagggcatgagagtgggccagctggagatggaagacaggacataccccaagtgcgagccaacggagatttgaaattagaatctgggctcaacctgcatctaggttttaagaactctgtaagtggatagggctgtcaagcagttggagggcattttgtagagacctgaggtgacacagcattgattcacccagaaaaatgatcagcatatttatcattatttgagtcagtgtatcttcttggcaaggagcagcgtttgggtggggagctctgacctggggggttccggtaatgaagagagagccctgcagaggtgaggagggaaggtcagctggttcagagaagctcctctggcttggccatcaaaggcagcttgatggagacaggctgtctaaacaacttgccaaacttccggtggatggtaggcaacaccctcccgtagaactcatgccctgggatccgagcctggcacttactctggaactagttctagaagatcatttttattagaaagtgtggtttggagtgtaaaaacctcagaggcctctatctttaaaaaaatcaa

SEQ ID NO: 62664 - DNA, 3170 bp, Bovine  19866880412709
  misc_feature (1)..(1): n is a, c, g, or t
naaatgttaagagacttatccgactcaagacaggatcaaaactaaatcttaaaaatttaagaagttctctcacatttctttcccaccccatcacattttcaaaggatcttttctttttttttttttttaaggaaaatgaatgtgttcttttccttgtttagatggaggagaaaactattggggttggaaataaatctcatgtaaggaatatttatccatgagttagtcagtgatgaatttggtgtaccagggaatcactccagtctggccaggggaagataaatattttcatttgacaggaaaaaaaaaaaaaggatgatgatggtggcagataaaggcccaagagcctccagaagatcttgtcattgccttccgagacataatatctgcaaagattaatggaaatgttttgcacagtgatacttaatctctgagtttggggagttaaatttaaatattcaagcaaaatttctcatcaaagatgggatcctgggtcacagatcctggttcacagagaatgtgcagatgggagaaattcggatagcacggcaaggtattcagacaaccacgcctcatcttacctaatcactgattctggaaagactttctctcagggaggatgggccaggttaacaccctgaataatattctcaccttacaggacaatgcaacaaccatggattggatggctccaaactggggctttgcgtttcgagggaacaatattctcttctactggaagagggatattgtcaggtatcgttacaaattttctcaatcattttcatacaaaagaagcataactctgcttgggaaccatgtgtctatctgaaagccggggagactcaaagctcccaccaagttagcaagcagacagccctcttcctgcctcctgcaaagtgccagcaagcctacatgagagatgctgtgcgccccctgcttttacaggggaagcacactgttcacaaagccgtgcgggctggcccaagaccatcctcagtgcccgtctcgtcctcactcagcatcagcgggacagtgactgcatcagccgcttctcttctctgcattctccagaccatagcccaggctttcccgtcagcctttttcagtggagagaggggtacctacctcccgaatagttttcctccttttaggttttcctctttctgtttctgttcgcttgtgcctgagtcattctgctttttgtttgtttgttgtttggtttggggattttttaataatttttttttcttttactgaaatatagttgctgtactgaataatttttctaaagcagacacaaccaagttgcttttctgcctgaaatccatctagatcctgaagccaaattagcctctataccccaacactgaattaagtcttggagacagagttttggatgaagtagaaaagattagatttattgctttgccaggcaaaggaggccacagctgtctaaagccctcagaattgtgtgtcctgacctggagcgggtagtgaggagtctcatagtaatgcctcagggagggcgtggtcagcttgtggactttcttctgattggttggtggtgaggtaagtgggagtcagcatcatcaaccttctggttccaaccagtctggggtctacgtgcttatgaacagcatacttttaacttctcccacctggtgagggtttcaatacctgcaaaacagctccaagatattgttaggtatatcccttgagggggaaccaggaaggttccccaaaaatgccttattgtttcttgactgttcctcccttgtctccacatgcatgctcaatcgcccaattgtgttcaactgtgacgccatggactgtgtagcctgccagactcctctgtccatgggatgttcaagacacgaatactggagtggggttgccatttccttctccaggggatcatcctgacccagggattgaacccacatctcctgcaatggcaggtgctttctttcccactgagccacctgggaagccctatctccacgtggcttccgtagttactgcacgtgggatcagtagctgcagctcactgacttagttgctacacagcatatgggatcttccagaaccagggattcaacgggtgtcccttgcattacaaggcaaattcttaaccaaatggatcaccagggaagcccctcaagtaatcctgataagcttctctggttcgtttagtctgcctcttgtggtcttctctgatatggagaatgctgatctcttccagttgttgggttttaattctatgtgtgcttagccactcagttgtgaccaactctctgcaaccccctggactgtagcccgccaggctcctctgtccatgggattctccaggcaagaatactggagtgggtaggcatccccttctccaggggatcttcccgacccagggatggaacctgaacccgggtctcctgctttgtaggtggattcttgaccctctgagccaccaggaaagccctattgttatttgtgtcccttgaggtggaaccagggtcctgccccaaggctgtactactgtttcgtaatgttcctcccttgactctgcatcccttcccagattagctctttggaaggtcactgaggctgaacagaaaggctccccaagcccaggaacccttccaggccctgcttgtttttagtctctcaaggtccaactcaggagtccctctctgtgagccttcctggagcttccctgtcaccgctactgatttttacatcgaattctgtcttgaaatgtcacagtttgtatgtattttgtttgtgtacatgtgggcttatttgccctcacgagatccttgagggtagtgaataagttttcatctctatctttccagcatttagcctggtgtccattacacagaggcaatacgtgtttgttaaattagcctggtggaactgcttggcactgagttgtaaaaacattaacgggtttaaactgaaaacagatttgccccaccaggagtgacgctgtcatgttttaatctattgtttaaacaaactcaacctttcaaggtcaattcaagcacataggaagaaattaaaaatcataatcctgctatgtgggagtaaccataaatttcactttggcacttgttcttccaatattgtatatgtatctttctaacaaatatttataaattacaaatttt

SEQ ID NO: 62665 - DNA, 1914 bp, Bovine  19866880541680
  misc_feature (1)..(1): n is a, c, g, or t
nagtgcttaattgaattcttaattctttaaaacatctcagtgcacatggattaagttttttccctgagattctataatgtcctccaataaaaatgtatatttaaagctttcgagacagatttcttatatttttgttcatttcctttgtgacctttcatataaaaggcatacagatagaattgcccagttagatttaaggctgtgcttttcctctgcaaatacccagtgtctaatagagtaatgatactctattatgttagagtatcattatatgaccaatctgtagtttctccaaggaattttaataccagaaacacaaaagattctctggtaacttgatgacacctacagtggagcagaccattaagaccagtatatagtaaggcccctattttaaaaccttgtttaaatattttttgccaatgagagaatctttccctttcccgcacccacccccgccccacctttaattgccatgtagcttaggtcttccccaattaaaaggaatacattgttttaggaagaggtgtaagagaaaaccgtgacttttaagtcagatgaattctgactactatttattttgtgacctttgggagattgccgcatgtggggggcctctgcgcagctgtgacatagagatacacctgtttatagaattgtgatataattgagtgagacagcacatgtaaagggcttcagacagtgcccagcagtggtaaacgctctgatatttgcagtcttctctctgtgctcttctcctccacccgcgttcctcatgctgcgttatctgttccgactgggcttactcagaagttaaaactgttgaactaaacgtgaaacctttttgtacctgccaactgtacgttgctctgcattcactgcattaataagtaaagaggagtcaggaccctggttgacctgtatataaaacacacccagtgggtgtatgtggcctttttcttcacaacaaattgctcccccaggattgggtagaatgaaaaatactccactcgcagccttccttttaagtccacatggatcccatagaagattgcatttaaatctcccttcagcctacaaatttgagaattgagctttgaattgtgttagtatgacgtggggaggcgctatcattttaatcattttgtgttcggtggcttgctttactgttcgttgtttgtttgaccatttgtactgctcagatcactgtcctaaaagaacttcatcttaacagaaaatcattttcaggaaaaattttaatagctatttaatactgctgctttatatttcaaaataagttaccattttattattgtaaatttttattgttttaggtgcaaagatggtttgaaaggatttacattctctgcacttagggtaagttgcatcttttatattatttttatggttagagaatttatgttagcttttttttttttaaatgtaatgtcattgtacataattatttatttatgactctacttttaagttgaaggtaattttaaaagttacaaaagtggctttgtggtcatttcactaacagagtaatttattaattttcctcctaaaaataaatcagtcagtcaatcactatttggggggcctattgtgtgccttatactatagggtgttaaagaagattacaagaactctctgttcaaagagcttggaaagacaaagctacacgtgaacaattactggaaaactaagtccttaattgtgtggcaccagattatgggcttcgttagggcaggactcatgtgttatcaaacacattttggattataagcttcactagagtcactggcctcttctttttacctggtagttcatctcttatcacagtaattgacacatagtggatactgtaaagatgttggttagcactgaattttatagttcatcaagcatttt

SEQ ID NO: 62666 - DNA, 1622 bp, Bovine  19866880749384
  misc_feature (1)..(1): n is a, c, g, or t
ntgaaatcacttgatctttttagacatccaaatgacataacaggttttaattcatacacaggaaacattcattacatataggagacaaccgaccttagcagtggttttatggttataaagaatgttacttctgtttatagatgagggttggtttaagttatccggaagtttaaacaataagcagatggtttgtttccaaattgatagcagtcatctggctctaaagaagagcgtacttttgtaaatacatattctttcgtgttctatccaatatgacatgataaaacaatgtactaagttatgttctgctttacctctctgaacataataaaatttaagaaaagtatggatttctccaccacattatcttcttaaactgagagtcaaaacaaactaaaaaaatggtaacaccaaacaaatgctgagatgtagagggagatttcaattgtttcgaaacaaagtaagagagttgagtcactcagggttttctcaacattaaatggtgataatatcaaatataataactgagagtgtttaacttcaaataaaagtgaggaataaagaattacatctaaatttgacctttcgttttattagcatataaaatattttaaagtaggcaagactagtatatgtaataatcattagatgattatacaacatcccttcctcttcagttccttcctctattctaaaaagatgctgattttgtttaggtaatctatcttctttcacaaggctattggcttaactaaatcaggaatgtcaatctcattcctcttgccagtgatttttttagatacatgcatatgataccagagataaggcaatttcatgaaaataaagaggtcagttcatcaagagaacataataaatttaaatatttatgaatctaaaaacaaatattcaaaacatatgagtcaaaaattgatgtaactatatggacaaataagaaaaacccacactagagtcagagacttcaatgccctctacaataactgatggaaaagtatacagaaaatcagtaaaaatatgagcctggaagaatactattaatcaacgtagcctcactgatggtagtagataccacactaaacaaaagcagaataaacattcttttcatatccatacaaaacattccccagggtagactacagtctggaaaaaagagagaagtcacaagttaccattattaggaatgagattaatatcaccactagttcttcagaagttaaaagggtaaccagagaatacaggaacaattttatgccaattaatttgacaacttaaatgaaatagacaaattgcttaaatagcacaaactatcaaacctcacaaaagaaattgaaatagtagttacagatcgtcccacaaaggaaattcccagtctatatggcttcactggtaaatgcttacaaacatttaaggaagcaataattccagttctacacaaacttccaggaatttgaaaagaagggaatgcttcttaactcactataagaggacagtgttaccccaagagcaaaaccagagaaagatattaccagaaaattacagaccagtatcccccatgaacattcctaacaaaatttcagcagactgaatccaacaatatataaaaa

SEQ ID NO: 62667 - DNA, 1441 bp, Bovine  19866880897595
  misc_feature (1)..(1): n is a, c, g, or t
ntttttggcagcgggactcaaatggggtcatgaagccatcgaaatgcacagctcttatttccacatcgcagcctgggccatccccgcggtgaaaaccattgtcatcttgattatgagactggtggacgcagatgagctgactggcctgtgctacgtggggaaccagaacctggatgcactcacgggctttgtggtggccccgctgttcacctacctggtgattgggactttgttcattgctgcggggttggtggccttgttcaaaattcggtcgaatcttcaaaaggatgggacgaagacagacaagttggaaaggctgatggtgaagatcggggtcttctcggtcctgtacacagtgcctgcaacctgcgtgattgcctgttatttctatgaaatctccaactgggcgcttttccggtattccgcagatgactccaacatggcagtggaaatgttgaaaatctttatgtctttgctggtgggcatcacttcaggcatgtggatttggtctgccaaaactctgcacacgtggcagaagtgttccaacagattggtgaattctgggaaggtaaagagagagaaaagagggaatggctgggtgaagcctgggagaggtaatgagactgtggtataaggctagccagcctccatgctttccagggggaatgccagcattggggtgcaagtgctactaaaaagcttatgcagtgaatctcagtttgaacaaactagcaacacttcagtaaccccccccaataatccaccaccgctctccccccgctgcccatctccccccagcatcataaaactagtgattttgctgcagactttggaatgatccaaaatggaaaagccagtaagaggctttcaaagctgtgaaaaatcaaaacattgatcacttgagcaggtcgcagcttggagcgtggaggtcctcccgagattccaggaagtccaggggatgctccttttccctgcagggtgggatttgagctgtgagtaggcaacttacagggagaaagattaacttttttttaaccctttacaagttttaaatactaactgggtctttcagacagcagagcgatctataaacactggaagcactgggttcagagaagtgttacaagagttttatagtttggctgatctaacataaacattttctgtggtacactgtctgctgtttagaactttgtggattgctctcccaagaggtggtgtcagaatctttcagtgcctttgtcataaaacagaattgtttgaacaaacaaaagtactgtacaaacacacatgaggtatctcgtgaatttttcttctctctctccctcttaaatttcaacagctccctactagaccgctgctgttttttccattttacattaatgactcaaaataggtatttttataggaatgtttgcactgcagcaggtctaatgagggg

SEQ ID NO: 62668 - DNA, 1939 bp, Bovine  19866881045857
  misc_feature (1)..(1): n is a, c, g, or t
naaaaggatatagagagcaaggttaaggcctagggagtgtttataataaacaaggtatatataaagaaggcccatttctgtctcttgatgaggtgggaagaaatgagttttgattacaggacagaaagtggagataactggagtcattagtcatgatttcaaggtggcaaaacattaaaagagacttcaaggaggtctggggttggctatattgtttgcttttacaaagttgtgtttcttaatagccatcagtctagatggtatagatactgaactgccaggggcaaaagacgtgtctgacttcatttttttccccccacttttccaattccatgaatcaaaacaacatgttatattttggcaggtgcttagaaaatttagaatccatgccagaatggcattgtaaaacactgagcttcagaatttgtatttgattcttgctctaatagtttatccttgtcactatattgaatttaaatggctcaccatttgtatgctgtcacattatttcatattcttggtgaaccaacagtttatttggaaaattctgatacaaagagggccatgggccaaggtgaggttttaataatatcagatcacagtgtttaagcttggtggccttgtctataccaactctgtatatgcctttctatactgagataattatcgttcagaatgcccttattttcttcataatagtaactctgcttttgatttaagtacaaaaataaatgtgccataattttctccttaaacaaaacaaacaatatctggacaatatctggctaactatggaacacttaggttttatttttcaaaaattggaagggttcttaagataacatcagtctgttttgatcctaataggaagagctgtaggccaggaaagcaattatttccacatgggtaaggccagttccaactacctccccctgaacttgctccccctaaactacctccccctaaacttgcctactttgattatatagctgtatgtggttgagagtattagcaaatgtaggctctcttttgaaaatcaagtctttagatatacagaaaatgtttctttgtacttcatataccaaatgaattttgtgtgtagtgttggggtgagtttagcagcaagtaacttaaacattttgaatttccaaaaaatttaattttttataaaaatgtctgtccaattataatttttaccattttgtttgtacatctatttttctttctttgtttgactcttggctttatcctcaatagatgagtttgcaatgtaaagacagtaaggatgtggcagaacttgagatttgtgttaaatggtgtggttggtctttctggtgatcagcccagatcctaaagctatgaatcacttcattagcataacagatacttataccactcaggaaattccaaggatgtttaaagctgtgtaccaggaacagggagcaaagcacagatatattctttattaaagctcaaatccatagatttcctttttctgaaagtttcatatatatggaatcatacaatatatgaggcttcctaggtatcactacggagaaggcaatggcaccccactccagtgctcttgtctggaaaatccctggacagaggagcacggtaggctgcagtccatggggtcgctaagagtcggacacaactgagcgacttcactttcacttttcactttcactcattggagaaggaaatggcaacccactcctgtgttcttgcctggagaatcccagggatgggggagcctggtgggctgccatctatggggtcgcacagagttggacacgactgaagcaacttagcagcagcagcattctggctaattttattcttgtgagtaagcaatcatcatttatctacagactaagagtctgtgtcttccatgtacattcataaaagtatggcacatagagttaaatcttgaaca

SEQ ID NO: 62669 - DNA, 1292 bp, Bovine  19866881064895
  misc_feature (1)..(1): n is a, c, g, or t
nttgacgcataacgtattttattttttccctttgataataggtttcccattcagcctttgcttgaggaccatcagattttcagggatggattattgaaattaagtaggataagtctgtgtgatcagtcctttaatttccacggacaagtttatgctgtctttcttatactcttaaatttttttaaaattaatttgtttgtttcttttcggttgcactgtgttttcattgttttgtgcagcctttctctggttgcggtgtgcggaggctactcttggttgccaagcgtgggcttctcattgcagtggcttctcttgctggggagcacgggctttaggtgcgtgggcttcagtagtggcggcacacaggctcagtagtcgtggggcacaggcttaactgttctacagcatgtggaatcttcctaaaccagggatcaaacccagggccccttgcattggcacgtggattcttatccactgcaccaccaaggtaatccataagcctctcatattttgaactagagatttaaacaaaacaaaacaaaactgtgattatcctgttcctatcctatcattgtgtactggctatgttaaagagggagataacttgaatgtgagagtgtatttgttcctacagaagatcccggatgttgaataagatggggtaaatgcataggaatttaggttgtaccccttgagaaggagaggttattgttatctgaggaaaaggatgttcccagatatttgggcagccagaggcgtggaactacagccgacacttctggttgcccccagtatctgtgcttttcattttgctcagtaatgaaaccccaaatgttagctgggcatttgtccaaccaataaaaaaggttatatttcccagtctctcttgaaactaagtgtggccatgagacaaactttgcgcaatgtttgtaaggagaagtggtttgcatagatctactgtgaagtttacttaagaggaagttatgtcctctgttcctctttggctggtcttcctctctagcatgtggatgtcatggctcaaggtgaagtggccaacttacaagttaggatggaaatcacaggtaacagtttgcagaacaatctgtcagaaggagtttgggatccctgatggatatagagccaccatcttagactaagactgtctatgttggtctgtggatatagagccaccatcttagactaagactgtctatgttggtctgagagagagaccaacgtttatcttttctaccactgtaactctggactttcaatctgagtacttttattat

SEQ ID NO: 62670 - DNA, 929 bp, Bovine  19866881259817
  misc_feature (1)..(1): n is a, c, g, or t
ntttgtttctttgtaagttgttgtatagtgtatcttactttaaggaagtcttgtctctgtttatctgaaattgtgcaaaagttaacaagtggtcttacttgctttgaaaacattttttatttagcaacaaatttttcttaagatctcattaaaggtcaagatacctgagtaacctactcagattactgagtagaatctggtagaaagtaatctaccagggttttttaaaactaagatacactataaaacaacttataaagaaataaagctaaaagatttgcttttctatgttttatataagtaatttacaaaggttgaagataggtgtatttcaaaattattacatctatccccaaatgaaacatattaatattgtagcatttaaggaagaggaatttataattatgcctttagttcccaaagaaagtcaatgatatgttgttggaggtggccagtaggcagcttgaagtgtgagtctagactcaggaaaagcatggtagttatataaataaaatttgaggtttcctcccgtaggtgattattgaagctattggagattagagtctcaaagctcagaataggaagcctgaggttagaggttgagaaatagcaacatttaaggaattagttttgaaccaatttttaaattaattgatcagttattagttcttccttttaaaagtaaatatcagtaatatattagaaaggatagaagaaaaagaatgtggaggattaacagtttttttccaagttagcaaatcatgataatttaaatttttaaatctctgaagctctattcaataatgaaatctttactaaagttatacgctttatactcaattgtataatcatcttttttaaaggaagcatttaatgaggtacaagcatacaacatggttatatacacacacatatgtatgatggataca

SEQ ID NO: 62671 - DNA, 3792 bp, Bovine  19866880356956
  misc_feature (1)..(1): n is a, c, g, or t
natagcccagtggtatgccagcagtaattctcaggcttcagaatttaagagtatctgaggagctcatcaaaaatccagattcctgagctctactcagagaaattgatttggtaggtctaggtggagcccaagaaaactgcagttttaatagctccttaggcccatcctttgtgaaacactgatctcagattctgcataatccctcatccccctggaagctccttctcttctcactaagtgaactcagatttctagacctggggctccagattttgcctgcctgccagactctgtagtcttcaatgttctgtaggcacctctgctttgtgtgttcagaagtaaattcatcatctcatcccttgccagtgttccttttcctgtttccctgtgatactgattttgctctctgttgtgaccccgctcaaatatcaacctcaccttctacagtcaacccccagttcttatttttctgttttgtgtctcatactctgggcttccccagtggcttagcagtaaagatgggggttccatcccttggttgggaagattcccctggagaagtaaatggcaacccactccagtattcttgtctgggaaatcccgtggacagaggagcctggcgggctacagtccatggggttataagagttggacatgactcagccactaaaccacccacaaccatctcatactcttttccctttctgtttcccttgctccttcactacttcaggcttttattaccttttacccagaatattataataacttcctaacttgtcttactacctcttatgctgtcagagtaaatccttctaatctgcagctctgtaatgtagctccctactctgcagatgaaagatgaacccacttagcttcgcaccatggacctggcatcttgggtgccttctatatagatagccttcttttcctaggaattagacataatatatggaaagctttcagtccatagctgggcttcagtaactggtatttatcattggtgcttcattcaccatattataatccagctatgtaagatcacttgagattttccctgcaattttgtgtcaattgtactcttttttttttttttttttaattagaccactcagtcaggatttcttctttaaaaaatttatttagtttttttggctgcactgggtctttgttactgcatgtgggctttctctggttgccgggagcagagagctactcttcgctgcagtgtgagggcttctcgttgtggtggcttctctcactgcagagcgcaggctctaggcatgcaggcttccgtagttgtggcgcacaggcctggttgccccgcaggatgtggaatcttcttggaccagggattgaacctgtgtcccctgcattgacaggcgaattcttaaccactggaccaccagggaagcccacttgtactctttcttcatcagactttcactgagcttcttcacatctcaaatgccatcttttctgaggaactttccctggtctcccaaccaaatggaatgtgttaatattttgagcctcagaagacactggactttgttgttgatgtgttactgatctcaggcatacttatcttttctcttggttagactctgggctctgtggggatgggcacaggagtctagatctgcttccctctccagctctcctagagtgtcctgctcttgttcactaaatatctcttgaatgaaacttgtgattgtcaccaatccaagttcgatgcatgatactggatgcttggggctggtgcactgggacgacccagagggatggtacggggagggaggagtgtggggggttcgggatggggaacacgtgtatacctgtggtggattcatgttgatgtatggcaaaaccaatacaatattgtaaagtaattaaccttcaattaaaataaatttatattaaaaaaaaacaaaaaaaaagaaacgtgattgtgctgatgacatgatcatcagcatgtctgctgataaaagcttaaaatatgatctcatctgctggttcatcctatttaaaaaagataattcttggggaaaacaaacacaaaaaccctccggatataaaagactgaagctgaagtgactgtggagtggatactttgagcatggtttgcccactttagctttaaagacagctcttagcttagtacagtgatgaccctgtcctgtgaacctggtcactttcttgaaacaggctgtagcaaaccatagcatccttctgaatatcaccaactgccctgtcaacccccaccatgccctttgctaaatcaacaagcagtgttaatactctaagcaagaaaataggtttgcaacatacaaagaaagctacctttgttagagttggttacagtggatttctcctatgtgtacttagcaagctgggtaaaatatgaagttgttacaagtatcttaaccaaacttgaatatgccatgtttttctttttttttttttaggagggtggggttcaacttttttacaattataaccagagctaaattaagaaattaccctagtctactgactttatttctcagagttgttagatctaaaagacaatataactcatgaaaatatatggaaaagtacaaaagctgatgtaaaatggtaatcaggatgtcaaagaattagggtagctgaagaataaaactggctgggctgcagactggcagacagtggctgtgctggtttaacaaggtgccatctaggaaggccattaaatgtacatggtgacaaatcacagccaccatctgccatgtttttttgcttttttttttttagttgcctgaaattataactccattttaagaaattgttttaaatataaagagcaactgcatttgtcatattctgtgtttagagactagattcaagatgtgcttttaaaataaaagttagcctgccaggctcctctgttcatcggatttcccaggcaagaatactggagtgggttgccatttcccttctccaggcgatcttctgaacccaggggtcgaacccaagtcttctgcatcaggcaggcattggcagctggattcctcactgctgagccacgagagaagccctcagttttggctagtaaccatataccttacattcgttacttattgttaaatattctgtgactcttttagttgtgggatccagcaaaaaatgaaaaattacaagaattttttctgcaagaggtacgaatgggagaactttggttatccagaggtaagaatgtaaacatacttttgtaagcagttatttatgataactgatgtttgagaaatatttatggattggtatttttatgtcaaaaaacttccccctagctagatgtgtttcagttagagaaactatcccagcattttcacttcattgctgtccagctccactctgttagagtttgtatttaagttcatgttgcagtcttgggaagtaggcagaaagaagcaaagccaaatacaagaacaccttatttactgtcagataaaattctaagtaagtgagttttccaaatgattaaatgttgtatgaatcaaaatgtaaaaaaaaaaaaaaaattaacttctttataaaaattttcctgcctaagcatattcttaataaaatacttacttactttgatgataaaattattgagtgatcattcagtataatgatacctgtgggggtaccctgcacttgacttgagaaacttcacaatgttgtcagggaaaatgatggtagataatattttataaacattgtagatagtaatatctttattgtggtgtttaacactagaaagaaaaa

SEQ ID NO: 62672 - DNA, 784 bp, Bovine  19866880414051
  misc_feature (1)..(1): n is a, c, g, or t
ntctgatggtttgggggttttggttttgaagtctgctgttttaggtgcagagtgatttgcaagcaaaagtcagttctgtcacagaactacttaataagttacaggagactgaaacgcaatcacacctgtaacacagcagcagacacccagggtgaaacctgatgaccaggaagagaaaacgtgctcggcaactggaaatcccagcacagcagaggcccaggtacctcacggctcccgtccctacttcccgatctctcatcccgtggatgagctgatactcactggccacggcaaacagctcatttcagtttaccacttagctccgagaccatgacatggccttcctctaggtgcagactccgcaggttccagctcaaacgtcgctactacggtgagaccaccccctgtggctggcttctcctccttttgtgaattttttcatactatgttttaaattgagagatgatccacaccccataaaatgcacctttttaaacaagcaaacaatgtagtagtttttggtaaacgcacaaatttgtgcaaacaccagcaccatctaattctacattttcatcacccaaagggagagctggttttcaccggtcagtcctcagagggacccaggtcccaaatcactcagatccccaagcctgaaaggcccacagaagctggagcctcggtgtcaggtccatccagccaagtgcagaccgtcagaggcctggagctcctcttctttccagcttactactgctcacccctcagccatcacagagagccatgcttg

SEQ ID NO: 62673 - DNA, 1820 bp, Bovine  19866880455138
  misc_feature (1)..(1): n is a, c, g, or t
natctccaaattgtgaaacaactgccaattagagggatgtgtaaataatttcatactttaagaacagaggggaaggcatcaatataaattatccttggatactaatatttcttttaatcctatctaattgtatcgtcttaatgagaaaatataattattgatattctatttaaaaatggcacccagacttcatttttcctttttaaataacattttcaaaacaaatatattctatgattctatccagagagtaatactcaaattaaatcaaacacacacacacaaaattgatcttcataaaaaatatttttacagagaagataattttatatttaactttgtattatctttttaaaaaatatttgcttagagctacatttaaaatatctatggggagatacttgccctatagcaaaataactcaaaattttcatctatcatcatgaaaaggtaataactaacgcatgtaattaaactttaagataactaatttccttacagatctatttattaccttttcctcagaataatctgagggaggagaaagcatcattccaatgcatggtgtgtgcctgctaagttgcttcagttgcgttcaactctttgcgaccccatggactatagcccaccaggctcctctgtccacaggattctccaggcaaaaatgttgaaatgggttgccatgccttcctccagaggatcttcctaacccagggaatcaaacctgcatctcctgcattggcaggcaggttctttaccagtgagccaccaggaaagctctactttgagcaatttccagtttggtttcccaaccatttctacaccagcaaaggaaataccaggtgatgctctgcggggaccgctctgggttattcaggtgaacaagacttttgctttagaatttagacagtaggcccaagttgtttcatttcctttgctcctatgaactaggtccctctgagaccagaactcacaacaagaaccccctctgagttctgggcctgtgtttgcctccaaggcccacaaagccactttaattaagatccctcggtggcctggggacccctgtggaaaagcccggaatgccattattgccccctgagcggctgaaagctctgactgtcgccactgccgctggaggcttaggtggcctcgccccacggggagccgtttcctctaatcccgctgcacctccgtggagagcccaccgtgtgaagagtagcacatctacttcaaacagaaatcgggcctcgtctgtttgagctgaggggaaggctgggggtggtgaggagctgcagattcaaagtgaagtcagctgggatgacaggcagtagctccagcccccagagactgaagcggcgacaggaggcctaggggcttccatctctctctgcaccctggggggctctccctccgggggctgggactctttgaagtcagggaggatggttttgacaacagatgggataattcacttctgttcagtttggtccatgcagaccaaataaatccaaacagagtgggggaagttttgcctcatgacaaagaaatgctgccattttgttacacccaatgcttccccgctcccaggccacatagaggaatttggttgaccctctgtagcctttaatagatggtgtttgcacagaagaaagcatctgattctaccatagcacttaactgttgtggtgagaaggatgttcaccgagggacaggacggccagatttgaactccagctgcaccacactccatggcatggtaatgctcagcggacactttggtgttgccaacttggacctctcaacctcctttctctcat

SEQ ID NO: 62674 - DNA, 2100 bp, Bovine  19866880456103
  misc_feature (1)..(1): n is a, c, g, or t
ntgctgaaaaagagctaaacgataaccttttcttccaggaataaggatgcctctggttgtgcacgagtcagtgagagtaggagctgtctcatagccttgcagacaagacctgcattgtccaaggttgctgtttccgctgccattccctggttcccctctgccctcaaaagatttgtaaagtggtcagggccatgatgttgcccagttttgctaccaactttcttttctcttgatcttttgtttcaatgtctgctttctttcgtctatgtgctcactgaagcctaattgtgggggtcaagctataattagtttatatatgaagtttaattcactgtggctcttctggcattagactcaaatgggctttgatgtctggctggagctttgatccctgtccctcgaatggtggtcatcaccccaactcaaaagactgccttttatttttttccctcctattaggagacagcttttcccaattacatcatttgtgtttgtttggccataaaagctggaaggcatcattttgttgcattgctctatagctaaacgtgcaattgatgctccttactttgctgggctgcaaaaaaatgttcactgctggataaggcatttgtacaatgatgctcagactttgtggggggtgctgttgggagtcgttctgcccaagggcaaagcgtcagactgtgtcatctgagggacctttcctggctttgcccaggaaatgtctttaagtgtaagccacatgactgtgatatattcagtcaagattctttttcatgctggcaactttatcttactctctagatcctccgggtggcagatccaccccgtctttaatgtcacacattctgagtgtcgattagcagcctttctgagaagacagaagcctccagggaaagcaaaagaactaaagagagctgagcaatactagaaaagagataacaaagtagcattggtggaggaagaagcaccagtacttgctttaaaaagaaaaggaaagaaaaatcaaaacagtagggcaaagtgagatcctgtagctgacaggaaggagcagcaaacagtgggtgattaccttcaactgcttcccaaatacctgcaaccaaaacaaagactcaaagaggaaagaaagcctaagaaagaaagactaaattggagaggagaaataggctgttgggttaaaaagagaataggggcaacccaaccaggcacacttaatctgacaacattagttttcctggaaaaacaattacagcgttgagctccttggttctaacttcacttgacagcctgagtttgttttaattggtgcatgaatgaacagcattatttattaatgtgtaatggatactttggaaagcataacctcttttcctatttgtgaccattttattggtggagccgtttgaatagattagttttaatatttaaacttgctgggaacactttttcatggacatgtacaagctgttatggcaaatggtttgctttgggctaatgagtcagctcgaagctgcatttggtgaggagggggctggggaggtttagagggtttggagacacagtgacttgtctgtctactttaacaagatttattagtagtgtgtaaaaacatgtttcggcttttttcccccctctcgactatataaatatagttgtcaatgtgtgacataacacaggccccaataatagactccacccagccagaaggaatctaattcagaactagaaagcaagaaacttgcctataaatgaaaggcacaagacaatgacagaggacaaaggggtgtggcatttggcaaagaggaccagtcattattctttagtgctttactaaaataggaaggaaaatttggttcctttattatcaagtactgtgtttggcacacagtaggcataaagcttagatgagctgaagagaattaattttgtatgctgatgagcacccaagcataattccatttttacatttttagatttaatatacaatctagttaatggtgaatcatggttgtagttatagttccaattatgactgtgagggcagcaatggggaggtcaatggagagtggctagagaattcttatttttgctttttggtaa

SEQ ID NO: 62675 - DNA, 1458 bp, Bovine  19866880489925
  misc_feature (1)..(1): n is a, c, g, or t
nctttgaatgaatcagttctacagtcctagttcctcgtcctttcctctgtgtcccacccatttccttcaccaccagtttcctgagagaagcaccttcgttccttgcctgaagtgctcactacaactgaagtgcttgtagtcactgtttgcagtcccattgctctcctaaaactatttccctctgtggtcacctggagccatgtaattaccttctctctgactactctatctcatgcctggtccttctcaattcttcttaataccgttgcctacctgcttcatctggaaaagctccctctgactttgaaaatgcaatagtgcctcattctgttccagcctttctgatcttcctctgactgccttgaagattctttctcctcttctcaccgctaaatgtgaatggcctcagacttgtcattgctccattcccatttcccctggcattccctcctttgatgatctcctctcctgctgttgcttcaattatcatattttggatagatgacttcttggctctagactcacatttccatctggcagctgagcatttccacctactattttctaagtaacaattctatctcaaactaatagtctttccccagatttttctattgctattaaggatatcactattttcccattcatctagagttaatttttgtcatctcacaattcttagtccttaagatctaagagatggccaaatactatagattctcaatgagagattctcacattctcttcccttcttcttattcctactactaccatcagagctcaaattcttggtggacactaaatcttctgcctcttttccgttctcactgtcgctatttcagtaatctcccagtgtcttctttcatgtccccccacttcccatccctacaaagtctttttgccagataaatcttccaaagatagagctctggtcatgtcacttcctaaaacttccagttcctaactgctcaaatactgaagtccattcattatctatatcttgttatacaaccaccaaaccaaattgctctctgttccatgactatccaccatgcttatcctcttcgaagtgcctactcacggcttctctgtctgaaatgtcctccccaacatcaaacttagttccttggttttccacactaatcagaagcaatctgttttctccaggctttgagtctccagaaccactagctaaatatctttaataatttgttcctcaagttacttataatattctgtacaataacatgtaataaaacatgcgtacccacctgagaatctaggaacaaagataagaatacatccaagtagctatggtcaaagaggtcccatgataaccaaaacatctcagttcttttctccattgggtgatcacagagtcagaaacccatgaatgtatgtacagagggacagaagggagtcacacgaacttttattgacaacagtagtaaaatatta

SEQ ID NO: 62676 - DNA, 2173 bp, Bovine  19866880525489
  misc_feature (1)..(1): n is a, c, g, or t
ntttattgtaaaaatgttacgaatttcagacaagagtcttcatatgaaagtcagtatacaactttggacacccactgaatccactcagtcttccatgagtatcagggaggacctcgggcagggcccctggggtccacgggaccagctccaacctagtgcagtcctaaccagcctttggtgaggagtatacggaccagagggctccttttttaaagctcttattaaatcttttcacccagaggattcacaaaaaagcaaccattagatatctaaaagcttccatcaggagctgttaggaggaaatggaatttaacaagcctccttcagactaaacatggatacttgcaagcttggtctttaatcgtcagttccactactgggagagatgacatctggctgtcaccctagctctttatgctagtgaattacatcatcttgggcaaaaccattcacttctccaggcctcagttacctcatctgcacctagaagatctcagaggtctgagcattaagggtctatggttctaatctgagaattaagactgggcaggtgtagataagcaacaaacacctcccacccatcattcattctaggggtgctgatgggtctctactcagcccatctctgaacacatatcctgtgccccttataagtttctgtagctcaaaggcccatcaccagacactcattaaatgccacattataatgaaaacgacacctggaaccataatcacaccttggtggtgtttagtcggtaaatcatgtccaacttttgtgaccccccaaggactgtagcctgccaggctcctctgtccttgggatttcccaggcaagaatcctggagtgggttgtccatttccttctccatcttccaaacccatggatggaacccagttctcctgcatgcaggcagattctttacctactgagccaccagggactcacccctaagcctcagcaatatacattatctcttaattcccacactattcccatactacttgtaacatagataagcaaactaaattaaagcaatttacttaagatagttcaattcagttgctcagtcgtgtccaactctttgtgaccccaaggactaaagcatgccaggcttccctgtccatcaccaagtcctagagtttactcaaactcatgtccattgtgttggtaatgccatccaaccatctcatcctctgtcatccccttcacctcccgccttcaatctttcctagcatcagggtcttttccagtaagtcggttctttgcatcagctagccaaagtattggagtttcagcttcagcatcagtccttccagtgcatattcagggttcatttcctttagggttgactggtttgatattgcagtccaaggggttctcaacagtcttctccagcagcacagttcaaaagcatcaattttttggtgctcagccttctttatggacaaatcctcacatccctacatgactactggtaaaaacataggtttaactgcacagacctttgttggcaaagtgatatctctgctttttaatattctgtcttggtttttcatagatttcctgccaaagagcaactcttttaatttcatggctgcagtcaccatgtgcagagatattggagcccaagaaaataaaacctatcactacttccacttttttcccaatctatttgccatgaaatgatgagaccagatgcgatgatcttagtttttgaatgttgagtttcaagccagctttttcactctcttctttctctttatcaagcagctctttagttctcttcactttctaccattagaatggtatcaccttcatatctgaggttgttgatatttctctcggcagtcttgattccaccttgtgatttatccagcccagaattttgcatgatgtactcagcacagaagttaaataagcagagtgacagtatacagccttgacatactactttcccattctggaaccaggccattgttccatgtctggttctaactgttgattgacctgcatacaggtttctcaggagacagggtttgagttccagttcattttcattaatatttgagtgaaattttttgagcctcaaatttcccatatgttaaaccaagataagaattactagtgaaaaaaatcgctaggaaagtattagaattatataaagccataaaa

SEQ ID NO: 62677 - DNA, 753 bp, Bovine  19866880535415
  misc_feature (1)..(1): n is a, c, g, or t
nagaaagcttttgcctagagtctcaggtcaaagtcacctgctgtataaagagtattagggaagaggctaaaggaaagtaagaagtttcaaggggaaattgcaattttaaaatagcttaagtgtaaatccaatgctactgattttctccgcttactgtggagcagccctagagtggaaaaggatcaacgcatatagcaattaacaaggtcgtttttgcatttgtcttgtaagtttattccaataaccccgtgacataactggagtggatattattaaccctgttttatcaacaaggaaatcaaggctcagtagttaaatcaagatgatacatcaatcaaatcaagataagaactcagttctattcactttgttcactctaagcgctttggaagaaatggctcttttatacaaattatctgcagccaagcaattttttaaaaagctcttaagaaaagctgccaatgtgtgcactgtcaacagaagcatgcctaataatcttattagtggaacaagattcttcattaaatttgttacacggttagatggggggttggtagcaggtggtagatactgaaaggagctcctgatagctaaaagctgttggcaagagcatttagaatatacaatgatggatgacatagtattcaatttagggaaggtggttgagtctaatagggtgacccaagggtcaacctcaggacttagtgctatttaacaggtcataggatttttgcagcaggcataacaacagct

SEQ ID NO: 62678 - DNA, 617 bp, Bovine  19866880597809
  misc_feature (1)..(1): n is a, c, g, or t
natttcatttcattcctcataacaggccggctagagatggtaatataaggataaaaatctccctttcttcctgtttacacataaagaaaaactgaggcacagagagattagggaagttccataaaaaaagaaagaagaaaagcaatttggcttaagctgtagggttgggacaaaaaccccacgggactaatcttttaaatccagcctcctaactttggtgagctgtctctcttttaagccagcactactttctctgctttttgaacactgaaatgttcattagaagaaatctcactctttctcgatctcccttccttctctcattaccttgactatttctcaaacatttctcatttgttcatttatttgtttttttgcttcaatttgcatcctttccccctttcttcatgtctttcattagccattaccacagctgggagcatttatttgttttttagaaagactttggcattcttccttcctttgcgttttctttgtatcatttttaaaacatgtcccaccattctcttatcctttccaaagccagaagatctttcatcagcttgaccattcctcttacatatttatttcttcttgtttgaagaaaatttgatctc

SEQ ID NO: 62679 - DNA, 1667 bp, Bovine  19866880614008
  misc_feature (1)..(1): n is a, c, g, or t
nacatccagtgtagatacagcatcctcactgtcatttgaagtgcttctagttctttcctttgcagagttatgtgccgtgtgtctttcctcaacacacttggaggtacagctgcagcctccatctcagaggaaacacaaactccttcagagtgttgtgaagcaaagtgaatatgttgaggacccagacatctgggtccacattggggcttcattgctttcctgcttggtgtgctttggtaagtcaagctctataaactccagtttctgcattgtaaaatgtgcgcaacaatatagatttcacaggctcattgtattaaatgagagaacatacatccaatatacttagacagctacaaagaaagtccttgaagattatttttcccctagtgaatgcatctagaaaatcctaaaagtgttagtctctgagtcatgtccgactctttgtgaccccatggattgttcttctgtccatggaattctccaggcaagaatactggagtggattgccattcccttctccaggggatctttccaacctaggaactgaacccaagtctcctgcattgcaagcagagtctttaccatctgagccacagaggattgctgcatgctatgccaccctcaactggggcatatccaaggagatacctctgcatggaaaagcctgaaaatcattcattcatgcctcagctccttctttcagcatatattatgtatcaagcatttggaatataaaaacaaataagacacagtctactcctgagacagtcttcatgggcctctcacaatattaaaccaaacagcaaagatttcttttatggtctcaaatttctgccctgccacctgaaatcagctccttgctttcatttcaagtccattgatcagcacactgcactgacaagcagactatttaaaaaaaaaaagactttatttctttattaattttaattcatattgtttatcactgcttatcatcttcaaagagaatgattgcttatggaaatttaaatctgtacattccaggaaaaaagatagaaacatactcttctctaatacttagtgataccacctgtggtatttatagttggtattgcattgattaatatggcctggtccctagtatgacccaatgttaacttgagtgaagcacagttctttctcagagggtagtagtacagcatttactattctactgtcctgtaaactaagatttgaattaaaaaaaaactaagagtagtatcatttgtagccttggggtgaaataggcacttcccagcatgattgttgcaggagagtggaactggactgaaaagcataggctttggcatcagacacatagagtgaacgctcccacctgggccactcgtgctagtgaacaactcaacgctgtcggtgactttgggcaggtctttcgatctcttctggcttctgtttcctcctgtgtaaactgagcatcccaacagtacagagccctctgacctttggtgaggattaagtgggatattgcatgtaaaaggcctggcccatgggagcagccgttgcgaagtggttgtcctcattgagtcaggtgtggggacccaggaggatggaatttggggatgaatggctttgcctttggagattaacattcccattatcatcacatatatcaaccggccagtctttga

SEQ ID NO: 62680 - DNA, 1235 bp, Bovine  19866880672823
  misc_feature (1)..(1): n is a, c, g, or t
ntcccttgaatagttgacatgtccttggtgggaagtctcctcactgttgtttttcctggtgcacatacatgcatgtctcttttgctgtctttgcccagggcctcctctgttggtgtgctgtagcaccggtctttaatctcccagtcctatgaagccctggtgttaccctggagtattggttcctgtttgaaccaagcctggtagctaccttctgcagacctaattctttcatctgcaaattgtcataggaaacaaccgttaaacctgagatctaggtcagctcttatcagctgcccagggttctgggtatagatttgggctggtggaggtaggtgcccactgtgcatgtggaagccagattttggcaaagctcggggagtaatgaaaagtaacattcgtttcacagttctagacttgaacagtctattatgggttgggtttacagttaacatagtataattttttgattattacacataaaatttatttgtatttttcctcgtctcttcataggcactggtttgctctgtctttttgaggaaaattaaggtgattccctgcccctgtcccccatcaaaatttatccctggaagcctgatgaaccagttaggagaatctggagtttctctgtaagtttttttttttaatgtatttttattggaataaagttgaattacaattttgtgttaattattgctgtacagcaaaatgactcagttatgcatatattttatacattcttcttcatattattttccattatgatttatcataggatattgaatatggctctttgtgttatacagtaagactgtgtttatccattctgtagatatcagtttccatctgctaatcccaaactctaaatccaaccctctccaaatcccctccccgttggcaaccaccggtttattctctgtgtccctgttaggttcttttgtgtcatgttttagattctacatataaattataacacacggtatttgtctttctctttctgacttactccacttaatataataatctctagttgcatccatgttgctgcaagtggcattgtgtgcacgcatccatactaagtctcttcagtttgtctgactctttgcaatcctacggaccgtagcccaccagactcctctgtccatggaattctccaggcaagggtagtggagtgggttgttgtgccctcctccaggggatcttcctgacccagggattgaacctgcgtctcttat

SEQ ID NO: 62681 - DNA, 764 bp, Bovine  19866880698992
  misc_feature (1)..(1): n is a, c, g, or t
ncctatattcctgatacttgaaaaagacagatctatcagtggttcccaaatgccagttcacaaatcgtgcgaatcaggttattaaaaattccttggggaacttgtcagaaatacagacccttgggctgtgtcctgaagcttctgagctgggcgcgtggatctgtatttttgctgcattgctcaggtgattctgcgaagcaacaggttttggcctctttggaaccaatgacctctcaatgttcttcatggtcctaggatcttaggattcagtgtcttcatcttcaaaattaagataatagtacttgtccctttcttactgcacaaaagagtggggagaattaatgaggcaattttcataagtattcttggaagaaaagtacaatttaagtgtaatgtattgaggccagaattgaactagatcgtctcagcaatgcaaattgttagttcagaacaaagaggagactcaggtccatagagagcattggcaggctgagttttgctaccaggattccagttcccaaaagtgttgatccacctttggcctgaactcaaggcccgtggaacccagtaccttactgtgagatttacaaatcagggacttggtggtgacagaggcaggcaggctggacagggaggtttcatttccttgagctgcattaacagagaaccatacattgggtgacttaagagaaatatacaccctcacagttctggggggctgtaggagaaatcatagtgttggcagggtgaactcctcattaagg

SEQ ID NO: 62682 - DNA, 2452 bp, Bovine  19866880709468
  misc_feature (1)..(1): n is a, c, g, or t
nttttactttcatgcactggagaaggaaatggcaacccactccagtgttcttgcctggagaatcccggggacggggaaacctggtgggctgccgtctatggggtcacacggagtcggacacgactgaagcgacttagcagcagcagcagcagcagagggtgataaacccagaataacttctcagtcccagtcctcttccctaaattcaagacacaaaatctaagaccctcctggacatctcacaggctcctcatattcaacatgcccaaaactagctcatcatctccctaaaatgccaagttcatattgctccctttattcccttttttcgtcagaggcatcactctccacctgttcacccaatctaaaaacctagaaatcatcctcaactctccctctatttttcctcaatcccccaaatccattagtacctatgacaaaagctctcaggttgactcttttccattcatcccacttgctctgccttacttcatgttctttatgtctcacatagacatttcatggatctcagaagtggcctttttctctctccccaatctcatgctcctcccctcctcctccaccacactatcaccagaacagttttcataaaggacaagtgaaaacctcttggcagtcaaagctcttcatgatgcatccttgcttacctttccaaccttgtctgctattatatctcctagaacttctttttacccacttaacaacattctttgccagcccatctgtatatgttctttcatccctccaatgcctttgcgtatgttctttctttggtttcttttccttgcaagctatctcctatttatatatccttcaggtgacagctctaaactctccaagcgactctagatggcctccttctacacttctactctgccctcctataacccatttttatcaccatcctgcgctgaaacctttacgaatgggctctgctctaatcaagaaaaagcattgccttgtttttttctgtgtttctaacaccttacaaaggaacatagtaggggttctgctttttggacaaattaattaaccacatcaaaaggacagctcacaaaaaaactataagggaagagaagatgacattaaagatccttacacatgttccttagttttggagattatggaaagatttctccttagactgcaaatctttaaaggttttaccaacttcaatttgagcttttaaaaaagcaagagagcttttaaactactcaatcctgtgataaacagacaatgtgattcttccccactccatactcattataatgcacatgcacttaccctttctcactgctaatctgaaagggttttcatgggaggagagaaggacaatctttaaggaatcatatgtaataagattctaaattgaaagtttcaaccaaggcaccaagatacactagtatgatattccagagcaaaatctgagatcaacatccaaattttcaatgaaatactctaaacactggttatatgactgttaaatcaaacctctgctgcactgaaggtatccttgggccttttaaagatcaagagagcttcagggaggagatttctttggagcagaggtcacttcccctcaggtcaacagagtgaggcctcaaacaatcacccagagctaaacagtatctctccagaaaaagttaagaagagacagaggagcatccctgctgaccacaagagagtatcaaggttggggtcagcctgcctccagagagtctctcgccaaaactccaggccatgcccaagaaagagtaagcttggggttgtctggacaccaagtgataaaaagagattatatttgatgatgaaacgcaaccacaagaatgagcagaaacatattgggatggctaaaagctcacccagaagtgaaggaagaacttcccccagggaggaaattctaaaaggaggggatcacaaaaatagatttgctttctgactccagtgcattcatgacactttgggcagctgactggttacgcacaattctgtcccaattggaagtcctcccagagccaacagctgtcctccagctgggaaggaacgatggaactcttcccaaaaattaaggtaaccgtgctcttcaggcagatggagactggaacccggctactgaagagcataaatataaacatatcggagaaagaagtgagaactaaaatgaaacatccataaaaagaaaatccattttgctccatcatcaatgccaatgaaagaaagttgtcgcctaagaaaagtaagatgaggggagggaggaaggagagaaacacacatgactcttacccaggccctgattctgctgttcccactggatggcatctggcacctggaaggtgaccccctccaaagagaccacgttttcctgctctaagccaggttcctgagacgtgatgccagggagcgtaacccaggcagctcgggtcacccaagg

SEQ ID NO: 62683 - DNA, 3024 bp, Bovine  19866880714454
  misc_feature (1)..(1): n is a, c, g, or t
nctcaacagctgctgtgagtacatggcagtgataataagatcctttcttccactccagcacacacacaaactataaatcagggaaacttacattctaatcagtaaatccacatacaatgaatgtcgttagtcttttactagtaaagcaagaaattgtatgtgtacattaaaagagtttggcaatacccaaaacaccaatcaaggtaacaagaaacgaagctcaggaagacaattttggggttgccagacttagtaaattaaaatagagaatctctattttatatttggaacatacttatgctaaaatgatttgtttatccaaaattcaaatttaactgtattttatctgatcatctttgctgtattaggtcatcacctggttctgattgataaaaaaaccctctgtatcagagaggatctggtcacatgaagaactggataaccaaccccaagagccagaagtggacaatatccatgtaaataccacccagaagtgagtctttgcaatagaatctgagcattgtggtgtccttggtaagattatcagtaaattgagtagaaatgctccacagtacagcacctaattttctttaccaagtaccaagtactttatctgacagcttgatccctcatgtatgttgtccataaggcactgctgaaatgagtgtatgtgagctggagtgtgtgtgtctgtaaccaaggtaacatcatcaagggaagtaccacttaagggttcgcattaagggctcttgaaaaccagctgcaagacttcctcagattctgcacctctgtttgatgaggatgttttttgtttgtttatttttgttttgttttcatttgaaattacaccagcgacaaccatgtgaggcaacagaacaaaatgaaatgaaagaggcacattaaaaaaaaaattcttcttagaagtctgtgtttccctggaatctcctcaaaacatttccctcaactttctgcaagttcttatttttcagtgattttcccttcctttatttttgacccctttaaaactccttccttggattttgttgttcttataagtctcccaaggcagccaacaaagagatccagccacagaagaaggacaggagctgctagagtcacagtcatttgcatattggatattttccttctcactgtaaaagcctgtcttttcttcctggtcttcctaagtgtttattaacacgagttttgcagcatcttgcagtgttcttctccccaggtcctccctgactcaaattctctgtcaagggctttctgtttgcttttaatttcttaagttgaaattcctaggaatagacttccatatgctaagtataatcaactcactctgggtattcaatatttgatggttgtggtgatgatgtagtaaataaggataatgacattagaataacgttaatatgacgttagaataacgttagaatgacgttataataacattagaatgacgtcagaacaagctgttgaaattctgatacatgttttcattgcattcaaaaccttcaaacacttgacaggatctatttcagtactaatgagcttagatttctaccttgtactaaattatgtgtttaatatgaagtttattgggaggacaagtcagtagaataaatccaataaaatgattttctttaagcaaagttttggagtggcaatttttttttaagtatagttgatttacaatgttgtgttagttctggtatacagcaaagtgattctgttttacacatatatatattcatattcttttccatcattgtttactgaaagatattcaatgtgttatacagtaagactttgttgtctatctactttatatatagtagttagtatctgctaatctcaaattcctaatttatccctctcccaccccctttcccctttggtaaccataagtttgttttctatgtctaggagtctgtttctataacagcaaatttttgtacactgtagttgcttttaactgtcaacacaaagtccgtaatatttacctacctttattgtttgactcttattatgcaaacacacagatgaatcctcttgtttctctgctttgccctaagagacctattataattgttgaagcagagtatcatatgctttatagtcccttctttttaaaatctgttattttctatattcccttattaagtgttagatttctttaggccttgaactttctgattctgttctaacaaatggaattttgactgttgccttgaaaaagcaagataagagatgaaagagctactgatgtaggtacaaaagcaaaatgttcaccagtacagctctttaaaaagaaactttttagataaagtcatgggtgaaaacatttataagaaataaatcttccttttttcagccataaataatgtccttgtgagactgtcagtaaaaaaaataaaaaataagagatttgaacatcaaagatctaatgtcttctgtggaatataccctttaatcctaagtgagttggtccttatgaataactctattcaaaaatgacatctataactctagaaaagataagaattgccttttataaggtcgaagagtttaactccatcttttcttttttttacgtacctaacgatagctaaatcaatgactttaatagattcattatattaaataatgagcatgagatatttattattgacataggtgtgcatgtatgtgtgctgtgtacttagtcgctcaatcgtgtcctactctttgccaccccatggactgtagcccaccaggctgctctgtccatggagattctgcaggcaagaatactggactgggttgccatgccctcctccaggggatcttcccaacccagaattgaacccaagtctgccacactgcaggcagattctttactgtctgagccactagggaagccgtataggtgtacacacctactgcctatgttgcaaagaaaaatgtactcctttatgcctctagcaaggacagaatttttaaagacggctttaccgggaaggcaaaactcaggcccaa

SEQ ID NO: 62684 - DNA, 1089 bp, Bovine  19866880717350
  misc_feature (1)..(1): n is a, c, g, or t
natgctcttgatggactcgatgaatgacactaggccctttgccaaacactttgtcctacattagacagtgaggtcactgtagaaaggggggcaagatttcaggagtgccatggcaaggatgctcaatctcatcacagggagagctcgaattttaaagtcaacatttacagccagtcttttacattaagtacgccttcccaaggactggggaagggagattcaaaatgtctcttcagctgctgcctgcagaaagggttccaaatggtctgttggaaatgactcaactaatgtttagaacactaatcatctctaaagtaccctgtaaaaaacaattcacaccacatcactcaccaaaaatatgctactgaaaaccctttgaagcaataactctctctgcattatgcatttattgggaattaacgaccaactggaatctatggactttgaccagaaccagagctattaatgcacaggaaaaatctgacactctcttgatctttccaaagctagcatccttcgatgtgtgcagaatataaaatcctggatgctgcattatacgtgagttctctggttatttatgaacagactggagaactctcttgtgaccacagctccagatttcaagcaattgaaaacctaagtaacaggatctgtcaggaggatatttacagtctaaaccgtgttgtccacatagagaagacaaagtgagactctgaccaactgaaacataaaactgccctacggtctacagagaggaaagatgccttctatgtcttcatagtaagtccactggattacagttcattttaatcaatagtgaattcatttttgaatcttacctaatataatcacaatttcacctttccttccacttttcctgagctgtatcgtattcactctttcattcgtctgcctacactgaaaaggctgaataattcatctccagagtctcctaaacaggatagtaaaagcagcatgaatgagtcagcttttgcagttacttcctcataactctttgtcactaatagggaatagcttgttcttggctttgtacccccactgcacaaatttgctgttgaactcgtggaa

SEQ ID NO: 62685 - DNA, 1353 bp, Bovine  19866880751860
  misc_feature (1)..(1): n is a, c, g, or t
ntctaaggaggcattttcctaagtctataaattctaggagctcctttttttagctccccaaaatgactattttagtcaaatcttgggtccccagctgatctgggggcaaactgcttaggcaataagtatttaagttacctttttgaaaagcaatgatgagaaagttggaaggatttataaaatgggtcaaagccttaactataaatgctcttggagagagcagaatcaagatggtctttaaagccaaggcattattctctgccagatgggaaaaggcacagtattatggtcatgaagggctcttgtggatctacatggttctgttaacttcatctaaagccagactccttggtttgccaaaagtagctactatagaccaaaacgctaaagagcacttggggatactataaatttgcttgacatgcgtcatttccaaacatttcctagtccttgtgggggtggggggtgggtgggcattcttggttctccaacaagtgagaatgggaggacatattcttggagagctgcatctattacggcacgtcgatttccataatcaaaaggcagcctttactattttatattattagacaataaatcgctcttaatgctttgcagatctttatctctggatacatttggaacatagttgcatacctactcatgacgtgaaggaattcatgatatgaggcctcttatttagctttcagaagtctcaaatcagatctgaaacttaagaaggaaaccaatcaatcggtgattataatgtgaaagtgagtgttagttgctcagtcgtgtctgacactttgccacaccccatggactgcagcttgccaggctcatctatttatggaattctccaggcaataatataggagtgggtagccattcccttctccaggggatcttcctgacccaggaatcaaacctgggtctcctgcattgcaagcatattttttgcagtgattatttaatatttagttcagttcagttgctcagtcgtgtccaactctttgcgaccccatgaatcacagcacgccaggcctccctgccatcaccaactcccggagttcacccagactcacgtccatcgagtcagtgatgccatccagccatctcatcctctgtcgtccccttctcctcctgcccccaatccctcccagcatcagagtcttttccaatgagtcaactctttgcatgaggtggccaaagtactggagtttcagctttagcatcattccttccaaagaaatcccagggctgatctccttcagaatggactggttggatgtaattgctgaatcaacgcagagtttacgtatcctaggagcccaattccattagcagtgcttt

SEQ ID NO: 62686 - DNA, 2197 bp, Bovine  19866880784147
  misc_feature (1)..(1): n is a, c, g, or t
nttgtttgggaatgagcctaatgatttgtcattgatggacaacagaagcagatttcagagaaccaagaaaaaagacaatgacaagctgtgtttggcaaactacccttgttactcagccagcaggtaaaagtgttacagggcaagtgttccagctcttggatttgaagtcacatagccaaaataaagttatcaactcttacagcttaaggagactctaaagatctagtccctggctatcaggtcaggatctacctgcagatatcaaacccttcgctagaagaccaacaagccagttgcagcttccaagtatctttccatagttactgacatttccactgagatgagaaatactgcagttaccacttccatccaagcatgtatacacatacattcactcatttatctcagtcagtcaacaaccactttttgggacctccctggtggtccaatggttgggagttcaccttccaatgcagggggtatgggttcgacccctggtcagggagttaagatcccacataccttgtggccaaaaaaccaaaacacagaacagagacaatattgtaacaaattcaatagagactttaaaaatggttcacatcaaaaaataaatagaaatggttcacataaaaaaataaataaaaacaaaatcgagcatttaaaaaaaaactttaaaacaaaaaccaccacttattgagctgctaaaatgtgctgtatactatggaaggtcttaggaatacaaagatgactaaggcaggattcctcaccttcaggtagctcacaatcctgtaaggcagacagacattaacaaatacaataaaaccccatcagcaaaaagccatgcaagtataggaagtaaccaacctatgagaactctcccaaataagatgacatctgcctcagctgctgcagaatgagttaagcatatcacagatctatgagggagaagggagaaaaggaattccagacagagaggcctggatatgcaaactcttagacacatggcaggacacgacatgatcaggttaagaagcactcagtgcggcggggaggagaagcccacctggcagaaggaaacacaacagacggtaagctcacaggaggtctgaggctcacatgtgcagagccttaaaggccagaacaaagagacttggacattctcataggcaaatgaaggagtcaacacaaggttttaatttcagagggactaggctgtcttattcaaattgactgtttctcagaagttggcctaacaccttctctcacaatatatatatttgttcagtggggttgctgctgctcccaacagacataatcagtcttgtgttttagaaggatttcactgaagacagcatagaagtggactggaagtggaagagactgcaaaggaggaaactggtaaacacgctccttcaatagtctgggcaagagaggatgctagcctaacaaaggtgggatggcaaaaaaggatatgttcgatagccacttaggagaaaattaatggggctttgctatcaactggatgtggaaactgagggaaacaaagaggaatcagagataacatctcgatttctaacttagacaatgaatgtttccaaatggcttggtacctcttatcagctcaaacagcagtgagtagtcaataggatcaagatcacaggtggatgggttagacttggacttttgagtcaaaaaggaaggtggacccagtacactggaagtgtggacacagaaaaatcataggggcttctacatagtgacctcagttcattcaaagcccctttcagttcagttcagttcagttgctcagtcatgtccgactctttgtgaccccacgaatcgcagcatgccaggcctccctgtccatcaccaactcccagagttcactcagactcacgtccatcgagtcagtgatgccatccagccatctcatcctctgttgtccccttctcctccttcccccaatccctcccagcatctgagtcttttccaatgagtcaactcttcgcatgaggtggccaaagtactggagtttcagctttagtatcattccttccaaagaaatcccagggctgatctccttcagaatggactgcggtccaagggactctcaagagtcttctccaacaccacagttcaaaagcatcaattcttcggcactcagccttcttcacagtccaactctcacatccataca

SEQ ID NO: 62687 - DNA, 1096 bp, Bovine  19866880795802
  misc_feature (1)..(1): n is a, c, g, or t
nggaaactaatttcaatcaaaactaaatttaaataataatcaccttatgtttttaatagttatactaaaaaataaagcacaatattttatgaaggaacttttgataaggctttaaaagattgaggagtagtactaatgaataaaatttccacatctcaaaaacatagatgccaaaatacaatgaaattaagctttcttgcttaattagattattctgctctcttatcctggtatatattataaatatcaagtcctctgtgtgacttttagttacagaagatcaaagtttttgtccctatttaatctgctttccattataattatatttattcactcaaatattgaaaacctactatgtgctagattatacgttaattgtttaaagaaaaaccctgtgaatttctatgattattagcagtctgggtggcagggccagtctagacccagaaatgatactcatttgtaaacaaaagtttattataaaataaatgtgtcatgtccccatttccacttccactcccaataaacagttcgttgtaagaaggggaaatctctctaggtaatatctgtgctcattcttcctcactaccccaaggcctatccttatcttactcaaagccacatttacctacatgacacctctcgtccctgttccctcttttctagagttaaggaacaagacagtcatcccagcccccaaaggccaacccaactgtctcaattatgagaagatgtgacatttgggatagaggagtctgtccttaaggaaaacctataccaaagtacctttaatgggtttataaaatttccctctgaaaccaaatctgcagaatgaaaggcagcaattaccaatgaacttgagacccagacactctagataacacagatctgtgcttccccaaatgattgctgctaacaacacacactacagagacaccagctgattagcagcctcagttgtttggtgttatgtttgcactgcctagacctcagaaattcagccttatacctaagtggacaatacataaaaccaagggtatagtgacttgtgccagaacctatcgcctcctttaatctctgtattttctctgctctt

SEQ ID NO: 62688 - DNA, 1094 bp, Bovine  19866880797127
  misc_feature (1)..(1): n is a, c, g, or t
naaaacttcccttgatcttgcctctaaaatagtagcacctggcattttctgtcttcttgctggttttaatcagagtgcagtatattgcatatctatttatatatctctttgtttgctgtatgtctcctgagtgacatatcagctccatgaaggcagagacattattgtggtattcctagtgcctggaactaggtgcttgataaatatttgtttaatttttggaataggggcaggtattaaatcctatgaaggtaaaggatatataagaatgaaaaagattagaagtaatatttttaagttaagaaaatctgtaaatgatagctgaaaaggagaaaattgtctggaagaaggagagtctccgaattcttaggtggctttaatcctctgttttctcttcagcctttgaagagagttccatgttacggtcaccactgtgttcagagccaagagggagaacaaggaaaaggccttcagtggattttgtgggcccttatggagggtttcaggggtgccttcataatgtggatgggagttcagagtattcctagaaaattaacatacgtgaaataaaatgaaattggggatcttatgttccttaaacctacacctcttgaagtgtcacagatggacatattatgtacttaactcatatgatgctggtaatgatagtgattttttctcacgtgtttcttttctgactgtccttgaccaatgtgtcatttcctgatcccctttagaattggattgagaacgctcatgtgacctttccccgtttcttgggtccctcctgtgtaaggagaacagatgcaggagtggattaatgtacctctcagttaacattgttgtgagttctattcactgatgtggaagaagagcagaaagaaaactatgtcaacatagtgaattctcttgtttagtattatgagatagaaaaagactggaacacttcttttaaattctgttagtatttcagtgagctttctaacagacagatctgtaatgatctccagaaaacaggaagatgatgtttgctacccttttaattataaatagacattaacaaaaatccctattacctaactttaactcccaat

SEQ ID NO: 62689 - DNA, 1717 bp, Bovine  19866880858364
  misc_feature (1)..(1): n is a, c, g, or t
naaaaatatgttattaataaataaaaaataatgcattattgaaagtaagctgattatcatgtttacttatattatttttaagtgtgagtttgaataataaaactaagaaattaacatttattatgttcagttagaaaaatgctaataacctttataagtgacaagaaataataatttgttttagatccttatagtattatagtaaaagtaagcagaaatgttaagtataagctatcgtttttggaattatataaatgtattcaatcttgtcctggacatatttaaagactcttaagtaatttaaaaaatataatctttattaagtaaaccaaccttaaccacccaaaaaaattgataagtagtctcattaaagatgaggctaaaagaaagattcaaccaatactagttaaagaaactgttaaatctcccttttactgtttataaaaatatttctgtatacagggctttcccatgatgttacttctcaatcatactcttttttcttctgtaatggaaattaattcaggcctaaacttttataagtatagtttctgtgagttataaatatttagtttttgatgtatatgtagtctaccttgtagagtgaaatgagtagatcattaccatgtgaaactaatttagtacaaatatgtgtgagctattatataaaagagaaatgaattagtacttgaaaaatgatactatatttcttgtattgtaggaagtgtaggattcttggagcaaattctgaataaccatgattctttgacaagaataagtgaatcttcagacaaaacctcactagctaggtcaaaaatgggatggaatcctgagaggagaaacaggtaaaaatgagattggaatacaaactaaattgaacagaatttttttttttaatatttctaaaattttttcaggaattttaatggatttataagatcgcttttaaaaattgtcttaggtttagttaccatttttttctgctaatatatcttttcctcttttctgtaattatacaatgtgtgtgtttagttgctcagtcgtgtctgactctttgtggccccatggactgcagcctgctagtttcttctgtccatggagattctccaggccagaatgctggctggcgtgggtagcctttgccttctttagggaatctttccaacccagggtttgaacccaggtctcctgcactgtaggcagattctttaccatctaagccaccaaatgaatacatctaattttctcaaaatgtaaattatttactattcatttctgattaaatgatatctgggatttgcttcaataataatccattgcagggtggggaaaaccaggttggaagtataaatgaaatgaagacagccatgagttagttattgatgtaggtaaataggggtatatagaggtcattatactactctttctacttttgtgtttgaaactttacattataaaaagtttttaaaaagtcaagtaagtagtaaaagtcaaggtatagtcagccaatataaatttttcttgaatgtcatgaaaactacagtaacaaaaactaaacaagctacattttgtgtaatctcataaggagatattgtacaattttagtctgttaccagtagttgtaattgctgataaagtaagatttatgtctgtcatgttggtatatgtttttatatatcttaggtcttttttttattccactattcctccatagtgt

SEQ ID NO: 62690 - DNA, 1224 bp, Bovine  19866880884547
  misc_feature (1)..(1): n is a, c, g, or t
naaatggttaagaagatttcatcatagttttcttacagatggcttattttagttatgttccctaggacacaacaagttataaatgctatgaatggtacagaagtagagcaaaatacaatgtgaaaagagaatattatctaagctcctctgttctcaagtcactttctatgtatttctgttagacacacagtgtgatatttatctatattatattcccagtaaactaagctctgggaaacagagaacaagccttgctcttcctggctttcctagaacctggctcttaggagatattcaaatatttattaaataaatatgaatcaagtaattcacttcctttgttagttgtcaacaggactaaaattgaaaaacataaatgaattgaatacatttttatcttgtctagtaacaagatgaataaaagccatctcaggaaaataactgagaatgtgaagatcagcccttcacaaccaggattcttcaagagaattaattcctgcaggaagtgatttaagtaactgcttacttccaaggatggtacattctagatgcatagaagagaaattaattcattacatactataggtgccttaggaattaaggggttaattctgttgaactacggttgagaagggctggtattgactgttactgcacaaattgaaactatgaatattaaaaagacttaaattagttttcagtctgaccttaggaaggataatgtcacatattgattaggcaaatctgttaatgagctggtaaaatgtttaatgattagcctagtatctaaagccatgatatcctagaaggcagagcctcctaacacattgaaagtgctaacactttctttgggagatggaagcccaggacagtaagggaaagaagaaaatgagtttcaaggaacaaagcactgcagtataatgcagtttgccacccgcctctcccacagttatgacccaggaagagatccagcaggtcccttggcagccattttcacatggcacatgggatttctccagaagggctgtaaggagtaactataccccagagcagttcttagacgatggaatggaatcagaatttatctttccagcccctctttcaactccatttctctctatttaaggctcacccccaggggaagcttaccccccgttcacttcttggttgcataatccagcccttcaggagtctccctcaggatttcagatctcccatctgtag

SEQ ID NO: 62691 - DNA, 1614 bp, Bovine  19866880920645
  misc_feature (1)..(1): n is a, c, g, or t
ntggtcccccaaatacattctttccctcttccgagtaacagagctcctgattttacctaaggcatatagcccccaaaacaaagcccacatttcgtcgcctcctcaccctagaattgacaatgtgactaagttctggccaatatgacataagtaaaagggctgtacgcaatttaaagagagggagcatgctcttcttttcttttttcttagaaatgttgatgcaatggccggagctcaaacagtgagttgggaccctaaagtaagttaacatgccaaggaatacaaagttataagacacaagtaactgggccctgatattatgaaccttccttaaacagcctggactgcttttctctagatttattttccgtaagaaagaaacttttccagtttgcgtgcatgctaagtcacttcagtcatgtccgactctgcaaccctatggactatagcccaccagggtcttctgtccatggattccccaggcaagaatactggagcaggttgccatgccctcctccaggggatcttcctgacccagggattgaacccaagtctcttatgtctcctgcatttgcagatgggttctttaccactagcttctcctgggaaccccttatccagtttaagccactattattttggggtttctgtcactcactgatgacccaaattcgaactgataaaattttcattcattctacaaacattttctgagcacctaccaagtgtccagcactgagcatcctggctctggaaacaccaaagcagacagggtccttctcttgtcctccatttgtgaagcctacattacagctcaatatctacacagttaggcatctactaggtgctgaaatacctgatcaaccaagatccctctcctgcttttcttgtggtttaaaacagattttgtcttcatgtctgaggatcttttgtacgaataatgctcaaaaaaaaaacaaacaaaccccaaacacagttcttttttaaaagaaataaaattacttgatgaacctattctgctactatacctactccccacgccctgaattaagcaaacacattaacaaagcctattgttgccttttaaattagaataaacaaagatgatgccacgatgacagcccaaaacaatgcactgtagtgttacccataccatatatgtcttctcaatagggaggtgcacaaaactggtataaaaattagatgagatattgtctcagaaatggttattaaatattagctataacagctgataacaaatattagcagctttaaaaacagtcataattttaaattcagtaattccatttctgggattctatcctaagaaaataatcctaagtatgaggggaaattttatgaaaaaatgttcatcccagagtcatttataataggcacaaactaaagatccagtgaccttcccctgccaccttccttcccatccaatggtgagctgaggccgagcactctggcccaggcgagagttataaacccgggactagatgggaagacgcagacggatttgggaagaggcagagaagagcgcagaacttgagtccgacttcctggcaaggcagactgaacgagaaagaagagttcaaaatgtcaagtcca

SEQ ID NO: 62692 - DNA, 1722 bp, Bovine  19866880961460
  misc_feature (1)..(1): n is a, c, g, or t
ngtgtgaactgttgcagtctgggtttgccttttttttttttttttttttttaaacattcaagttaggatcttatattggaaaatactgaaatacattagtctctttatttttgttaatacttttaattggtatccctttcaaaatgcaatttccctactccctccctccccctctccccaaaaaaaccctgaaattttaaacaaagaggtttaaaaaggctttgtagtaaggttaaagatgatggccataaaatagtaagtaataaatagtgttcttattatagctattaatttcataaaggtcataatgttttatttaagctgtgagtaaatgttagtaaaaaagactaagagcagaggcaggctacctattgtttgcaggtagtaagtaaagaaatttaaaaaggtaaggacctttgtaaggagaatgtcttcttaaaatctattacttaaattatgaacctgttaaaattaagtgaaccaagatgcttttcgtctactgaaaaagaaaaagcaaaatcacaaaatgtggttactgattatatgataatttaaaactatatttcatattttaattttcttagcatatgctttattgtattgcctaatgaaactaatttcttcattttctgtggctatacaagtagattttcttgtgagattttggttgctttgggaaaaaaaatcagctgcatttcatgctcttggatttaagatttggatgctgaatcattctaacctgtcttgaacagtaatttttaaaatttgatgtattgtaaaactgaaaaagcattttaatctgtatttagcaaaggaaaaaagtgggtatggtatgaaagggaattaaaatctgataagccagggcctacctggcttagtcattataggcctttactacatgagtgaggctaggctgttacattacattgtatttcattcttccaaaatttagttatactgtgcttttcatgaagatttaatattgcttcacaatgataaaaaagagcttttataaccactataacagtactttagcctgccatttggtgtttgtaaattttatgcagtagaatcaaacaagtgttagacacttctgcagcgctaatgggcagtggaccttgtttttatatttgatactttgagtgccctaacattgccttaataaggaaatttgagatttaccatggaggagcatcttttttacttaatattattttgaatttctgagcattagtggtttaggatttgagtacaagatacatatttcatgcttgaggcttgaggaagaggcttgagagtctgataggaagttttgatgactttaacttattgataattatattgaaaaagattctgaagaatatttttgtgggtattatattagaaaagatattactgaatttccttttgaattttgaaactgaaaagtcagtgtaaacataaacaatgatatcaggtattcatatactcctgatttatattcactttggatcaatgtaggacagttgtctaagaataaaataaataggtgattgtttagaagactgaatttgactagtcttagctcttttatccttttgatttgctataggtaggcttatatgttggaacctcccaaaaatcttctctgctttcatacttaggaatgaaaatttgaatttagtgaattttttataaaaaatgctcttttttgtttaaaagtattgattcacatttttccaa

SEQ ID NO: 62693 - DNA, 868 bp, Bovine  19866881004497
  misc_feature (1)..(1): n is a, c, g, or t
nccaggatctttcgtttcaactttttttcttttgcacattggtcagtttcatcttccagtagcagaagaaaagtttttactgtctaaagaagaaaattctggactctgagcatcaatatgaggttcagttcctgcttcatcctgggtaaatgatgaaatttttataatttctaaagaaagatcttttgtcttgcttcgtcttccctttcctttaggagatttttctgcatctttcttaacttcttcttgctccactttatttcctaaaatctgtactatttgttcattctctccagcttctaactttaaggtttctaaagactgcatttgagtcctatcattttcttttaatatatgtggagcagtctttggattttcttcatctagcttatcatcatttaaattttcatttttttctaattcttctttaatatcaggagaaagttcttcattcatcaaattcttttctaaaaggtcttctgtttcactatcagatgaacaggagtctgcaagagaaaatattatattacacaagtttctacttaattaccaatgtaatttataataaaaattctgccaaagacaaaactcttaatcatgtacctctgaatacctccttgtagaaatttctcatataaaataaaccatatatttgtgccaaaaatgggggaggggagatctcaaataaactccatgtgaaaatatattacatagaaaaatattactgtctcaattctgtaaaagagttcttttccaatttttactagtatcatatttaggctacagtaacccttagaaacggagaagacaatgggcaccctactccagtactcttgcctggaaaatcccatggacggaggagcctggt

SEQ ID NO: 62694 - DNA, 872 bp, Bovine  19866881085547
  misc_feature (1)..(1): n is a, c, g, or t
ncttggtctcgtcctcgcctctggtgacctcgagggtggcaacctgctgctcctgcgtcaccaaagacaccgtggcttctgctgcttgaacagctgttgtcatctcttgagtgatgatgtcttaaaagcgaagaaacaacatttttaaatagactaaatccctatacctgaaaaagtcactatataactaataatttaaagaaaagcagactgtcatttcagggaatgagaaggcagagggatggctcagaaatgaactgccagtaaataaaagtttccagtgttgctgttttcaggagtggtgaatcaatctaagaagtggtgaatcaatacaagacagagataaagacaataatacaaaacacataaaataaaatataaaataagaaatcaagttaagtttccctttatgaatatcaacataatcagtttatttagaaagacattatacagaactaagttcaaaaactctccgaagcatttatatatatcaatattcacatttgcatccctgaaggggacagaaagttggcattttgaattaaaggaatactagttacaataactaatgtttactgagtttctattatatgccatacacacacattgctaagcacatgatgggcattatcttatccttccctatgtaaggggaggaaggtactaacatcattccatggaagccgtgtatcatagtggccaagaacacaggctccagatccaatttgcctgagtatcgattcagattcagccatcttctatctgcgtgactctgaatgaattacttaatgtttctggaccttgagcttccttaagttgtaaagtggaaataataacagtatctaccccatagagtttttacaaaaattaaa

SEQ ID NO: 62695 - DNA, 1282 bp, Bovine  19866881114363
  misc_feature (1)..(1): n is a, c, g, or t
nttcttgcctggaaaattcccagacagagtagcctacagtctatggggtcacaaagagtcggacgtgactgagcacacatacgcacagtatacatattttccgaagggatgatggtttcatctatggtggaacttctaggaaaagatatcccataagaggagaataccatttattctctgagagatgtttgcagtgtatgaggtagaagggtgtagatgctgctgctgctgctgctaagtcgcttcagtcgtgtccgactgtgtgtgaccccatagtcggcagcccaccaggctcccctgtccctgggattctccaggcaagaacactggagtgggttgccatttccttctccaatgcatgaaagtgaaaagtgaaagtgaagtcgctcagtgtccgactcgtggcgaccccatggactgtagcccaccaggctcctccatccatgggattttccaggcaagagtactggagtggggtgccattgccttctctgagaagggtgtagatagtgacctaataaaaaaccaaaatttgagtcttctaaaatatggtcttctaaacaacaggatatagtgtgttggaaatatttagtaaaaacggtcctataaaattagccagcacgaatcagaagagcttaagtggtcaccagtaagacattcaggtagtctcattgtagaaaagctgggtccagtggtcacataatggggcacctgcaatgtgagggaaatacatcagtattttgctcaaatcatatgagaaggtaagtgggtgctgattgcattgcatcatttgttgggaaagtctgtgccaagaactctgcaggttctttgtatgatgtgatggaggaaatgatcagagttgtgaatgttcttctcatttgtgctcttagtgcttgccaggttatgagaggttgggaagaaattggttggttcagggtatggaaacttagtttatttctccgcaagcagatggctaggtcatggaaacttggtggaaaaatgggatttattgagttgctttcttagatcaagggctttgggggattaaatggctccaagagacccactttattggatcccatagactcacgaggctgtactttcttcctgaggagagaagacatctgaacccattctacttgaaattgcagaggaaaaaacccccaagactttctgatatgggtaagaaagggtagctattcacactcatacaccacaggtaactggttaaacactcattatccattgttgaactgttctgagctccccagaatcataaagt

SEQ ID NO: 62696 - DNA, 643 bp, Bovine  19866881135755
  misc_feature (1)..(1): n is a, c, g, or t
nagtttttgttttgttttgtttatttttgtttagctgctgtttcttggaataatgttttaaaaggaatttactatatatatgtatatatagatacatatttatatagaatttagtatttcaaaattttcttatcttttttttttcttaaaagtcaaaacaactctgaagatgaaaagaatctcttttccagattatccaggagtagaatttgggatttttatcttaggagaaatacattcagaaaatagaaaaagaaaaacaacaaaactcccagctggagtgagaaaaatcaaacccttacagacatttctgtctctggctaattggtgactttccaacaggctctgtcttttgaaatctgtttttttttttttttttctcttcaaaattaaacctcagttgtgtcttaaatagaaagtctccaccgttctgtccatcatgactctctataaactttctttcatggaggaaaaagagagtgtttctgagagtcttgaaacagtcatccaggtgatttcactgttgaattcatattgcttgcattctcccctataatatttccttagcataaaataaattctatagtgaaacctcatagcaaaagaaacctttctggagaaaaagaagtctcactaactgttt

SEQ ID NO: 62697 - DNA, 2351 bp, Bovine  19866881136743
  misc_feature (1)..(1): n is a, c, g, or t
nactgatctcctttagaatgactggttggatctccttgcagtccaagggactctcaagagtcttctccaacaccacagttcaaaagcatcaattcttcagcgctcagccttcttcacagtccaactctcacatccatacatgaccacaggaaaaaccatagccttgactagatggacctttgctggcaaaataatatctctgcttttgaatatgctatctaggttggtcataactttccttccaaggggtaagtaaacaataataaatagccttaaaaaaaattaaagagcttaataagttagagaaggagacatatagtatgacatccctttatgtggaatctaaaaagaaatgatacgaatgaatttacaaaacagaacgagactcacagacttataaaatgaacttatggtggctggagggaagggatcattaatgagtttgggatggtcatgtacacactgctatatttaaaataaccaacaaagtcctactacataacgcagggaactctgctcagtgttacatggcagcctggatgggaggggggtttgggagagaacagatacatgtatgtgtatggtggagtctctgggctgttcacctgaaactatcacaacattgttaattggctaataaaaataaaaagttcaaaagaaagaaaggacttaagttaaaaatacaaaaaactttttcttaatgtccttccaagtcttccatgaaagcggaggaggcatataaggcacaagttggctgcttgctctggatggaattattattgttattatttttgtctgaatgaggaatattctatttctaggtaagacaacagcaagtaaagttttttttaaaataaatagtttgtattttcacagtgttgtcttgcatgcattctgcgcaacttttaaatgggcagcacttggtgttcccaccactgtctgcattagtcatcccaacagcacttcatgggaggggaatggctgagaccagcctgtctggatcttctgacaagtcccaaatgatcctctgaccatcaagtggggtggtttgcttcctattcagtacaaggggcatcaaggcttttgagatagccagttattaatcactgtgaacacatcagcacatatttgtcaaaggggttaaagctgttacacaatgtaagcagacatttttgagaaaatttgtgtaatgccatgaactaatggtattggtttatactgtgtgatttttcctttccatttgctggcctcttcagttcacatccaggtgaggatctcttaagtcgattaacttaaatccaagagagataacattattgtctgaagcattacaaacaagcaggggaaggcttcatcttttaggcttcagttagtttacaataagttgtattcaaatcagttgattgcatacaaatcaagtgcatcaaatactgttctttgacagttttcaagttgcttcatcatctttcaactgcagcatttgcccttagtcctccagggttaagagacagatcaatgagatgtttaataatcgttatacctccttggatgctccaagagaaaaagttggtaaaaacatctgtggagaatccagtccttaactgcctggaaggattaaccacatgagacaacccttatgaatcatgtttattcctctttcaggcactttttgtatccaagctttgcaaaagcccaaattcaaaagataagtttcctttcctgagtattgtcatttacataactctagaccttggagtttaagctcataaaagccagtacataaatgttcttcttaagctttttaaaattggagatgatctttagagcatttgcattctgggcagggaagtctattaaatctctgctttcagctgtggaatataactgagtttggctagctgcttgatgattaagactgaattctctctgggcagagagaatttctgctggggtctctgacccatggttaagtaatgcaaatatatgtgggcttgtatggcaaattattcctataccaatggagaaatgtgtggaattgattttgcttgtttcttagtttccatgtggatgaatcttttctatttctcctgcctttttccttcctgtcttgtttcccaccatttctgctaacgcattgacctgatgttgagtgatttcctagttaaaaaaaaaacagactacaatgctacttctagttgcagatggacttgcttggtcacattttttactctgacttaaaaaaaacagttgtgcttggaagcctttggtttgataggaaagccttctcaaagtccatactactgagtgtccttgggttatcttagaaattcccattggaacttttacagtct

SEQ ID NO: 62698 - DNA, 1790 bp, Bovine  19866881164742
  misc_feature (1)..(1): n is a, c, g, or t
ncagcaaccctaatcccaggttttgtttagaaaacgacaatcttctccgttcctctgaataacccaaaccaaccactgaacaccactgttccacagccacaggcagcgaggaaaacacactagctgagcgatccatagaaccttccactcaacccaggtgtttaaatggcttcgtatagcaaaccgctaggatctaagtaatctctttctctttaaacagtcacctgcccccataagaactgcagagacatttctgtttaagcctaaaggcacaaacaagtcaccatagccctctggacaagtgataatatacgtctgtcactggtgactttattatactacagtttgaaggttcaacctatttacccgtgatcttcagtctaagagtagcccgaggcaggagtggctatcagtatcacccacgggatactgcatagacaggcctattgtgttttctctacaaacagcttgtcaagaacacaaaggcagtaatgatacattgtgctcacctcctccttaccttaggaacacttacagcaagaggctgctctcagaaagggcaaacgtaccctctgtagtgtcagaatgtctctactcatgaaataacaaaatcctgaagtgtcacggttctgagctctatttttaaaacctgaccctgagcatgtgtgtctattctaacatctatttgactatacagagcttttaaattctccttatcaagttagcccatttgcttgtatttcttggcaaaaaaaattatttaataaaatcattcatgtaagccagctctctctctcaagaatgaattcaagaaaggtttctctatgagttacctacaagtgatacttaaatttatgtgattataaggaaaacagctgatgtgggagagaaaaagaaacaaaggtctgtctggtcaagactatggtttttccaggggtcatgtatggatgtgagagttggactgtgaagaaggctgagcaccaaagaattgatgcttttgaactgtggtgttggagaagactcttgagagtcccttggactgcaaggagatccaaccagtccattctgaagatcagccctgggatttctttggaaggaatgatgctaaagccgaaactccagtactttggccacctcatgcgaagagttgactcattggaaaagactctgatgctgggagggattgaggacaggaggagaaggggatgacagaggacgagatggctggatggcatccctgactcgatggacgtgagtctcagtgaactctgggagttggtgatggacagggaggcctggcgtgctgcgattcatggggtcgcaaagagtcggacacgactgagcgactgatctgatctgatgagagaaattagtaagacgtcgttcatttaacaaagacagaaacttgtgttccgtgttcctgggtcaagaagctatttccttagaatcttggttttgaaggactctgcaatgttgttggttcttctaaagcatgtggaaagggcactgagctgaagataggggtgcatggtgtggggtccaagtgggttctagtcctgattctttctgggtacaattttggataatcatttcacttctctgcttcagttctgtcttcagtcaaatgggagaagaaaaacatacacagctttgaggaataactgtgtagctttccttgcaaacagcaaagcaggccccattacatttgaacaagttctccatgctgtaaaacatcatggacagtgttattagtaacctttattcttccacgctaatgagccaagtcttca

SEQ ID NO: 62699 - DNA, 1206 bp, Bovine  19866881178328
  misc_feature (1)..(1): n is a, c, g, or t
ntgtaaaggtttgtttttcctctttgctgatggttaatatttgtgagtgattctttggtacagtgtgtatgtatatcctattcttcataactttggacttaatggcttgagtttactttgctgatacttgcctgaatcagttattgccttggggatgcaacatggtggttttgtaaatatctttccttctacttttattgggtgacatgatacaaaaaggaactttcccttatttttttccctttgtctctttaaacgagcatggtgaattcgtggatttttactcatttaatactttataatcacttatgtgtattgttctttttgatgctcaacatgtcccaaatttgaccagtgagaggataaatttcattaaaagactgtggagtcagctcagtctcatctatttgaaatatgagaaattgtactctattaaaatgatttttcagatgctaaatttcaatgtaacaaagatctggtaactatccattttttattctgtcttggaaatggtctctttttctgtatttctctcttatctctaagaaggcttttaactttgaaactatagcaaattatttctctgaggcttataaagataaggctttttttttttttcccaacaagagttctttttttaagaagacacctcagacaatttttgaaaatgtagagttgctagtcttttcatatttgtatgtttttacatgtagtcattcttctttgactagaatttctttggttgcctgattaaatctaagccaaggacaaacaagcagatgatctgatcatcttttctaatgctatgtgtgatccaatcttttggggggcaagttataaagtttattgtgtaaggcagctgtgacctacagtcagttcttgaatcatgtccaggttgttctcaataagcacagaagggggactctttctaaaaaccagcttctgaatcattaaattttaggtgacagaacaccaaagaaagagaagtgagaaaaacaggattttcaaagaaccttgggtttgtccacttctgtctgttgcttgacttgtctgtagctaacagttgtactactcagttcagttcagttcagtcgctcagtcatgtccgactctttgcgaccccatgaatctcagcacgccaggcctccttgtccatcaccaactcccggttgtagtactagaaaatggaaaatggattttagaaaa

SEQ ID NO: 62700 - DNA, 465 bp, Bovine  19866881222729
  misc_feature (1)..(1): n is a, c, g, or t
ncatcctcttaccgtgtcctcggggaccggcaaggaggttctgtgacatccctgcgctaaacactcaactgtttgttctctgcaaagtaacacatttcggtgaccaccgcagcccccactcgctcctaggctcctgaccactgactggcatcggggacattgcaatcaaagctttcaaaggagcagatcttagtcttcgggaacttctctaccaccgctgtgagacggagaggggagggagagaagaaagaaaagcccacacaaaagcagccagccctgcaagctccggcagcacaaaggcccgctcgctggtgcggagccgtgaggctgggctggagcggggaatgaggctagtcctcggaggcctgcgcgccgcgccccacgctctcggagcagcccccgcgcaccccgagccggggcaccgcgttctggcggcggcgcggggcgcacgcttcgcgcgcccgg

SEQ ID NO: 62701 - DNA, 1264 bp, Bovine  19866881235444
  misc_feature (1)..(1): n is a, c, g, or t
ntcctttgaccctttcagttgtacaggctgacaagtaaatgggcttggattccgaatactcagatcataatttgccaagagatttaaaaataataaatgcctttactcaacaggcttatcatttctgaggtgaaaaaagatgagtaagagtcaatcttacatttgatgattttagtgtaatgtagggataatccaagtaactgtaatataagatagtttgcattcaatactaggtcttcttgtcccgagaccttgcatttatttgaaagaaatccaaaaaaaaaagtcttcatgaagctggtgcttttgagctgagacttgaagcatttaaagttagtcagcagaaaactttgcgagaggattttcttagaagaaacaaaataagaataacaggaaagaaggggtttcttcacgaaactgtgctctgggaatccattttggctaaatattagatgtgaataggggcataataggaaataagactgggaaggtaatttgtatcaagggcagaagataatttggatcttcctcctagttatttttattttatcttatgcctagtggtatcactgtccctctcctcggttatattcttcttgtgtatctttttgtatttacccctccatttcagtgttagctccttgagggcagactatattattagtctaataatttccaacaccaaacaaaaaacatttaataccatctgatattaaaacagctgatattccttccaagactttttaattgtctggagatacaatgtttaatatgatagccatgagtcctatgtggctatttaagtttaaactgttaactaaattaatattaaatagaataaaaacttcagtctttcagttgtactggccacatttaaggtgctcacccccatgtgattcattgtttctgtattggtcagtgcacacagagaacatttccatcttgcataaggttctgtggttggtgctagattatcacagaggggctactgttgagcaggtacatttcagcaatttattagactttaattttttttaatactaaactgcagaaaaatagattggttaattactaatgttaagacatttgttatttttaaatgttaaaaactttgaaagttcattactcaaattttctctggtctgtttaattaactaaaaattgtgcatgccttggtaagaatgggaacttaggtgcttattttaaacagccagatttcaaaatagatcctgattcaagcatattttaaaaaattataatatgc

SEQ ID NO: 62702 - DNA, 838 bp, Bovine  19866881383190
  misc_feature (1)..(1): n is a, c, g, or t
natttttaaaaaataaatgacagataattttccctggttaaatttatggaaattcaataccagtgccaagatgtgattatttaccaaaaatgtgattattttaaagactttgctacctattgccctgaagaaagatgagatgcatttacagtatactcctgccaaaagtatatgtatatttatggcttatggcttccctagtagctcagctggtaaagaatccacctgcaatgcaggagaccccagtttgggaagatcccttggagaagagataggctacccactccaggtattcttgggcttccctagtggctcaactggtaaagaatccacttgcaatgcgagagacctgggttcgatccctgagttgggaagatcctctggagaagggaacgaatacccactccagtattcttccctggagaattccatgaactatatcatccatgggattgcaaagagttggacacgactgagcaactttcactttcactttcctgccaaaaaaggcacatgggtttcactgaactctgaaagcatgaatatttttcatttaaaagagatgtttgtcattctgatagttgaaaaacagtgtcttgctttaatttgtatctctctcggttatatttttagtgtgaacatttgaacagttttacacaatgtgttttgccacttttctctgctcacttttctgctccacatttcctcagtgcttccaggctctgtctttactctttttgtaaatgtgacagctgtcccctcagtggttgccaggattagtttggctactctcctttgctgccactttcttcctttacaaacccacatgcaggcctca

SEQ ID NO: 62703 - DNA, 744 bp, Bovine  19866881641149
  misc_feature (1)..(1): n is a, c, g, or t
ntcacatccttgcttccttttagcccctatgtcacatccattatcatcctgaaaagaaaaatcattcagaccacttaaatgatgtttcaatgacacacaatccattagaattcagaaaaagccagcactttccaaagagaaactctatttcacttatcctttctctcgtttctttacttgaggtgaaatttcagcttctattgggatttcttattttatacatttttatgagatcattatattttcctataatgacctgaccccttctaaaaccacctgcttagttggctaaaaggagcaacgtaggggttaatagaagtctatttcatccatttttgtttgtttactgtgaagcagtatatgctcaaagcaaaaattttgggcaaaatatataatcctggcgttatgcccagaaacagctgggcaggcttctagctctgtccaccaccacaaaaaacctttcttcagagaaggccacaaaataattagaggccagagaatggggcacacatttttgctaccatttcctctgggttgccagtcaggctgtgctgactccttacacgagtgatgagaaatccctctttcttggtctcctcccccttcccctttgtcgttcttccattggtgttctagctgtaccctgtggttgtggctggaagctccattgtcagagatttttcatatttacaactgtcttcctggtgtctagaatattgcctaccacataatagacctgccata

SEQ ID NO: 62704 - DNA, 885 bp, Bovine  19866881825539
  misc_feature (1)..(1): n is a, c, g, or t
ntgcctgatcattgtgacttttgttcctgcatttacttctgatgtttattagatagtagaacttaatttctaccaactgtgctcatgatctgattgccttcattaatttttgcttttcaattggtttgtcagatttttttcctgaatgatttatatgaactctttggcaaactggccctttctatgttcctagtttgttgtcatttggcttttttttttatatatttttatccaaaggtgtttatatatatataacacctttatatatattacttagaaagcatttcttattctaagatgatgaataaattgatctatattttcttctgttcctatcataggtttattatttttaaatcactgattaatctggttttttggtatcagttaataaatctctgattaagctggatttacttggtgtgaagactgaggaaggcatttatcttcttcttaatggttagctagttttcctgttgtcggagaaggcaatggcaccccactccagtactcttgcctggaaagtcccacgaacggaggagcctggtgggctgcagtccatggggtcgcacagagttggacacgactgaagcgacttagcagcagcagcagcagcggttttcctgttgtaacttacagattaattcatttttcctattttgattttaatatgctaaattgtcatgtgagttagtctatttctagattcctttgatattctcatttcctcttcagcaccaaactgttcttaattattatagttccataatatattttattatatggtagggccatccccttcattgctttcctatgtataaataagatcaagtaagagaatataaggaagaaaagattccatttacaaaagggtaaaaaaaaaag

SEQ ID NO: 62705 - DNA, 573 bp, Bovine  19866880414070
  misc_feature (1)..(1): n is a, c, g, or t
ntttaagatactatcatccaaaatagtttcaaaaattcttgagtgcataaaaggtgaaccttccactatataaatataaaaccataatgtctaatctgaaacttcattcatctaatatgtaagaaataaaggacacaaatgtagaatgaaataatactcacactaagtcattaaactaatccagcagtgaaaataggaaaaaattaactttttaataatagttacacaattaatcttcttaaagaacatatttataaagactgtctaaaatgctaactaaaatcagattcaagaatttataatctcaccctaatgacttggacagttaattaaaacctcttttactttttccctgaataatgagaataattcctttatagctttcaaaagaccataacctatttctaccaataagtgaataattgtcatactgttaaatataaattaaatttagagagagcagccagcttacttttgacattctgctgaaagttttagttctttgggttctagaaaggaagaccttaattagtgcaccaaggtttcctgttcgaggattattttcaactgcaa

SEQ ID NO: 62706 - DNA, 2001 bp, Bovine  19866880587842
  misc_feature (1)..(1): n is a, c, g, or t
ntccaggctccctgtccatggagttctgcaggcaaggatactggagtgggttgcccatatgctcctccaggggatcttccagacccagggatcaaacctgcttctctcatgtcttgtggcttctttaccactagtgccacctaggaagcgtatttacttttattgaaagatttattttaaggaattggctcatgaaattgtggcgtctggtgaatccaaaatctgcagggcaggccagcaggctagataaccagggaagagctgcagcccaaagaccatctgttggcagaatttcttgctcgggtagatgagtcctcgttctagtaagcaaggccttcaactgattaggtgagacccactcacataatggagagtgatctacttcgctcaaactccaccaatttaaatgcttttatttaattactttttatgggctatcctaggtcttcgttgctgcacatgtgctttctctagttgcagtgagagggcttctcattgtggtggcttctcttgctgcagagcataggctctagagcacaggctaagtagttgccctgggggatgtggcatctttctggaccagggatcaaacccatgtcccctgccttggcaggtggattcttaatcagtggactaccagggaagtcccaccaatttaaatgttaatctcattttaaaaacacacttgcacagagacatccagagtaaagtttgacaaactatcagggtattgtgccccagccaagttggcacataaaattaatcattgcaaactgaaagtgcatggctgaggttactggtctgcggaaggactctcttggctgtgaaaggcttgggaacatgagagtagtctctgatgacctccaggtgcccttgtgtttagcctttcactgggtaggagataggagcacatttccttcatctgtgttttaaatgtcccagttcatgttctttcctcttgatttaggatggtaacagaaacctgagtttactcagtaagttgtccataaagcttccatctctttcttgagcttgaaggtacagtgctaatgaggtatttggaactgattttctctgccaatataacacatggccaccactgaacagtaattttatgcttatgtacactccaactgagaacaatgtggtcagtgttgtgaattcatgaatagaagccctggcactcttactgcccagtgttcagctcccaggcttgggaaaatgagcccttctttggggtagacgtagtggaacagtcttagcaattctactcacagggctgagggtggaactgctctggggggttctcatgaccttataactcctgaaaccaagcttggaataactctgcagtgttgcctgagggccctggggagcaacatagacagtttcatagggggcaggttcctggccaatcaaaaagtttcctgtgaagggtaaaagctgcatgtgagagatactgatgtagttaacatccgatcacgtcaagagccagtcatatggctaggagaacagcatcaagctgatggtttcaccaaatggtcatttcagtgaccacagagttggctctaagctgggtctttcagcctaaaattcaccgggcagtgagagacccatcaacctctctcccaccaacacttccatcaaagcctacccaagaggcttggtctggctactgggaagccctcctttaaggctggtgtggagggcagacctgccccctgtattgatggacagtcccatttgatcaggcattcatggggcagggttatatttcaagaatgacagggtgactcggggaccaggagatggtggttacaacatgctctggaaatcagaagatgtactgcatacccctcatgcccacctgccattgttatcctctttaaaccagcgttcaccatcttggagtgctaccctctgaaggctgctttttcacgtggagggcccgagaaaggtgtctgcccactacacacagccaggccaaaggccccatgcttg

SEQ ID NO: 62707 - DNA, 910 bp, Bovine  19866880727121
  misc_feature (1)..(1): n is a, c, g, or t
naatacctaaaaatattagactaagcagatagcaacttacatggcactcattaagtataacatcacccccttgttttaaagatgatgttacaatctatatttataggtgtggataaacaaatcgatttattaccagagttcctttttacatggcatatgtatttttaaaagtcttttgactttagacaaggcaactatttaaaaagaatgtcaccgtggctctccatcacagtttactctccaagtgcccagtaaggccacgcagcaatgtggagctggcttggttcccagcaatgcagttatgctatatggcctgaaactgtatttcaatgtgttaatagtgctgctgtctatcctacttgtagtctaataacaaggtctaagaaatccacaaatgcagacattcatctcaagttcctttattcaaggaaataaaatttacttgaaaacaatttcttgattagatttgtttacaatttatattttaaaagaaacatttttatatgtcattatgttcctctttatgtcaagggaaatgattgacacagcacacatttaagcgatgccacccacagatgccaaattggttccagtgggggtggagttaactcaaggaaagaaagacctaaagcacttctctttacagaaatagctattaaagacagagaacttagcctgaattttttaaaatttatctttacacatcaccttgggaaattaagagacttgtttctaaaaatctagtcttcaagagacattcatgatgactatacgctacattcaagtgttgctcagttcacaaacatctgtctacactaagtcgtctgggtataaacactaagaatgtaatggaaagacgagttcacaagaactaggtacaaaatagcatattcagcacattttaggccat

SEQ ID NO: 62708 - DNA, 1763 bp, Bovine  19866880798188
  misc_feature (1)..(1): n is a, c, g, or t
ncgggactgtcccctgcctccctaggacaacctcacttgagcataattggactatgcctccaatcactttgaaccccatggcagtcagacatttgctagtggagcaaaaacacctaaccttcagaggtacacggagactcaggggccctgaggaagaggcaggagccccttggggattgggcagggccgggcagcaggaagccaaggctgtgtgagtgcctccatctcagcctctcacctcctcaggggcgctgcgctcttgcccagggcacccggcgggcagccacctgggcgggggccacacccacagggttgttaaaactacctgggcctggcctggccttggggaacaagctcaccagctcgctgtcctctgaggggccgagttcagatgtgactgccgggctggtgggaaacgaaagcaggcgcagagccaggctcccgggggctgagctgaggctgagctgaggctgagctgaggctggcccaggatggccgggctctgggggacccccgccaacagagttcgccccccggggcgtcacatccttcaggctccaaagagaacttgggaaacgtgagcagggcttttctgaatgctcggtctgccccttggctccggcttgccccggagagggcggagggcccggaagaggcccatgtgaggtccacgcagagggccagggttccaacccgggcacaggaccatctgaggccctgtcacctgccgccatgtcacccgggcaggcctgccttcttcttttttttttttttttcctgacttcttcttgagcccatttccactggggccagtgggagtcatgatgtttgccctccctcccttcggggttattgtgaggatcaaatgagatcacaaagataaaagaatagaaaagaagaaagctcggaacacacgtaagtggttgttattgtcattgttgttatccttagctcctcgccaacccctctcggaacagagccatccggcaggttctcagccctacctggggtcaccagagggtgccaggctggcctgggccctgccacacccaagctctctccagggggcaccttgggggtccagaacctcctctgtccctcccagttctccagcacagccctgctggaggtggacaagcgaggggagagaggcctcagactgtctgtgtgtgggccggtccctctgggcactgctggggtcacatggacacacacactcccaaatacatacacacgtgctgacacggactcatcaacacacacaaaccagcacccgcccacgagcattcaccaggtcttgactcaacacaaacatacacacacacgcacataccacacacaagcagatgcctcctccaaagcaaattccatgatcttggccttccatccagaggccaacgggcaggcagggatattattaccttgttgtcattatgatcgtccttagaaaagtctcaactcggcagaaaacatcaaacagcggccagcagcctcagatagcagaggcgacaggccctatggggctctttccagtgcagacctgcctcctcgtttgcaaaaatgacttattattaatctgtgattgaaactgtaattatgccatcaccgtgtcaacaagccggaacacggcgaggactggcagcgctgtctggaaatgtgttcttactctccaccacgaccaggctggcatctgcctcatgccatggacgaggatgcacacacctgccaagcgcagggcccagctccccacaggatgccagctg

SEQ ID NO: 62709 - DNA, 1146 bp, Bovine  19866880895343
  misc_feature (1)..(1): n is a, c, g, or t
ncctggatgggatgggagtttgggagagaacgcatacatgtacatgtatggctgagtccctttgctgttcaccccaagctgtcgcaacgttgttcatcggctacacctcaatatgaaataaaaaggtttttaaaaaaaggaaaagaaaatcgtaggccagtttcagagaattgcttattggcgtggcacaaaagacaaaaactacaaatagcttcaggtaaacaagctctctttttaccatgaaaaaatgttttgaaatatcactgggcaaaaaggcccaccaaaatctaatttgctatcctcaatcatctattcttctagaaatttcagaggaaggcatatattttgaatgttaaatgaaaacagggaaggatgacaaataaccggaataccaggaaacaagcttctctactgtgaaggccaaaattgtctctaagtacaatgactgtgctcccagtgaggacagccaatttatctccaggtcaatggaatctggaatgaatgctccatacaaggtatttctagagactcgaagacgaataaaaggtcatgaaactcggcagaacagtatgttcgggagctgtttcattttttgagtgttttttatgtggaagaccttgttaggttaggatacatttattggagggaaaagtacccaagaaaagtagatgggccacatgggaaaaccttaacttcattagccccagacaccaagtaccagagccaccctacaatttggagcctgttcttgggagctggccctttcccagatgttttcttttgtggtataataattaccacaaacagcatttaaaatgacactgagatttattatattacagtttctgtgggtcataaattagtagaagcatatatcagagctatttgggatttggttccagattaccgcaataatgcaaatatcttgataaattgagtcccataaatttcttggtttcccagatcatataaaagttatttacactatgctatagtctattaagtatgcgatggtgaaacagagtaggttcctatggtccttcccctcacatcctctgcctgccttctgtctgtgaaaaactcaagtcaaagactaagtttaatcagagacatgagaacatacgaaaaaaaaaaaaaaaaggaaaa

SEQ ID NO: 62710 - DNA, 2082 bp, Bovine  19866880898293
  misc_feature (1)..(1): n is a, c, g, or t
ntgtctctgctttttaatacactgtctagggttttcatagcttttcttccaggagtaagcttcttttaatttcatggctgcggtcaccatctgcagtgattttggagcccaagaaaataaagtctgtcactgtttccattgtttccctatctatttgccatgaagtgacgggactagatgccacaaccttcgttttttgaatgttgtggacctgagtttgagcaaactccaggagatagtgaaggacagtgaagcctggtgtgctgcagtccaaggggtcacagagttggacacaacttagcgactagacaacaacaacaattggtatttagaaatttccataatcagatcaaatttcaaatgatggttctttttgacacctccccccactttacttacccttctccttagtatcctatggctatgtgtcttgtaaaggtgaggattgaatacactttgatcagattttcccagagggccagtcaaaccaggaaacagacatgtgagaggaagtagcctaaaagaactttataagaggtctgccttctctaagaagcagtttgttaaatactggtagctcaaacggtaaagaatctgcctgcaatgcaagagacctaggttcaatccttgggtcaggaagatcccctagagaagggcatggcaacccactccagtattcttgcctggagaattccatggacagaggagcttggcaggctacagttcatggtgtcacaaagaatcagacacgattgagcgactaacatatgagatatactttaaaaattccctagtctgtatccttatacgtaaaaattacgtatacattatttttcctgtagctgaattcctaaatggacgtacagttcaaagggtatgcatattttaagcttttgatttacattattaaatcacaagagaccattcactttggaaaccaaataaacacaaacacaatctcgtacttcgccaagcataacaacccttttctgaggctctggaagctttatcccctgtatcctcatggctggtaccatcttttccttccagattttgctgaaatctccccttattagagaggtcttggtgcctcccacacacaaaatcacatgtgcccttccctttcaacatcccttttgcagaggtgttttcctcagctgcgtccagcacctctgacaggttttctatttgtgtctctctcttcccagatccaatgagagcagggctttgcctatcttgttcttcctatattcccatgtcttccccatgcccagcatagagaaagtattcagtaggcagattcactttatgcatcaatgactgagggttgatacttttagtttcaaactaagagtgatgataatactcagggcttcataggggctattttcagcagtagaggctatctatagataagagataagaaaatagaccaataaagtgacttcttagtgtagtaagcgtcatgaaggggggatgtgattaaggcaggaccatccgggacatctcttctgagacgggatgcttgagctaagacctgaaggatgactaggatgtgagaggagcgtggacgaatgcctcccaggcacacggaacagcttgtaaaaaggcctggaaagggagaagaggttggcaggttgcagagtaaacaggagacgggtgactgctcagagaagccagtgggtgagagccacaggtgggaagtagggaggtcacccgtgcgctgtgagtcaaggactcaagtaaggattccttcctcaaagttcctctcctcaaaggcctccctgcctctgaggtcccgccatctgagagtcactcctgggaattaagtgttgccctcttctgtgttgtcccctccgaaacactccaggaatgacttactaggtgcaaatgaaaatattgacccaaatagcataacctatctgaggttagagtgcatatgtaaaactgctctgtcttgcggtaggggctgaaaggttttttgtctcctgcaatggggtggggaatctaaaatctagacacctccctggaggaacagctccaggtctggagacagatccaggggaagtcagctccgacaac

SEQ ID NO: 62711 - DNA, 1267 bp, Bovine  19866881039920
  misc_feature (1)..(1): n is a, c, g, or t
naaatctagtataatagaatatataatggaatattattcagccttgaaaaagaagaaaattctgataggtgctataacatgcatgattcttgagaacattatgctaagtgcaataagccaggcacaaaaggacaaattttgtatgattccacttatatggtgcttccctggcggctcagagagtaaactatctgccatatagtgtgggagacctgggctcaatccctgggttgggaagatccctgggggagggcatggcaacctactccagtattcttgcctggagaatccccatggacagaggagcctggtgggctacagtccatggggtcgccaagagttggacatgactgagcaactaagcaccacttatacgaggtacctactggagtcaaattcataggacaaaaagcagaatggtggttgccaagggctgcagagaggacagaacagggagctgttgtttaacgggtgtagagtttcagttctacaagatgaaaagagctctggagatcgatggatagtagtgatggccacacaacaatgtgaatgtatttaatgccactgaagtgtgtgctcaaaaacgattaagatggtacattttatgttatatgtattttacctcaattaaaactttagaaaaataaaagaaataacaggaaaggattagctgaagttaaggcactatttattcaatttccctgcaatcatattatttaaggtgtaagtgatggttatttggcaagaatacaattccctttaaagcctacattagttggatttcagttcagaaatgctgcatatttggtacaaatttgagagaatttattctggcatgggctcttgtttatgataaatgggtctctgctttaccatgccttgcccaaacccagtcactctcagtgcagagcatggctggctttgcatctgctctgaaggtcacctggttcactgtggcctagtcaagtcatgtgagcatggaccagggcaggctgcctgctcttctcaggctgtgttctcgatgatgaccgcaattccttggccacctccaatgcaggctgatcctacagcatattttccaccccgacgcctgagaaagaaagcagtggctgaaaactagttgaataaagaatgtacagaattagataatcaattaaatagaatttataatggtcacatttgcaatattcattctcgttcagctcatcagctcaatgttttctccagtcctcaatatttggggaaaagaggagaaaggatttggaaa

SEQ ID NO: 62712 - DNA, 931 bp, Bovine  19866881103708
  misc_feature (1)..(1): n is a, c, g, or t
ngcagcagctggtgacagcctgccttactgcctagacagcaggctgctacccaagggaacaattgggcagaaaggggggtggccagtcagggaacacgggccagtggaattctgaacaaggtcagagtccaatctggtacagtgcttgattaccaatttaaatctcgtctttccttccagggtggctgccacccctgcagaagaggccaaggctgccacaagggacatttgcatttaaagaggccaagtgcccggcatcctggcaaggctgaggcctggcctgcacgttcatcccaacaccagaaggttgcacgctgagtatgctcggatttcacccacatatggatgcccacttgcttggggggaaaagactccaaattcttcttatttcttccaatctgaaggggaatcctggagtgtgcagagtggaggcagtggagtctggaagctggtgatcgtatggttttcttaacagggtctgaaatgaagtcctaacggaatggcaggcagtggatgacagggatagtaaaggggctaaactggaatcaggctgggcgggggagatgtggaaggtggctgacagaatgacgcaagaatctgggttaggggacttccctggtggtccagcggctaagcttccatgctcccaatacagggggccgggtttcgatccctagtcagggatctagatcccacatgctccaatggagatggaagattctgcatgctgcaactaagacccagtgtggtcaaataaataagtaaataaataaatattttttaaaaagaatctgagttacagtgagggtccagtaggtggattcgacagcagtgtggattgatttattctgggcacatgattcaacttgaaagaaggctcctcttcatgtctctctccttgaggcagctgattcgcaatctttttctccat

SEQ ID NO: 62713 - DNA, 1678 bp, Bovine  19866881178120
  misc_feature (1)..(1): n is a, c, g, or t
ncagacagcagcttagactcttggcctcttctgcaagccttgaggtcatgcactcaaccctggagaagggctcactgttaaactccctttgtcctgaaaagaatgaggcagtcaggcaggagttaaatgcagggtgacagcatttaaaggctctggagcaaattggggctgccctgccggccagactagatgggctgctgcctcatgcatcctgtcaccgagacagaacctggccagctgtggagggggagggggtcaggtgagggtcaggttttggtgtgtctcttgccacagtctgggacactaactccccctccccaggtaggctttgccttagcagagcccagctgttggcctctggacctgaagaaatgtcaaaagagttacgatccagttgggctccctgggctacttccttgctgctgttactgtcccacgacgctgctcctgcatacagtgctcgaattaacgctcccttcacggccggtgtctgaagccagtgggagaaaaaaaaaaagcacaggcgggggtctccagacctgcctgcacgttaggacccctggggtctttcacctcatggtctgctggcacgatcccagcatcaagtgttttttgaggcctgccgggtgatttcaaggtgcagacaagttggggagcctctgatgtagggggtaaaaggatctctgttcccatggggagtatctctggtagcttctcttggtggctgtgcacagattctgtctgtgctcctatggtgaagaattcaagtgtcttgcttgttgagcctcttctcagctaagacatttgctcggttgtaggggtttccctggtggctcagcggtacaggatctgcctgccaatgcaggagacgtaggctcaatcgctgggtcgggaagaacccctggagaaggaaatggcaacccactccagtgttcttgcctggagaatcccagggacgggggagcctggtgggctgccgtctatggggtcgcacagagtcggacacaactgaagcgacttagcagcagcagcagcagcagggggtttctctggtggctcagcggtacaggatctgcctgccgatgcaggagatgtaggctcaatcactgggtcgggaagaacccgtggagaaggaaatggcaaccactctagtattcttgcctggaaaatcccacggacagaggagtctggcaggctacagtccatggggtcacaaagagtcggtcctgatgtagcaactaaacaaccgcaagaaatttgacaagatgtattaactctgccccttcctcctgttggctttgctgtagtgaaggacattataaaagtgaccctgagacagggtttcctttcaggatgatgaaggtgttctggaacgtggtaatgatgttgctcagctctgcaggtgctgtcagtgtcgttaatggtaaatgttatgtgatgtgtatcttgccacaatcttaaaaaatagtgacctgcggtagcttttaaatacatgcaggtatttagatagtgcctaagaaacaccggctctgaaggataaaacactgggagctattggaggcagacacttatttccaaagcatctctgaggtctcacagggtgggggagtggggtgcagggagtgggagggattgatcaagggcctgtctctgtgatttttcagcctttccttttcca

SEQ ID NO: 62714 - DNA, 1700 bp, Bovine  19866880289281
  misc_feature (1)..(1): n is a, c, g, or t
ntgtgctggttggatctccgtgcagtccagggactctcaagtcttctccacaccacagttcgaaagcatcaattctttggtgctcagctttcttcacagtccaactctcacatccatacatgaccgctggaaaaaccatagctttgactagatggacctttgttggcaaagtaatgtctctgcttttaaatatgctatctaggttggtcataactttacttccaaggagtaatcatcttttaatttcatggctgcagtcaccatctgcagtgattttggagcccagaaaaataaagtctgacactgtttccactgtttccccatctatttcccatgaagtgatgggaccagatgccatgatcttagttttctgaatgttgagctttaagccaagtttttcactctcctctttcactttcatcaagaggctttttagttcctcttcactttctgccataagggtggtgtcatctgtatatctgaggttagtgggctagttaagaggttttaaaaatggccaacgtgatgatttgtccaaaagggtgtagggatttgaagccaggtaggctgactcagaggtttgtgagaagaagagagacagctgaatatttacagaagccagtcgctgctcactccaggatgctaatcaggcctcccttcttcctgcctctctccagcccttcatgggagacaattactgtgatgccatcaacaaccgcgccttctgcaactatgacggtggagattgctgcgcttctacagtgaagaccaaaaaggtaggtaggccagtgcaccgccctctgcagccacccctgcaggtgtctccaacttactggcccacgatcacccctgggtgttggacaacctactgtcctggttgcgtcagcactcccctacaagcttcactgttttctattgcattgtatttctcattcttttactcagtggtggtgggggtttagtcactaagttgtgtctgactcttgcgaccccatgcactgtatcccctccaggctcctctgtccatgggattctccaggcaggaatactggagtgcattgccaagcccttctccattttactcagtagttgagctcctatcatgtgctgagccctgaactagatgtggaggttcttggatgatctttgtagacgaggtcccttaacctcagagcttagagtcaggtatggaagctggcaagttgaagagcgatgctttttaaaggaaaggacagagttccctgagggtccaggcaaagggttggagaagactctgtggagggatcttcatcaatgcacagaactgagggatgagaaggggcagggaggtggccaggagaagtgtctggggcaggaggctggcatgtaaaatcctagagagcacacacgtttagagagtatggctaaagcctaggggaagatggaagatgagacgttcctgacaaggtaagttatgacctttaagcatttaataatctctttcgttgtccacacctggaaaattagtgggtgtggtcttggtcaccattttcttcttagcacactcggatgtagcgggagtgattcgagtgtttatggtaaaactggagcatccagttgggatgtggtggcacccacccacagaggagtggccgcctccactttcctcccggtgagagctgcaaccacagtttggggcctgagccaagagttgggagaga

SEQ ID NO: 62715 - DNA, 2888 bp, Bovine  19866880351043
  misc_feature (1)..(1): n is a, c, g, or t
nagcagtgagaggtactcatgccatcccgagaacgtgtgtctaatttattccttgacattgattctgagtttcactgtaattcagatagtacaacaacattgtcctcagttttctaggaagccttggtgcacgtggggatccgtcagtccgttgtgatggtctgtgtttaagatgccacgagcggagctgacagcaaggctcagaaccatacatgctccacattctttgctgctacgagtcactgccactaggtccatgacagacccgtggagacacctcctagccctggaggaaggtcagcactaacgtcctaccaggctgctgccatggcgactgaggggatgggtccagcagggaacaggtcacccagagccctgacgcagccttgtagcccgatcaccatctacgcaaacctcaggtctgaggttcactagatgtgtgaccttgggctagttgattatcctctctgagcctatgtctcaaatgtaaaataaaggaaacaagttcctccttgcagaattgctgggccaagtgccggaaccctcgttcagcgcctgaacatcatgtgaggcgtgactgccgtctagtgcgtgctcatcagtgcctgtcctctacatgcatattccagttaatctttaaatgtatcactcgggtgggattgcttgcattttaatcgataaggatgttggttccaaagaggtcaagtaattgatctatttttacatattaactaagcagcagtgaggcctgtctgaattcaaagatgatgttcttcagttcagttcagttcagttgctcagtcgtgtctgactctttgcaaccccatgaactgcagcatgccaggcctccctgtccatcaccaactcccggaatttacccaaactcacgtccagtgagttggtgatgccacccacccatctccttctctgtcatccccttctcctcctgccctcaatccttcccaacatcagggtcttttcaaatgagtcatactatattgtcaaatctaatttcaccttttatcttgcatcagctaacttggagtgctaacaagtgtgggtctaaacttcatatatgtgactttagagacctaaatatgggatattttggccccatcttcagacagaagcccgactatccatatgctttctgggtcttttggcttcagccttcgtcatgagaacaacagcactgtgatatgtgggcatcatctctttccacctgttacatctcagcactgtgagcagagctctgttctagcccttactatatccagttattgtctcagtcaagggaagcagaaagtgatggaggaggaagtctggtcttggagatggccaggcatgggttcattttccattctattcccttgctctgtgacaggggactagtcacttacccctctgtgcttaggtcacctctctgcatcatgtgtctggggtggggaggctgctgtccacttcctaggtcaatgtggatgaatgtgaagtacaagtgcttaacgaggtgagttctgactaaggagccttgcagaagggctggaagcaagatcatagtgaaactcgggggatgtgagaataagcaaggggcaaaggagagcggtaaggaccacatttgatgccatggcgtaagcacttactacatacgcggcatctagaaagtggcagaggcagacaccaaaccctggcctgcagcttgggtagagcgacatcctggcactgaacacagtactaggatcatgaaaggcgcttttaactatgtgagtaaatgaatgaacttgaatgtaccacatctcattgctgaatttccgtttctgcatcaacaaaatggggataactgtacagacagtgtgtggcagtctcaaggattacacagagtggctttgtaagttgcagacttttataaaggtcatataaagagcacttatttgggtaagagtactttcttggagtagaagagaaagagagacattttatctgaggggaacatggaaggctgtagttaataaaacatgtgaatgaatctccaaatatgaggagctggaaaaaaatttaaacaatgctttttccgtcagcaacttatgtttccaaggtattcctgtaatatatttcctccatcaagagagtacggcgttacctctctgcttagccaagcagcatgaataacagcatgctgggaaagaagtagtcttaggttttcaaatgataaaacctgggtagaatcttgcttccccaattgccagctaagtattcttgggaagtcacttccctgtctctgagcctcagtctctgcatctgtaaaacagggtgaaattaactgtatctcacaagttcaggatccagagtcaatgatgttaatgattgtggccggcctggtttaatcttcgttccctaaaaggtagtttctgtttgtgttagtagagtgacccaacgtgtcagtagaggtctcaggatggaggagtctttgggccaccctgccagtgggggtggagcggcggagaaagaggaagatgttagcttcacgggcctgggtcagaagtcacaaggccatgcgctctctgtctgtctcagctgtaattgtagaactgttccagagccacatctgaaagctgttaggggaccaggcagccctggaggggaagaaagtgacagcccctgatgtggggaaggaggagagaatgagaagggagagagactgagaaacagatacacacatgcacacccacaaggcagagtggaaagggcaagacagacacaccaggaggggacacagtcagagcctgtgttcctccgggttcagggagctgctggcaacctcggctcggttctttcatctttacctgtgcaggtgggctgagacccactgataatgtgaactagagggcctg

SEQ ID NO: 62716 - DNA, 2577 bp, Bovine  19866880397212
  misc_feature (1)..(1): n is a, c, g, or t
nctgctaaggtgttccttattgaattctcatgcagatctacaacctgagttttattatttcagctttactgaggttcatagaagcaaagtgacttaaggccacacaactaaaaatgtcaaacccggatttgaatccatggtctgtggtctttcatactaccattagattttaagttatctgaggatagagattttgtcttgggcacatttatacttgctttctaacagtgccaagacataggaaatatttagacaggtctattgagtaagtaaatgagtataagtgagtaaataaaaatgtaagtgaattaaaggatgaataaataagtgaaagaatgatggagtataagaatgaatggataggtagatgaatgggatggatggatggataaaggaaagaagaaagggggagatagatggagagataaacagtggatagatggatggataagcaaatgaatcaatgaataaaagaaaaaatatgagtgagctgaataattaattggtcaacagtgccgtagtcaacaatggcagctttctagatgggagagggaggtggcttacagcttcataatcagagaatgaagacagcaggtctctagaactctctgttacagctctgtggccgcatatgaatgaagaaacactcactgagttgggaaacaaagacaatgagcccctttcccctcggagatgaacaggtgagtctcagatgagtcagcgtttgcatctccagacattgggatgcaatgactctgtgcaatactctatgaaacagttataatggtactattactaagggtctggatggacctaatagtgaaagagtatatgtatatcctacaaatgtatatagactttagatatgctgatctaccatctttcagaggggatgtcatgaaattgagaaaagaacaccacgcagagactcctgtctctgccctccttgcagacttgctgtgccccctctctggcctgctgtttcttcctcagtaggaggaatggttctgagtaactggcttcctagggccctttagcactagcagtgtatgattctgtgactcactgtggtgatatttctaaatcttagcctatcaaggtgcacacacagactggtctataaaacacttggctggcctggacagattactcatgccttgcctcccagactacttaaacttttcctgtctgcttcacgctccccacatacaaagtacgtcttacttgtagagaccgtcgggctccagacacttgaagatgacggagtagatactgacttcagggacctctccatggcttcgaccagctgctacacaagatgtgcccaggccagagagtaagtcatcggcaaaactcaggaattctcctggagggagacaaagagagatgagctccccagctcaggccttggtgagcagacattcttgctgttgtccaaacccatctaacgtctggataccattattaagaggattaatggacagaacaagcacaggatatgaaaatgacacagatcagggtctactcctgatgactctttgcttaaatttctgtctgcattttctcaagtgtgacatgagatactaatacctacctttataagattctagcaaagctcaaatgagcttactgtgcaatgaaaatgcttgacaaggcaacaggaggacagtgctctctgtctagagtaactattttggccttgtcactgccatttacttcctctccccttcttcagcaagcttctttggagttgcagtttccttgctcgcatgatgaaggtgttggactaaggatgtcaaacaggcctcatgtcacatggtcactgttacacatcggtactggcttcatggtgtgttatgctgagctggactgagactgttacagctaacagggaaagagttccatgactgattagtgatgaagctcatgagacaggaagggacagtagacgagcaagtgctttggaccccgtgattcccaaatgttggtctagccattggattttaggaggctgctgaagtttactagaaatagggctaatcagaaagatgagatgggcattcctggtggctcattggcaaagactccacctgccaatgaaggggacacaggtttgatccctagtctgggaagagcccactgccctggagaaactgagcatgcgtaccacaactattgatcctgtgctccagagcccaagggcagcaactactgagcccgtgagccacagctatgaaagcccacgcacctagagcccacgctccacgacatggagacgcacagcgagaggcccgcgcactgcagcaacaagtagaccctgttctccacaactgaagagcccatgtgtagcagggaagacccggcacagtcaatagagtaacaattttaaaaaagtgagcagatacgtcttcctataaaataaaagaagggaagatgaagactagaaagaataactaaacatctgaaatcttgggatctaggcttagcctagaatttgctgtataactttggacaactaaattcccatctctgtactccagttctctcctctgaaaagtgaaggtactacagtcactg

SEQ ID NO: 62717 - DNA, 1013 bp, Bovine  19866880397771
  misc_feature (1)..(1): n is a, c, g, or t
ncagcccaccagggtcccccgtccttgggattctccaggcaagaacactggagtgggttgccatttccttctccaatgcatgaaagtgaaaagtgaaagtgaagtcactcagtcgtgtcctactcttagcgaccccatggactgcagcccaccaggctcctccatccatgggattttccaggcaagagtactggagaggggtgccatcgccttctcctacttctctccaaatgatcctagatgctcattcttctcaggaccagtgggactcccagcttgcctcttagagagtagctcttcccagattatcctggggaaaaaagagacactgaaaaccagcaactgggtcaaagagaatgaaagaggaagaagaaaaagaaactaacatttcctgcagacctcccccacatgccgtgcattctggtaaaccccattcatggagtttcttcatgctcttccctacaggtctatgagatcagaagattcccagccccctttcccagggggaggaactgttgtctagagcagtaacccagggccttcccaggggccagccgtgggtacaggacagcagcaggatgtacacccagctccgctcatctccgaagcctgagctctttccactgccacatgtggcctttttggcccaagaggaagaaaactcattttggttagcaatgagcaagcagaaaatgcaaaaccccaagaactgacattgaaactcttttaaaactggagacttgagtcggtcagacttcaggggaggagagccgccagtggggtgagagacgggtccaaacaacacgctggctccttgtcagagcggcccgcatcccaggcgcgttaataaaactggtttcagaaagaaaataaagaagtgttcagcgttagggatgacaggctcatgacaagcacatttccaggacaggagaagaaatgatgctcctgctttgagaggtggggggggattgttggtaaagaggaacggaagaggttagggaaggtactcatca

SEQ ID NO: 62718 - DNA, 897 bp, Bovine  19866880402721
  misc_feature (1)..(1): n is a, c, g, or t
nagctctctctcttctatgtgactctgaacaaatgtttagtccctgaaatcccagtttccccacctgtgatacgaaatatgatgatgaggatgccagatctatagggttatggtgaggacggagtgagacagcacctggaacatcctgggcctggttcctgacactgagtgcccaatacatgcttaccattgcttcacccctgttatccaggaggccctggggcctctgagaattgggccattggtccggagtctccatcactgcctcagtatgcaagtcacagaacccactgagtttaacctttccatttcacaggtgagaacatcaaggccagaggcaggggaggagcttgggagaactcccaggtcttgctgggagcaagtatgggaactgctcccagtccaactcctgacctcaggctcttccctcaccctgagcctctggtccccctgtgggtgtgggcatggggttgcaggaccccggcttccttggcattcctctcacagagctgaggcccagaaggggagggcaggcctgtggcgagcctccgaacgtgtggagatgagcccccaccccaggaattaggcctggctgctgctgtgtttgctcaggaccctttggcagtcgtccatgctcagagaaaggcaaggcggccaaacaagacagaggctaattacctcggataataggaaattggggagccgcgacaaaaagggtgtctaggcctctggccaggcgagggcagaagcgatggatgcagctgggtctgacccttccgccttgagccggcagtccctgctcagggtcaccctccgactccagcagcccaaaggcgccggagctgggcacagtcagagctgctggggacccgcgccctctgctgctctttgttttca

SEQ ID NO: 62719 - DNA, 1894 bp, Bovine  19866880508613
  misc_feature (1)..(1): n is a, c, g, or t
ngtacagtttaactggcagaaagcagcagagcacagattgtttcctttagggaaggggaggctcgtgatccttcgcagaaccttgcagaatctttttgcatgctaggcgcatgctatgcattttctatacagcttctcatttttatcctcctaacgtctgggaagagtcattatttcaccaactgccaaagaagaaactgggaatccgagatgaagcacgctgctgatcaacacccagctaattagtggagagcggggatgtgaccgcagctccgtgagacccctgagcccccaagtaccacagaattgcagggcatctcagagagaatcagatcagcttggctcattagctcctcctcagcactcacatccacacaaaagacgggaactgggcagcaggggcggatgggagggtatggattttggaatcacgctaatcagggtttgagccttaaaaccttaggtaatgccttaacctttctgcacatcaatttccttgtctgttaaacggggataataattgcaccaagggctcttctaggattaaatgacgttgcatatttaaaaacatctaagtatgtcattcacttagcaaatactcttactgcatggtggctgtcattttctacttgtttttactgaagtgtagttgatttacaatgttgtattaatttctactgcacagcaaagtgatttggttttacccacacacacatatagatacacattctttttaatgttcttttccgttatggtttaccataggatattgaatacagttctctgtactataagttcttattgtttattcattctctatagaatagcttacagctgcatggtttgttgttgtacagttgttaagttttgtccaactctttgtgaccccatggactgcagcacgccaggcttccctgtccttcactatctcccagagtttgctgaaactcatgtccattgagtcaaggatgccatccgatcatctcatcctcggtcgctgtcttctcctcctgcatgatagctattattttaattagagaagttgaggaatcctgagtggattgctggagagattttccagagaaatgtctggttaaatatggatacagaatggagactaataacaaaaacaagcagggttaggaatttgggcggggggtgggtgggcttctgcacggcagggagtggggagagcaaagggaatctggcccatttaggagatggccatggtctcagcctgcctagagctgaaactacagtacactagaaagaaggccgcagatgcagactggaaccaggttatgcctcatcagctgttatcaagcctctgtctcagtgccttctgaggtagccaattttattctcaaaccacctgcaatttgttggaagagttttctgctgtgtcccctctgagcctcctctccttcagatttaagcatcttacctgtgtgagcactgcttcctgatgacgcctgccttgggccccatccactgactgtgtcctggttcatcaagtcagtggtccagaactggggctgtccagccatctctaggaccagatggggcttctctgacctctgttctggaatcttactacctttttgtcagtaaggtaatctgcaatctcacattcttgtttgggccaacaccttctccagttggtagaaacggatcccagggtgactcctactctttgaaactttctttgagcatgaatagttatgctgaccattatctgtcatctctgatcaaaaacaacaggggttttgattgatattttcaaatattccaagttagctcttaagattgaggaccaatggccctccttttctttctttcttcctccttccatctcttcttcccatctttccttccttcttccccctcttctttc

SEQ ID NO: 62720 - DNA, 913 bp, Bovine  19866880580729
  misc_feature (1)..(1): n is a, c, g, or t
nctccaggcgagaacactggagtgggttcccatacataaactaggtaagcaataacgatttactgcgtgagacagggaacaatattcagtatcttgtaacaacctataatggaaataatctgaaaaaatccatatgtaactgaatcactttgctatacactgaaaactaacacagtattgtaaaccgaatatgcttcagtttaaagagaaagaaaaaagactatcctcaaagacataatttttaaaagggacatttcattaaaaagtaataagtaggattttgaaggatcctacttatggaatcagtaggctggaaagtgaacatatcataagcaaaggagtgggggaagttagtggttttacagatagtgtaaaaaagcactgtggggactggcgagtaaagaggcgttacagaaccagatgtcaagtgccacgctagggagggtgtccgtgaggaagggcaactgcagtggaggtgagcatcagctgcggtgctggaggcctctgtcagctgctcactgttcagcagagcagaagcccagggtctcctgccgcatccattccctgcctgtagctcgagtcctttcccaaaggttccagggccctctctgctgggatcaccttgcaaaagagcatccatcccagcctctgcctgggttgagcaagaggctgggagtgaggaggcagcagctgtgagtcagactgcccccatgcaggctccagcccggggccccagcggggacagagctcttgctctcggctgggttgcgttttgccgaatacgcgctgtacagccaagcgtggctcaggacggcccggcctcgctgggagccagccaagtggctcatgcccctgttctcctctcctcatccccgcttcttcttcccttgctcccgtttcttgcctttcactt

SEQ ID NO: 62721 - DNA, 988 bp, Bovine  19866880723033
  misc_feature (1)..(1): n is a, c, g, or t
ncttttctgcggatggtaacgagagcaaggctcgggcctgagtggatcaagaaatgtgtgggggtctggcccgagcccactgcaggttacagccccagaagggccataatggggaacaggcacattcctgttcagcggctcccaactccctgtctgttttcaaggaaaggaaacagaaaaagaatgttagggtggtctggcacaggcatgggccgggtggcagtagccgcctgggtctagaaggcttctgccatgcggccgtgacaacgttccgggaaagaggggaccgaggtagcccgagcagtgtcctgggggaaggcgcacagcgctcagaggtgggggagccggactggggttctggactctgagcgaaggtagctgcaaatcctcaaacgggggtgtattaataacattcccgagcctctgaatttctatcagggaatgcggcagggttttaagagtcaaacattttaagcaataaaacttttaagccaagatttttaaaagacagtctttattcccaacctaaataaaacatgggccattggtctataagatagatcaaactggagttgatctggttgcagtttgggttgggtacacaggagaccaacttcagcccccaccacatccactgtttcttcctcctgcctggaggtctagatgctctaattcacaaaccaccggactgcattacatacgtgaagtctatggaatgccttctgtctttcctgggctttctattgtcctcggaggtttcaagtgtgagacgatggcagggtggagctgtgcgccatgtaaagggcccggcacataggcaaagcccagcgtatgtggttcacatgcgtgttgattaaagctggtcacaaactgaggcgctcaggctgcttgagcagctgcagaagctcttctgttctcagtgattttatcacatatgctcaatggcaggacttgtcccataggctccaggagttgagattttattgca

SEQ ID NO: 62722 - DNA, 1004 bp, Bovine  19866880727462
  misc_feature (1)..(1): n is a, c, g, or t
natcactgggcatagttatgttgggggctcacattcagatttcactcctcaatggtcttatgaccttgggaacgttatttaaaatttcttgcctcaagtcctcatgtacaaagtgagaatatcgtgtcaggcatatagtgagcctgtgatcagtgtaaatgatactaataaatattaatatacttacctaagttgaggcctaaaggatgaatgggaatgagctctgtgtagtcaaaggagagtgttccaggtagtacagagctcgagtccaaagctcagatctcagagaacattttgttgttgttcagtcgctcaatcgtgtccaactctttgaccccatggattgcagcatgccaggcttccctgtccttcactatcccctcaagtttgctcaaactcatgtccattaggtcggtgatgccatccaaccatctcatccatcacccccttctcttgccctcaatctttcccagcatcaggtcttttccaatgagttggctcttcgcatcaggtggccaaagtattggagcttcagcctcagcatcaattcttctaatgaatattcatggttgatttcctttaggatgggctggtttgagaggacatggcatgttacaggaaccaaagagagttcagtttggctggagcataaagtgaggggtgggtaggtagcagtggggttgggagcagaagccaagtcttgcaaggtaggcggaatctgaaactctgggctgctgtatccttgagatgtgagcctatttccaaatctcaggctctgaagacaaatttacaggtgaacagagtcccaacaactgacgctttgtatgtgttaacatgagttacaagagaaccacagatgtttgagatgaaagactttggcagggagctttgtggaaaatatttttttaaaaatatcatcgcagagaaaaattagcaatgacttgacagaaagccattcccctagcggaagggaaatatcaaggttttgggtttgggtcttggat

SEQ ID NO: 62723 - DNA, 2374 bp, Bovine  19866880875277
  misc_feature (1)..(1): n is a, c, g, or t
ntaacatcatttaagcaaaacagcagtcccttgaatatttactacgaaaagtttttaggtgaggaaacaaatatctagagaggtgaagctacctgcctatagtcacactgcttttgtcacaggacaggaacttaagcaagtctgactaattccatcccaagacactgctctctggaggtgaggaccctggctgttataaaccagaaaagagagcagaggtgaaaagatcaagtttttgaatctgcatacaaagaccagttggaaagttctagaagtcaggagagacacacattctcttaaacaccatgaatggctcactcatcatgggcaagccattcctcctctctgatcatccatttcttcatctacaaaatgggcatctgggaagaatgtgacaagcagctctaatttaacgaggaatgtggtgttgcatcttcctgccacaggcttttctacaagctagaagctgcctcagcacttaaaattctgcgctgagaaggatgtagttctaaatctgccacccagattgactaagctgggagacatggtagccgggaccacctaggatgcctctggctcaggaagagcccaagtattccagggctgccttgggctaaggataagagggtaatccctgggtacttcatacaccagcttccagccacgggaagagaaggaaacaatcacttttggagcctgagaggatgtgcccaggcacactatacataccattagtattgtgttgattagaaaatatattaatcatacagagaaatacaaagaacattataacaaatccccttaggcttaccacccagctttgtcaaattaaaacatttcgtcatgttttcttcctctttttttgtggggcggttggcgggggggggggggcggggaataaaatatactgttttgtattttttgttttcaatccaccatttctctctcacatgagtatttttatatttcttgtgcctatgtgttgctctgcatgttttacaattcctaggtgttttaatactatatttattcttgtgtagcagtttttttttaaacccagcattgtttttgaggtcacatagattgatcatatagatcaatgcagtaatatatttcctttgatcattcttttcctgatagacacccagattatatctctgtcattattactatcatcgttggtaatctttttatttgttatttccaacaacattgctctaaacacacatgttcatgttcctttgcacataaagcatgggtgtctgcaggaaatacatctaaagtggaattgctaggctgaagatagttgcatcttcaactttattagatattgctaaattactctccaaaggtgtactgattagcacacctaccaatagactttccattgttccaggtccctggcagcactaggttctcccaaacatgtaactttgtagctaatctgatgggtattaaatgatacttgggcttccctggtggctcagatggtaaagaatctgcctgcaatgcaggagacatgggttcaatccctgggtcggaaagattccctggagaaggaaatggcaacccattccagtactcttgcttggagaatcccatggacagaggagcctggtgggctgtagtccatggggccacaaagagtcagaaatgactgagagactaatgctttaggggcttccctggtggtagtattctactttgcctttccctgattactaacaagcctgagtatcatttcaggtgtttgttgaaaacatatgtttctacctatgttgactgttcatcactctggcctattttaaattgggttcttttgtcgttattgatatgccatgcatttatagatactggatactgattctttgcaattttttttttcattctgtttagcttgttttgttgaataaaaatttttaatcatttccttcatgatttgatcttttcatggcttgttaaataaacgtttgtttactccaaggtattcacaaactcaaataagtagtctcccctattttcttccaatagttttaagtttttatgtttacatgtatggcttcaatcaactacaaacagtttttaaaatgatggtgataaggattgtttccccccaaatagagatgaatcatttgtctgacattatttatgtaaaacttaatcctttcactactgaattgtgacacattctttgccatatatcactcagaacttagataagctttcttttttttggggggggggttgtcttgtttcattagtttatttttttcctattatcttatcaatagcagtttatcttaatttccatagttttagaaaagtcttattatctacaagtccactctatacttggtttgtccatcaaaagacc

SEQ ID NO: 62724 - DNA, 1152 bp, Bovine  19866881010536
  misc_feature (1)..(1): n is a, c, g, or t
ngaagcagcgttgcaggaagggtaagtgaaaccatttgacagaagggctcctggcacagaggttggtccagtggggtgcctgataaatgaagtaatttcacggtcaagtgtgcagactttgcttagatactgtgaatcccatctctgcctttcctagctatgtgaccttggacaagttatttaacctctccgaacctctacacaactgggatcaacatcatttatgtcattgggttcctgggaagatggatataagtttcaaattaatgatatccatgacaacaatagcagcattagcaagcacatacatatcacctgctaggtatcacttataaaatgttttacatgcttaaccctcatttcatcttaacaactgtgagaggcagggactattactaacccatttcactgatgagcaaactgaggcacagagaaaatttgtgtttggatcttgcttctcaccccaaatccatgcccataatcatgatacccattctagctgacagatcaccaccattatcaccacctccatgactaccactaacacttctctttccctcttttaaagacaggtctccaagttaaaagaagttttatctcaagaaggtattttggcaacagtcactgtgttttccatggagggaggtctgaaaaactacatatgaccaggagacgttttatttttttatttcaatttttttttttgtaaggtgagaggtgggtcatgtattatgatttcatgttgttagaaagaaaaataataataaacacaactcccagcagagcccatgcttccgcttcttcccctccccctaccagatgctattttcctttttagtcagtgttgtcctaaactctcatcagaatatccaccaagaagacacagcgattcatcttcttgttttcctttctcaccttggctgggagcaggccagggcagcctgacagaggggccacaaggtgtggtgacccccacccctcccagggactggtggggaaatggattgatccctccccgccgcctccccccttatctgctcacagataatttagttattggccctggctctaggacagggctggggatgctgtgtcctgagcagagacaaagcgatgctaatggcaggggtgggggagaggaaggggaaaaag

SEQ ID NO: 62725 - DNA, 1758 bp, Bovine  19866881043256
  misc_feature (1)..(1): n is a, c, g, or t
ntgaggatgctacatttgagcatacccttagagagtaagcaagcatcggttaagaaaggctactggaggtcattcctggttgtcaaaaaaaacttccttgtctccccatctttttcccccatggatcatcatttgtacggtattgtagaaccacttcaccagttttaattggcctgtggcatggcggtttgtgtatacatctggctcctcccagagctctttagggcagagattgtgcttcattcctctacatatccatatagagtttcacagaagggaatacactgcaaaggttcagaacacgggctctgagatgccatctttactttcatagactatcaagtctaatcgggggcacacattagcacacataaatatgtcactgaaaagtttaacaacggtaacaaaggaaagggatggggaatctcatttagattacgggttctggggaggccattccaaggaagcaacatcgaggctgagaactgaataagtggcgcagcttacgccaaggccctgtgatgcgccagagcacaagatctgcagtgcattggctcattaaatgctaacgtggcttctggggaggctgggctggttaatgattaggagcctgagctctggagccaacctgtctgaatgtaaatcctggctcttgactggtgtgtgagtttaagcaaatttcttaacttctctgggctttggttttctcatcagttcaatgggaatcataaaccactatcctcattgggttactgagaagattggataagttaatttgtgtaaagcatttaaaacagtgcctgacgtattgaacgcactccaagtacaaaacatatgtatcgttgaatcttttattttccctcaagtgtttacatggatagtattaaaaaggacgaggcaaaagtcttgcctggagaagacatatccaggctagcaactgagaaaaatagtggggaactatgggaagatacccaataaaataccagggactcaattcccttctccataaatggtataatccttgcctctagagtagcctgtgtcatggtggcagtagcactcttgagacaactacaaagagcttcctttggcttgcaactggttatctggctttggacacagttactgagattcctgggagaaagtgtaactccatgacatggtattattttaaaaattcacaggagtaaagcaagaacaaataaaaagctccagggattaccactgcttattttaaagatgcttttgtgggtttaatatccatctagaagccagcaagattgctgtttatttatcctgtagcttctgcgtgtcttccttgcccctgtgcactctcccccccactccctgttacaggccacagataggattaagaaaggtctatttatggtcttaagttattacacatgttgaaggagagatttctagggggcaggcctgtgataaggatgagaggagctgggtatagttttgggagtccggcaggcagctcacccacccaccaacctcttcacaagtgagatggctccccgggccttccttgcttgtttgagtctgtgaatgtttcccagaaagacatagtaacttctcctttttctggcaagggcgcctgatgaaactccctgaaaacaaggcctctccttccccttcaggctggcctcacacatgctaatgcaaatgagtcctgacccagcctggggtctgcgggaaggcggccagaagttttagaacaaacacgcaaagaatgttatttcattt

SEQ ID NO: 62726 - DNA, 1249 bp, Bovine  19866881182747
  misc_feature (1)..(1): n is a, c, g, or t
ncagatatactagtatgagactccgaggcttcttccgctcaactctaagaactttatgtggaattctgcacagaaaagcatcagcatcacatcagcaagtggtgataaacactatgaacacattatctgtgcacagttcctgagagtttccaggaacacttgcatctgcagcacatctttaactctcatgaccaccctaccgggtagatattactccaaaggagacaactgagactcacccaagtgcagtgggacagtcgggaaggggcagattcaaatccaggtcagagtgtcactacagctcatattttttccaggaaggatccccctctcctagctccacactaggtatattaacagatacagatcaaaggcaccgcagagccgtgcggttaaaagacagacaccaggaccactggggacatctcccaggagggttatgcctcttgcctgtgctacttaggaagcagaatgttccagtatttcagagctggaagacagctaatccaccacccctcactttattcagatgagggtgctgaggtccagagagggaaagtgactctcccaaggtcaccctgcaggtcggcgtcagcactgggacctcgaacaaggtgaaagaggtcctcctcccacagccatgtctctactgccctcccacaccccctggagctcagagtcatggggtcctctcaagccccaaggcagagccggccagaggccagacgatggagaagggagaaacacacagactttttcctgtaacacccatggcctcccggctccagggtccaccccggcacgcagacccagggtgccttacctctgctcggcagagctgtaggtctcccctctctggcagctgctcagggtgacggggtcaaagttgtcgaaggagcggagggccacccccgagatggcgaccaggggtgaactgaagctcacgcgtaccgcctggctgtggtagaagggctggctgaggtcatggaccacagggataatcaggggattgttccggcagctcaggacgtggaagcctgtcaggggagacagagggccggggggccaggctcattactcaaggccagtcacgccctccccaacgggcccttcccgaagcccccagaccctttcatgtcactgcacaaaagcaccattgggtggccagtggggattttgagtttgattgaaagtttctttgtctgctttttctctggctccaaatctttccaatcccctcgcctcgccg

SEQ ID NO: 62727 - DNA, 1082 bp, Bovine  19866881236141
  misc_feature (1)..(1): n is a, c, g, or t
nagaacgaatcacctaagaacaactccctatccacagagaaaagctttatatgttgtcccctcactttacaggcaggaaaaaaataaacaaaggtgaagcaacgtgccttcacgtcacatagtgagttaggagcggagtcagcacgggtccccttttcctctgtcagtctcagacctcacttaatggagagcttccacttacgggagacagtctgcagttctgcctcgcgctggccaagagcaatcagtctacgagcagcgcccatcgggtaagcacagaagcctctcccttcatcaatgtcataccttgggaaactatctgcagtatagataacagaaagaataaatatttttgttgagagaaaaaaatgaagacaaaggtcaaagggaatcatgtaatgggttgagtcagggaagaaaaagaaagcattttttctctccctcctctttttctccaaaacagtctttatatagaacttgtctaagagccaatttatttgatatggaaaaaatgtgaaagcagtgaaacaacacacacacacacacacacacacacaaagaggtatttgtgttggagtttagaactcgaattaccaagagataaaggagttgaaatagtaggttgacttggaacgatattttattttttcagagtctcagagaactttcaagtcaggaaacggaacccggcccagcccaggtctccaataaattccttgggactcgagaaagacaaagaggaaaaggtcaatgaaggactcagtctagcccttgtgcctgcaacatagtcggggccaaagacacgtttgttgaggatgaaggggcaaatggtacacagtctggacctgaagagtggtgatttgggagcaaatcggcctaggacttggcatttttaccaagcagttaaggtcttcagcaatacagtgtgagtgtctaaggaaagaggaccgagtcatctctgaaatctacggctcccagcacagactatggcacctcgaatgttctcagtacatacttgtaaattgaatgagcagtcagtcgtgtagtaaagagaacgggagcttcctgggcttagagatcag

SEQ ID NO: 62728 - DNA, 1640 bp, Bovine  19866881244936
  misc_feature (1)..(1): n is a, c, g, or t
ngctggtttggaaagcgaattgctgcatagtaaggagcagaattaatgaatgagcgatgaacaaatgtgaaggtgggagtgaaggaacaagtaagcatatgaaagaatgagtgagcaaatagacaggacacgagtggatgactgagagatattgactgattggctggaacttactgacctgtggatgggggcccgtggaaagcggctcgtcttgcccttgtccttacccatgacctccctctccaggctcagacgtgccttttcaggcccatccgccctccccctcctaatgctccctctcacctgtctgcagaagtgatgactgcactaatttgttcacagaccattaactctcgagcactggaagaggccagctcccagttggcaagggccggggtgctggcttccgggccgcccgggaggcatcatcattctcttgcctgtcggtccgtgcaacgaggtgcttatctctccctctgcctgcttgcagatgacgactgcaccgactccttcacacccaatcaggtcgccagaatgcactgttacctggacctggtgtaccagggctggcagccctccaggaagccagtgcccatcgccctcgccccccaggtcgtgagccacacgcccgactctgtgatgctggagtggttccctcccatcgacggccacttctttgaaaggtgagtgtggcctgtgaagtgttgatccctctctctctctcctgccaagaggagggaaacttggaagggaaacagccttggagagggatttctcagtgtcttttattgttgctcttgtttaacaagtgcccacaagtgcccagatggtaaagaatctgcccgcaatgcaggagaccctgggtcaggaagatccctgggtcaggaagatcccctggagaaggaaatggcaacccactccagtattcttgcctggagaatcccatggtcagaggagcctgcctggtgggctacggtccatggggtcgcacagagttgaacacgactaagggaataacacacacactcgaggactaactggtacagcgactgctccatgtagacgttgtagatttggggatcagggaatacataaatgattgctaacagaaattaatgagtaatgatgcataatttctgtggtgaatattaagctttgctttattgttaaaagcctggaaacttctgtctcctgaacctcgtctggaatggaggtactggtcacatctcatgagcttgggcatttacctgcctctggttaatgagctaactcctttgtatacacgtagtaccatataagaagggcacattatatatggatggtacacatgcatatatatatatatatatatatatatatatatatatacatgtatttttgtataacgagcatctttgcctctgttgtttaatagaactgaaggtagaatttttagaagatcagatcagatcagatcagtcactcagtcctgtccaactctttgcgaccccatggattgcagcacaccaggcctccctgtccatcaccaactcccggagttcactcagactcatgtccatcgagtcagtgatgccatccagccatctcatcctctgtcgtccccttactcctcttgcccccaatccatcccagcatcagag

SEQ ID NO: 62729 - DNA, 1729 bp, Bovine  19866881300050
  misc_feature (1)..(1): n is a, c, g, or t
nataatttagctttaatagtaacaggttaacatttggttaactatttatcgctggctaggcacagaggtgctttatgtgttctcatgttcaacctgtgggaaaatgctgtgaaacggggcttctgactaatttgaaataagctcagagcactggaacacccgcctatgacttctcagcgagcaagtgaggaagccaggatggaaacttatgtttgctcacctcaaagtggtgtttactgagacggaggagcagggagaggggaggagaccaggcaaggtgggggagaaaacagtcacgaatattagcagagcccctaaatatcatcaggcataaatcatttggatgcacaccacgaatgagaaaacacgagatagagacgtaatcttcacagtctcacgcttttccacccaagtgctccatctgcttcagacagtgaccatatgccccagtagcctgggaggtagcctgtagaatttttttaaattgtattccctaattgggccataattgtttaatataaaacatacctttatatatatatattttaattttatttatttgactgtgtcaattcttagttgtggcatgccagatctttgttacatcatgtggaatcttttgtttgtagcacacgcactttctagttatgctgtgtgggcttggaagtgcacaggctcagtagttgctgtgcatgaacctagttgccctggggcatgtgggagtttagttccctgaccagggatcgaacccacgtccttggtattgcgaggtggattcttagccactggacctccaggaagtcccagcctccatattttaaagcaaaattaatgtacaatagagcacatgtcatctttatcttgggccttcatgcatcccccgggaaagccattcttccccctgccccaatattccagtttcagaagcaccatctgaaaatgtatacattcattggtctagaggtggtcaaatagccaataaacttttataaaagcctctaattatatcaacaaattagcattccagaggtttacaaggcaatcattattcatacagttatccatataatatatgtatatgcatcttgcctacccagctttcattgacagagcactgctagaatctccagggacttctggtctaccctcaatattcttacctgctccagcagtgctaaaacaagctgtctattgggtcataagtccagcattctcagagggtcgtgttcttcgggagccttcttcagtgctcataaactctaacttgtcactgtgttgagagtcaggagataatgtctgttgtcgctgcacctgttatcttattggccttatccaaacagccccagcccgatcagcagctgaaacaacagatgggcaggagaacttgagattttttgacaccatccttttgtttatgaatcccccctcaccccaactctggaatctgataggaattctcttcattaccattttgtgcattcttttttcccatgacacatttttattattaaaaaataattaattggtgcagagggagatgaaagagaagaataacatttccctttgaaaacggtcaaaaagaaaatggggatggtgatttggtcatgtggataaatatatctttgccctggaagataattgccagtatccagtttccttccatagcagggaattcaagtaaggagctaagaagaaatcagaaagggaggaaaggtgatctggtgtaagg

SEQ ID NO: 62730 - DNA, 1312 bp, Bovine  19866881353010
  misc_feature (1)..(1): n is a, c, g, or t
nacagtacagtgagcctccatgtgcccgccacgcaggattaatacatgtcaggcctctgtcacatttgtttcagagctcttttctcctgaaagaaattaaaattaaagatacacttgaagattactttgcctccctatcaccagtcttatcctgtttcctccttccctcctaagacataaccactgtcctaaatttgtatcagtgtagtctgaagaacagagtgagtttatgggtatttgttttacttttttaaaaaatgtgtgtattttttaattggaggacaattgctttacaatattgtgttggttttatatatcaatatgaatcagccacaggtgtacgtatgccccgccctcttgaacctccctcccacctacctccccatcccacccctctaggttatttggctttttaatttccaccggcattcctcacttcgtatgttagaaaattgaaactgcagcttcctccaactgacactgtggagtttttgttattatttattattaatattaacttaatttctgtagcaaccatagtcacagaaagttccactgtgttttatctcccttgggaaacttttttcccccctcttcttatgtcactacctgaaagaaaataaataagtatctttaaaatgtattcttctaatctcgtgcttacgcaaagccttacgtctctgagagcttgtccagccgtggcgaggtcttatcagggccggatgccccaaccgtgcccagccagcctgttcccttattctggtggctcaaggtttctaaggccgatgtgtccagtcgaccaaagaggcttatcttcatggggcaaagggagccggatggcggttggggctctgagatatgagatgaaggctgtgtagggttgcctgagttcacagcagagatcagaaccgctggctaaagcaaagagctccatagtggggagagtgcagccatagatacggatttgaatctagtcttctgcctgcctcatcaccgcagggctctgagtcccaagtctgcacatgggggagggagaggaacctcttttgcgtgtttcttggggagtcaaggatcaggcttacagcagccattgcacttggcacttacttaccaccaataatggctgatgggaagaagtggtgatttgggccctcctggcaagcagagaacagggcatgtggcccagagaagggtcatcaaaggagtaagaggaggggggaaaaaaatcaaagcagcaacaactgcccagtgtaagggctctctggagaccccacctacagctcagactaaatgggtagagacagtgcgatcc

SEQ ID NO: 62731 - DNA, 1437 bp, Bovine  19866881369203
  misc_feature (1)..(1): n is a, c, g, or t
nggaaagacctgccctctcatgtcgaagatacctgtgtcctcagttaatggtaattttgatgatgaacgtttggaggggggcagggggtgctgtcataaggtgagtaacttgactagacacagagggcttctgggctgcttcctgtctcctatctggggacattccatttttcatggcaaatatctcacttctccccagacactgcatattccttagtatgactgcttcagtgcaagttgcacggttgattcatcactgaatactaggatgtcagccataaagtgtccttggagagttttgagtgcaacccccttggttttgtaaacgagggccctttttggaagctcctgcccaagtacttcctccgggaatacgatacgactaacccatcccctgttctctctcttacaaccagactctgtcacgttataatggggaggaaagacagtggagggctcagtcatccagcccatgtcacactgactttgcaacggtcagtgacaaagctcgaactccaagttctcattaatgtcatccaggggccccatagctcggcagaaggtaccaacgggaccttcaggagcatcatcctgacgtcacagctagttctggggccagcgggtttgtcagcaggccccagcaaggggctgagaagcttctatcagctccaaattcacacaagaggaaaacaaaattccatcataatgttgaccatctgtggatgaggataatttttcaaaagaggccactggagagggaggatgcggaaaataaaaactattgtcttaagggaacatgatttgaagcggatcgctgatgcaactgagcaatagtgattatggcatagcaatatatgttactctaccttcccgggcttttggtttttaagtgattgtaagcttctttttataaaactgagggtttttttttaatgtttaatttttatttatctatttttggctgtgctgggtcttggttgctgtgcaggctgttctccattggggtgcacaggcttctcactgcggaggcttctcctgttgcagagaacaggttctagggtgcacgggctcagtggctgtggctcctgggctctagggctcagcagttgcggtgcaggggcttagttgccccaaggcatgtgggatcctcacagaccaggaatcaaacccttgtctcttgcattggcacgcggattctttatcaccaggagaagcccttaaacaccttttaattgtttgaactttattttattgtggtaagaatatttaacaggatctctaccctcttggcaagtttacaggctttcagtatgtaacatagtattgttaatacagggacagcatggcccaacagatctctggagctttttcatcttgcaaaattggaactttaaccccattgagcagcaactcctcatatcccttccccacccaccg

SEQ ID NO: 62732 - DNA, 784 bp, Bovine  19866881396583
  misc_feature (1)..(1): n is a, c, g, or t
naagatcccctgcaggagggcatggcaacccactctagtattctggcctggagaattctcatgcccagaagagcctagtgggccacagaccatggggttgcaaagagtcggacacagctgagcaactaagcatgcaaggtcctatcagaatcgactaggcgctctgatttcagggtgctgtgtgaccttcaagctgccactccctcgctgggccccgcatccctgaatttgtctgagtcccccttatgcctggaagtggtagcctcgtggtatctggaggctggattttcttctcaggccccagtatttagtgaagctttgccaaagcagctgagagatgagcacttctccgcagcccatgctagctctaggagacatactgactgccacggggaagctggcctgatgggaaatgtcacaagtaaaagtgaaacacggagaggcaggcttttctctgacgggtcgtatgttattgacacacacagcctgcccagaatctccccaagacaactggagatggacctgaaacttggggctcccaaccaaactttcctcttcccagttattcctgacaggtgttgacaaccagggctggacacacgtgggaggctcagggattaggaattggaggggtgatcagggtgagactgacatttaccgatcagttacaaccgactgagcacttctgctacgtgatctcatttatcctcacacagtactcttagtagggcgacaacttgtatttaaagcagagatttagaaaggcaagtactgcccaagttct

SEQ ID NO: 62733 - DNA, 1451 bp, Bovine  19866881423370
  misc_feature (1)..(1): n is a, c, g, or t
ntcatattcaaagttcactccagaggactgtttactatttatggtttcagcattacagagagttgaaatattttgctgtttttatgagactctgacccgttttgtaaattgttgatataacacaatagaaataacaaataaactttcagttttaataaatgtaaatggtaaccagcaaagaacgtaaaagtgttctcacgtaggtgccctgtgtcctgttaactgaatgtggactgaggtggaaaacactaatagaatctttgtcgcacacaggacatgcttaggaacaagagcacagtggtagtcagtgcagaatggtagctctgtggaaatcttacattattacacagttgagaactgtgtttactcaaaaaagagtcactgcttttcttctgaggcctgcaaactacttgcagatgaatcgagttgcagattgctggggctccctcacagctcacaccctgaagggtagcccgtaagctcttctctttggtatcctgaccaccttctgaccgagttagcattacccccgccccgtctgtagctagacctgctcacctctgaatgatgccatcaccgcagtacccacttccatggatgtatgtggcagcaggtgacggctcactctcttcatttcctgaaatagcgatgacccaatactggtacctactgccaagatgtacatcgctggaaaacataaaaacataaggaagactattaactatgcagacgcaaggctgcggacagacaaaatggatccccttgagtacatttctactagtctggcttgtttttgataccacccgcatatttaattattcaataatttttatttgttttttatacattttattggagcatagttgatttacaatttatattaatttctgctgtataccaaagtgactcctttgtacacatataaacattctttttcatattattttccattatggtttgttataggagactgaatacagttccctgggctgtgcagtaggaccttgttgttcacttatcccatacatactagttggcatctgataatcccaagtttgcaatccttccctcccccatcccactctcctttggcaaccacaagaatgttctctatggctatgagtctcttgctgtttggttgatatgttcatttgcgtcacattttagaatccacacataagttagttatccaggaatttttcgtgtcttctgtgattaagccactctcccacctatgatgggctatactaaaatgtagcatcaactgacatacaaccatgaatattaccaggtggcgctagtgggaaaagaatctgcctgccaatgcaggagacacaagagatgtgagttcgatccctggctggagtagaaagtggcaaccactccagtattcttgcctggaacattccaccaacagaagagcctggcgggctacagtccatggggccgca

SEQ ID NO: 62734 - DNA, 836 bp, Bovine  19866881463483
  misc_feature (1)..(1): n is a, c, g, or t
ntccttaacaaagaccattggcttaaatgccccttaaaccagcgttatttacacagtttctctacttccctttgaattctctgcctggggggggggggtggcctacctgcagtcctttccagctactagttaattaggctccctcccagaaaggaagctagtggaagctgggacttggtttttgaaaagcagctcaattcggaggttatcagagagttcacacgagctactggactgcccgctgcttctgctgacgttctaaaacgtgtggacctcatcagagttatgaccacagttggcattgtgagatagcagaggagtgaccattccagccgtcccagctttgcagggaaggtataataaaactccaagaacattcctggcaaacgctgccatggtgctttctagctctgtggcctgtcagccttgcaaacctgccgttttcatagatgaagaaactgaagtgacccccacccctttttttgtgggagaactggaatttgaaccaagcaacccagctatggagcctgagcacagaacctccatcctaagctcctcagactgagatgtctggcctgagatgatagctgggaagtggagaggctgtgagtccaactaaggtttgtctgactctaaagaccaacaaagttctaccacagtttgttgcctcaggaataaaaatgtctcttaagaaatatatcctcccttcactcatttctcctatatttactgagctgcaaattatgtgccaggtcctggacagattgctgggaagtgagatgaatggaccccgggctcagcactccaggagctcaggggttgcagagagaggcagg

SEQ ID NO: 62735 - DNA, 2355 bp, Bovine  19866881705735
  misc_feature (1)..(1): n is a, c, g, or t
nttgtctttactgtggctctgaaactcagccctggaaatgcttagtttaaatgttgccctcaaaggatcaaccaagtaaattggttggttgactgcaggtccataatccctgggagagcactgtgcattccgatagcctttgcatctccaccacctcctgtgcgggaggaggaaggggactgtttggacaggaggaacctggcttgggtagaaatgcagtggggggcgggggggtgcaggatgaaggaatctctgcagctcactttggcagcctgtggtgtaaagcaccggagaaatgtgagacctggaaaccaaatgagaacaagacgggatctttgcaaacacttaaaccaaactgtgctgagtttcccagaagagagataactctgtactttcaacttgttccatttttgttctgtctcagggaccttttgaattccagcagggctgggaaggtgcacagccaaaacatcccaagaatgtctcttgttataggatgttcagcccgatgcgcacagccagggaggtgtgatgcttctgataacatttggatattagactcgatgttcgggcggaggagcttagtgctaaccaaatttgggcatcttatttgagggggatggacaagcaagactggggactttgagaactgcagcattcacgcaaaaatggaaatgaaaattttaatcattttctagactcatctaacacagagagggtgctgtctccgcagtagccacagtgacagcctggtggtgataccatccaaccatgtcatcctccgtcgcccccttctcctcctgccctcaatctttcccagcatcacggtcttttccaatgagttggctcttcgcatcaggtggccaaagaattggagcttcagcttcagcatcaatccttccaatgaatattcagggttgatttccttcagaattgactggtttgatctccttgctgtccaagagactctcaagagtcttctccagcaccatagtttgaaagcatcagttctttggtgctcagccttcctgatggtccaactctcacatacctacaaaactaccggaaaaaccatagctttgactagatggacctttgtcagcaaagtgatttctctgctttgtaatctgctgtctaggtttgtcatagctttccttccaaggagcatgcatcttttacttcatggctgaagtcactgtctgcagtgactgttggagcccaaggaaataaaatcggtcactgcttccgctttatcccttccatttgtcatgaattaatgagatcggatgctatgatcttaagctttttgaatgttgagttttcagccagctttttcactctcctcttttaccctcatcaaggggctttttagttcctcctcaagcacctcatggagtgtgcatggtaccaccaacacaaagatctatccatcatggctctttccacctgattcacagtgacatttttcaggaacccggctacacccagttcctgaacaagaccacacattcacacactcccagtatcgtcttccaggagaacctttccatcctaaatttcccactatgggctgtgtgaccttggggaaaccactcccacggtctcagtttctccaaggtaagtagtaattcttcccttgaagaatggcaagggggttggggcccagctccatggctggtggacctcgacaaccactggttccctccccactctcctccctgtgcttcgggatcactgtctggacctgggctgctggatctgcaaggcctgttcctggaggatgctcgcgtgtgtgtgcctgtctgagtgtgtgtaaaacagacagagagagagaggaggaggaggaaagtggaggaggaatgcataattgggttaagggaagggaaggtgctcacagtgcacctaagaagcccacagccccctctctcaggccatcagcctcttgcctggaggccctgacagggtgaaaattaaccaccagcctcctctagtcaccgcgcagtgtgatgacggccacagccacacttcctcctcttctctgctctcaggagggagccgtgtctacactccaggaagaggctcgacgcagtcacgcaggctgtgcgtgtggtgtctgcgtgtgtgcatgttggcccacgcacaatggggttggtgtgggaatggcttccaggcactcgctttgagacagggaatcggggggacttttgttctgccggcccccagaccccctgtccagccctgcaccaggcggcatacacctccccacccctgaccctgtatcctccagtgagctgatctcattatggcaaatttagttacagctgaagtctccttgtaacaaagattatgtccaag

SEQ ID NO: 62736 - DNA, 1048 bp, Bovine  19866880400941
  misc_feature (1)..(1): n is a, c, g, or t
nacagatccttatgtggtacacagcaattattgttacagagaacacactggaaacaggtcccataattgcatgctagtcaagtctataaacagaatcattcactctcttattacctcttttacctttctctatattctctgtctgttgactgaagatattttcttatgcttgactttctttttaattcacgaatagcagtatacttttcagtccagatatcctaaaactttagaaatcgcttaagatgtttccatacctcatgcttacttgcttgcttcctatactgacagttaatgtaggaaagccattactgagacaatgaacatcaggccagaattatgttgctaattagcagattcagatggtgctaaggaagtcagtttttttctttactactgaaatgagtgggagggaattagagcagttattcccaacagaaccacatctttcttttattactctttcttgctatcagtctatctccattggttctctatgttcttattttatgtatagcaggttaattttatttgatacatatagactctgcaagttaaagttctaagttttaagtaaaactgtgttaacttacattgcttcatttctgatttttctcctgatatcaccctgtggtcattttatatgctctgtattttagaatatccaccttgatttcgaactatgttcgtgacttttgcctcatcccttccctgccacttatccaagttctatttgttacactttctgagactttcaaaactcactgtgagttaaacaatagcaaacatggcttttctgatcaaagtgtgaagtctaccaaatcttgcagtttcagaaagtgttaatcactcagttgtgtttgactctttgcgaccccatgaactttagtacactaggctcctctgtcaatggaattctccaggtaaggatccttgggtgggttgccatgcccttctccaaaggatcttgccaacccagagattgaacctgggtctcctgcattgcaggcagattctttactatcgagccaccagtaaagcctcaaaa

SEQ ID NO: 62737 - DNA, 1486 bp, Bovine  19866880414606
  misc_feature (1)..(1): n is a, c, g, or t
natccattaaactcttaactaaaaaaatgatgtatttttaatgtaaatacacatctctagatagaaaaatagggtaaaatgttaataaatattgaaagtgtagtttatatgtgtgctcaaagttgcagtctctcaattttttccactatcttcaaaactctgctctaataaatgaggaccgtggagctttggagtccagaatactttcattcaattccaaaacaacttaatttattaacaattgcttaagcttgaatcatattttccctactgcaaaaataaagaatacaaggtctaactagtaggatatgcagattaaattaatcaacctgtgtttgagttcttttccatgtaaaatcacagatctccatgtctttggagtcagttattggaagattaatgtgctcctttggcactgtcacagttgcttggttttagcgttcctttcatgtttagtgttgacccaggatctggtcaaagacttttcattacatttaaatgttatatctctcaagtatctttgttccaggacattcctcttttttttctttatgacactgttctgttgaagtcagctgttttacagaatatttctcattttggatccacctgcttacaggtgtccttgtggctgggttcgggtgaagcatctttggtgtcaaaatgcaaaggcgcagctctgtcccagtgcccctgtgcacacgaggggctcagggttcactttgcccagtaactggcattgtggcccctgggctgagaagatgattactggacttttccagtgtatgcacttctcatcctcttgatagatcctcacttatctgtgattctttgagactgtgtgtgaaaaatgcagttccccaacaatctttcacccagcagctcacagtaatttgctgatatggttctcacactgtcatctgtgtacatccatgcagtctgggtgtatctatagactcctgggggatgtgaaactagtgacctagtttaatcatctcagattccactcaagcacgctggcacttagagttgtagagtaacatttcctagatcatccctaggaagagctgactcttcattagaaaagtccctgatgctaggaaagattgaaggtgggaggagaaggggatgacagaggatgagatgattggatggcatcactgactctatggacatgagtttgagcaagctctgacagatggtgatggacagggaggcctggcctgttgcagtccatggggttgtagagtcagacatgactgagcaactgaacaaaacagcaataaagtacctgtaatataatgaatgccaaatacatggtccactaaattttctataaaatgttttagtttcttaattcactttatcagtgataccttactaccatggaacataaaaaacattgtctcttgttggataagtagtctgcaggacatccatttaggtatttcggagagcaacctaatacctaaatattcttttcatg

SEQ ID NO: 62738 - DNA, 1573 bp, Bovine  19866880441147
  misc_feature (1)..(1): n is a, c, g, or t
nggactgcagcccaccaggctcctccgcccatggtattttccaggcaagagtactggagtggggtgccattgccttctccaattttaaggtataattcatcaaaaaatatatgctgtcctcacttccaaaactgtcctcacttcctcgtcttcctcctccgctacctgacacgtgcaaatacagactcagagatacacgtgttccatttgtactcacttcagttctataaccatagagataccctttatctggtgacaaaaagaaagaaagagcctcttgaggcccgagtttgcaagcctaaacttaacaggtgacattcatgccataaaaaatgaatatactttcttatagaaggatcagagtgcaagatatatcatcaaatgaaattgggccctcgagggctcttcatagctcatacttattgattggtatggcaaatgtagtaatttgtaggcagctagcttgtgacacattgtaatgaaggagacatatgtaaaagtatgtggaattaacaggagcaatgttactccttcagcgttttagatgaaaaacacatgcaattttgaaacctcagctttgctgtttcaaagaccctaagagcatctgttaggtattgtatgatctcatctctaacacagcacatgcagtcagcttttcagcatgtcacaccattactaagtaaggagccagaaaatgagcaggcaggtcacttttcacctcattagcacagcaggagggggctctggaaaacaagatgctagcagaagccgaggggcttgctgatattttttttgaataacagaggaaggacccagctgtgtactccttctaactctgtacttctgttctttctcacgtaaccccttcctttttcttctgacctttaatcagtttgacccctgaagtgttcataaaccaccacaaagttatttctctggaatatataatttgtctctatttttcctcatggtagatcttggttttagcacaattctattgcaatatgatatggatacacagtctttaatgtccttgaaaagattgaacttaagggtcctttggacacaaacagagaaaatagagaagataatgggaaatcagctatcatttcattctctgaactgctacttgcatttataaagttactaaataaaggtttactttctgttctgaaatttgttttctatttattcatctttccatcatcaatcttattttcactatgttgactcctttatcagtcttaatttctgggttgctacagtgatcagatcccttctgccaacccatgatgcacaaaatatatataatttcttttttttaagccattaaagtttgggattatttgttacacagcatattgtagctggtcctgagcaatcaaaagaccttgcccttgtactgggcaaggacattgtaccaggcagtgtgctaaacactttatgcatgcatgctaagtcacctcagtcgagtccgactctttgagaccccatggactctagcccactgggctcctctgtccatggctccagggaagatacggaggggttaccatttcttcctccaggggat

SEQ ID NO: 62739 - DNA, 733 bp, Bovine  19866880835830
  misc_feature (1)..(1): n is a, c, g, or t
ntgtatataatttcttatgttaaaagaataacctggaatttggtgtcaaagaaattttgctcctgaattccacagcactcttaagaaaagagtattagcatggagggatgctctctccatctttctcttccaagctagaaatagttcaccaaaacttccttcagcgtattgtctattactcttatttgaaagtcacaaatcttgacagttttttatctaaatttaaaactagatattttatgatagcaatctaattgtatccaacattctttccagagtcttgggagccatgttgctttggggagataaacttaaccgtcaagcttctcaaaatcataaccattggctcacgaactattttactgaacaaatagctctgaagtcctcacaaacataaacaacaatatctgcacactttacattctattctgaacatttcaaatctccaagcttgtaaacgttgaggtttttgttccaaagggatcataaaattgtataatataaagggagagaaaaggtataggcaatttcaacatagggatagttgataccactcttttcatgacattagaaagagagaagagggctggttattaatattgaaaatacagaactaagggataaagagaaagcaaaggctgcctgaaaagtctcttgaagtagctcatagcaacagaaaataatcatgtctatactgacttagttctacccccaagcaagaagggattgttat

SEQ ID NO: 62740 - DNA, 2248 bp, Bovine  19866880963333
  misc_feature (1)..(1): n is a, c, g, or t
ntatttaatgagtgctatgttacccctacttttcttcttttttgttttgttgtttggttttgctttatatatgtgtatctatatatatagatagatacacatagatatgttatatatgttactttcatataacatgattttaaatcttaccagagcttagtctcttttcattttaaatgtagtacctttgaatggaaataatactttacatgtaaatttgcattgtttagcagtataagcatatatttattaaataaaagtagaatttacttcactaaatcagttcccttttatcatgattttttccagtctatttctacttgtattttgtgcttgtttgtcctttctatgtctctcttgctctctcttttctcctctctttcattgcagtgttgattataaagttaaggaataggaatgcaagagtgattagctcagtataggatacctagtttttatttaatggtaatgtttcttggctactttagtagatatggtaccaacttttctatactatttcccataaattggagaaaatattgcaaatacaaatgtcttaaataaatattaaattattcaatagcttgactaatcatatgagtttaatataccaacaaataatatatgtataatgaagattttatctgtaaattcacctggacattatcccccctgaggaaaatccctgatcaactatgtttcatgctacctcatttccattctgagttgaaacttttcaatttcacttattcattcagtaaatatttatctcagaaaaccaagtttgtgacaggctgttttctaggtactgggaataaatcagtaaacaaaatgactcaatattcttatgctcatggaacttgcaacctagtaggagaaacagacaataaacaaaccattgaaatctatagtctgtagtatggtgataaagactgaggaataaattgagcagtgaggagctttagaaaatgtgaagactgggatccaattgttaacaaggtgagcaaacaaaccttaccatcaaggggtcatttgtgtaaaaacctgatgtagaaacagggaaatgagccatcctgagatctggctaaagaggcttaggaaagagctggtgcagactccatgaggtgggtgcttgccaggtgtgatttgggagagtatggcctgtgtggttagaggggtgaaagaagtctagagtacacatccctgtaggtgacttgctgtaaagtctttggttgttactctttttcagatgggaatctgttgggagtttgagaagcaaaattatactttttaaattttttattcatttatcctttttcagttttagtgaggtgtaattcagaaagttgcaaattgtatttaaagtatacaatgtgaagatttcatatatgtatccatattaaaaggcttccctggtagctcagacagtaaagaatctgcctgcagtacaagagaccaggattccatccctgggttgggaatatcccctggaaaagggaatgagaacccactccaatactcttgtctggagaatcccatggacagaggagccttgtaggatacagtctatggggtcacaaaaagtcagacaaaactgagtgactaacacacacatacactttaaaaggatttaaaagtgtgcatttccccatcaagttaattaacacacctggcacttcaatttgtgtgtgtgagagagagaaactgagagacagaagtcttacatccttaaaggatcactccagcactgtcctcttgggaataggccctagaagggtaggggaagggtaaaagctgactcagtgacaacttctggtgttgtagacataacatttttgcaggatttctatgcttggaattttatcttgcctagtgttgccttatgatgctgcttatttaaggctacataaaatccttccccatcacaattacaccacgtggctttcttcgacattacaactgacaaaaggcatggtccccttgaggaaggctaaatgacaaaggtgagtggcaaggtaattacataagctccctctatgttttacaagctttaattaagtcctacagcatctttctgtaatgtacaaataccattaaacctattttgcagagggtgaaaatgaggcaagctgaaaaataaccaattaaaaagtttcaagatcagaattatttttctctgtaaaaaagagatcatactttctcacagatgacaaattgtgtttatctgcatcatatatttcttactgtt

SEQ ID NO: 62741 - DNA, 1724 bp, Bovine  19866880966576
  misc_feature (1)..(1): n is a, c, g, or t
nttctgaatcttttgaaatctcaaaagcctttcacagtaattattcactggcaaagctccattctgtaatcatcttatttagagcatggaatgtaaatccagactcaagtggttacaacaatatttagtaatttatgaactacgaagaaaataaaccatggacattcagtctgtcagtggtctgcttaggaaagtagccgaatgaaccacacatagggcctggagtctcacctctaatcagtgaagtgatctagatatatctacatatcaactgaccaaattctactgaaaatggaagaggaaattatccagctaaaaatagaaaatcattgtaacaaaccaaaatataaagtgatattaaaattataactaaaaaacagcgtatagagagtaaagtcttagtcattttttaaaaatctaacttcatatggaaaacactttctaatttaaaaaatgctgacaatggctataaatttgactcttaaactttcatgtatttatcaaaaatgaaaaatattacttatcaacctccaaaattacattttaaatgactgtgtactttttcaataatgttttacacataaagaagttttgtttatctacagtgtctaaattagagagaatctgatagctaaaggatcactttacaggatcttagttctctcttacagtaaatgaagttccatttgtccatttaaaatactgaatttttaatatgtccctctgctcttcctctgtctcctatcccctttctctgtctcctatcccttcagcccaagagtccagttcacatctaaaaatccattaacttccacatgccacagtattggaatggtctttcctggctcggataaagaaggaactcttgccctaccattgacctttatgtcaaatggaaagataacttcacagtgttatcctttcttaccatgcccttttcacataatttaaattctctcatgttacccttactattttcaaataaagatttgagtttgacctgaactctctgctatagagacaatctttcttacaatggtcatttaggacaagtctccaccaactaaaaactggaggaagtctgttaaggataatttgggaaaatgaattcaagcaaaatggtgtttttaaaaagaaacatgaaatattattttcacatacttttttagtttggttacagaaaattattcatattttaatgagtactttgaagcacagatctttccattaaataataaattatggaaatgtgtccccaaaaacatgaatataaaattttattttaaaataattgaggagaggatgatacagtaagaagattagtaatagctattgtgtaattaatgcttacaacgtgatagctattctaacattttacatattttatataccatttaaacctgacaataacagactattggtagctatcatttctttatttccagatgttaaaatggaagctgaaagaaggtaagtgacttagtgataataacagagtcagaaattctacctagttacctgtcattccaaagcctgctttcctaatcacttttctaatatgcttgtgaataaatgttgtttagaaatgaatttcaggaacacagatgtttaacagagatttgaaaattaaaaaaaaaaatgatacttctcttatagaccaaaatttaagttagataatgcaaaacaagagcactaaaacaacttagattactggtatattatta

SEQ ID NO: 62742 - DNA, 1089 bp, Bovine  19866881052131
  misc_feature (1)..(1): n is a, c, g, or t
ntcagttcccaggtgatgccaattctatctactattccagagacaacactgagaactatggctctaaacccaactcccatctgattttctcatgatatgtctactcacacttgatggaatggatttttaggggaaggtggggggagttatatctgatagatttagctaatgcacaaaatcaatgttttatttccaatgatattctcttatctgatggcttactaggaggaaggaaggtagttttagcttaggaatgaagtttataaacttttccatgtgtttcctatagtcacagacacttgacttggaatataagttggttcagttgttgttccctttcaggcaggaataaatatccaggtgttggaatcacagaaaatgcacctgactcagagccagcttttgtgtttggctttgaggtaacttccaacttttgccagagatgctgaccacctgtgaaatatttgatcaatctgctgatccagctgcagcctctctgtgctgtaaattccagctctcctatgggaggagagggtgcttagtgacaggacagcctaataatatgggccaattcagaagaaaggagttgactcaggtctagctggcaaaaataatttgtttgcccctattgtctctacagccaaagcatcttattgcacagtggtatagcctttcttttatgtgataccgagtcagatgctggggtaactgactcacatgcaaatgcctgagattaatacaccatgattattttccctttatactttatagggcctaactattagagtgcatgtctgtgaaatttgacaataactgctgttggcccagaaaatgtcatatgacttcccatttgtctcacagattgtgggactggatatggatcaaaagagaatttattaaagggttctgaggttagtttaaaaaacaaacaaacaaaaacagccactcctgaagagaacagaaacttgcagaatttcagagaagtaagtaattaaagacatcaacaagcctagggaatctgaaacatgtctggtcatcagaattcaaaatcacccaaaaaatgtaaaaatagagatggccgatgtccat

SEQ ID NO: 62743 - DNA, 1399 bp, Bovine  19866881064468
  misc_feature (1)..(1): n is a, c, g, or t
naatgtggtctgagagactctgctctctttatatacttataagcctattggatttttatactgcaaaactctagcatgtctagggaaattaatcctcattaataaaatattctaaatttcatttttatatactatcatttaaaagggaaacataacacaaaaactgttacatatatctctgttattaataccaaggaatcaaacctagattggttatttcaaaattatctggccacaataaacaacaaattttatattttcatttttccatggcaaagaaggtttgctgttcctcatgctgacacagacatacactcgggcagttaaactatagccagtcttctatttggctccaggtaaaggaattaacagcttgtagggaagctaattagatccaattattattcaactgacctaatttgacattcaatgtctgggaagaagtcatatgaattaactgaatagagatttaactactatatacatatgagctccatggataatttattcctaatgaaactcatttggagaagaggaatgtactgattgagacaaaacaataaaaaaaaaaaaaaaaaagagggagatgatctaatgcaaaactcctaaaggaatatgagagtgtaacataacttgtattcattcattcttctactcatttatgtattttttcaaagcaaactctttctgtgagtaaaacaaaagcctttaattttatttttaaaagcctgagcctcaatttgcttatttgataaggtgattagatgaactgatcaataagtcctttcttctatggcatttttttctcccaatatgtcatttatttaaaatggtaactagatgtaagacacgcttcattttgtgggttccagttggtaagtaaaatctatactatttacatagatgatttctggggaatggcaacagcaagatattttaatatctgctaagtgcagggcatagtgcattaggcaacataaaataacctatgggatataacttttgaagtgggaagcctgagcatgaagaagccaccacactggcataatattaatgggagatttgtcaggagaaagttggtgagcagaaggaagaggatccagaagtatttgctcctatttattgaatcattcttattaattagtaggaaaacatatattctaaccaagaaaactttatcaagttgtgctgagaaatgactaaagtgaaaatgaattaaaatatgaaaaatattaataaataaaatctgaaattcctatactttggccacctgatatgaagaactgactcatttaaaaagattctgatgctgggaaagtttgtaggtggaaggagaaggggacaacggaggatgagaggtggaggcatcatcgactcaaggacagagttagagcaaact

SEQ ID NO: 62744 - DNA, 921 bp, Bovine  19866881087906
  misc_feature (1)..(1): n is a, c, g, or t
ncctggagaatcccagggaccaggggagcctggtgggctgccgtctatggggtcgcacagtcggacacgactgaagcgacttagcagcagcagcagcagcagcatgtatgtatgtataattcaaccaacactggagatctgctacccttatgataaagtctgacttagtactttactcttctgtcctctagttggaggaaataagactcccattttaggttgtcaaggaggctttcacacttagcctttaattccaaattattaccccaatcttttattttcttttatgaaggcatttatggcccttagcaacaaccaactagttctacagtctctataataacttttcctcacaattctgaagtttgatgtattttacctccaaggcacatccactttccctagtacactatctctacttaacacctttaaacttctaacaattgcaccactgctggataggaaaccatgggtaattcagctccagaaactcattttgcaatgtactttcttagaacttctggtaccaaatgtcataggtctggttctttgggaaacagactgagagggagatttgtgtccatgacattaaatggggagagcactcagaaacaacaaatgtaatgaagtcagggaagcagaagagttctgaagatgagagggccctttagatttgtcacaactaagacaaacaggatgaatcttttactcctgcatggatcactcatttttgtgggttgactccctgaggtagtgcatccttcaaaaaagcagatcctctgggcagggtcctggggagagacttagctgtggcctaccaacaggtaacattccaataagctggggaagataagtgtttctctcctgaaggggtaatctggtagtgctctacaacatctgttagaaggttggacaccaata

SEQ ID NO: 62745 - DNA, 980 bp, Bovine  19866881143726
  misc_feature (1)..(1): n is a, c, g, or t
natggaaagtattccctgtgcagagacctcagtatgggctaaaacttgaattcatatcttagttaaatacaaggagtctcattttgaggatgtggatcttgaaaaatcaatgaaaaatccatccagagtttatgaaattagctcagatttgcaagctgtatatagtgatgaatgagaaagaatgttgagttgatttatgattcttgcaaaggctcatcttcatctgtaaaacagcaaaagatgaaccaacagtatctacatatttagcataatttagcatataaagagttttgacatttaacagtaactgatcagaaaattatatgaagtaatgttattaaaaatgaaagaatctgactgatgaagatatataacaaagataatttttgtcaacaacaaacaacttaattttttgtagtgaatatatgttattcagaaatagtaggcttcagtgtgctaattaaaagccattggcttcccagctatttacatggctttcagctctccaaagccagtgacctagtcaaattaatgttgacctcaacttaaaagtcatctgtatgaataaataattcacaccctctgcatacttattgcatttagcagttgcactacaggattttgctggtattaacaaaatattcagtagggttaaaactgagaaggcttgaataaaatatattttagaccacccatttagattagagcatgaaattgtaaaatcaaagtcatttcataataaagagtcacaagtatatataaagacttcttttggttatattgtcagcctaagactgaaagatttaaatatatgcatgtgtaaatatattttacaatccagtgacagcattaaaatagcaaacatgacttggatagtgtgaaattaaggaaacattgcaaaatccttggtagaaaatagaatcatagtttgaaatagaaattaatgtcatattttgttttcactgttttatatttccagt

SEQ ID NO: 62746 - DNA, 1552 bp, Bovine  19866881331685
  misc_feature (1)..(1): n is a, c, g, or t
naattctatgagccccttttaaacatgaagacactgtggcacagagaagttaaacatttcactaggacataggtgctacaataagtctgttttgggcatacactctatgtttgctatcctgtctcactgaaaagacaaaataaacatggaatcagaatatgaaaataaaaagttatccaataataaataagtacatttcaaaaattttagaaagagaacatatttttgacaaaacaatcgaaaatgatatgtaatttgagagcctcttaacataatacattcattttcctttatacaacagcagatttcttcctgtctttatattagatggatggaaaatttcagcaacctaattttggctctgagtcactctcagaaaactgaccagcagtttccttgatatgatcaactcagcaggccagcacagatggggcttcgtcacctcctgtcactgagtgcattaatgttgtctgcccctagatccaattacatgaatgatgcctggccaaacacgacccacccttccttgtctctggtgtctcttttttgaagtgtatacaatatcactttgcctcctggtgctggaggtggcctcctggctaatttgatagagaacagaaaaaataatgtgacccaacccaatgctggcaactgactcagggttcataatatatgtttttaacatttgtaatcctatctcttaataaataagacacagcgctttttccttggcaactgagaccctaatgcattgggttaatatttctaacagaattagcagcacagtatatgtatcttcattctgcagacaagactcatcacacaagctttattgtgaatgtatttattccctaacctcaacacattatcctaccactaagacaggattagaggtttcctctggtataatttcagtttcaatttttaagttataactttgtttttgatttctacaaagtaagtgtcaccattaacagaaaagcttcaggattaaataaatacagagttatttttttaaatttgtttagaatatatgtaaaccatatatcaccaactaaagcaacatttctattttcataataaaagaactcaacagttaaagaaatccagaaatgcatgacaggtgatattccctgttgatagttctaaatatatgctttacttttcagattcttcactgcagaaataaaacacaatcatgatagtggcagaagtaacttaggctatgattgtcagtccactttccttaattgatattcatctcttaactatctatcttctcttttacattgaaggtaactaaaaaaaaaaaaaaatcaagaaccatgaaacctaggtaaatacttggagatctaaatatatgcttcaatacttgatcatttagtatgtgtagagtaatagtagtggctttgaaaggagaagtttttagttgatgaaagatcaccaatatctgctcaattagtgagttcatacaagttctgtattctttggggggggaaaaataatatccagggatattatgcaagcaaattagtcaaagcagaggtcagag

SEQ ID NO: 62747 - DNA, 1146 bp, Bovine  19866881362671
  misc_feature (1)..(1): n is a, c, g, or t
nacaatgtgaatatgatactaatgtttagaacctttagttttctttccttaatcaaagagtactcctactttaaaaacatctttttttatgtcattgaagtgtttactaggaaccagtgttaaacacaggtgaccctatgacatggataggcataaaagattgaagtgtacatgacactgttcattctaacagcttgtttttattcacagaaatgtaacagaaaaactgactatacagataggaatttcagagttactgaaagactttgaggacaagcagtctgaaatactcatctgttaatgaaatggagattctcaagatggttaagaaagacatactcagattagttaaatgtccctgggctctatctgaagacagaaatgaacaaagtaaaagtccagtacccatgaaaacaattttcattcaaaatactacagaacgtcaataccaccaccaaaacagttatttatagtttatgaagcattggctttcaataggggaatacctcagtggcctgagggtggatttattattataatatctatgggaattatgttatttttaacagttattaggtgaattatgttgaaagtggttcaggagaaggcaatggcaccccactccagtactcttgcctggaaaatcccatggacggaggagcctggtaggctgcagtccatggggttgctaagagtcctgagcggcttcactttcacttttccctttcatgcactggagaaggaaatggcaacccactccagtgttcttgcctggagaatcccagggacaggggagcctgttgggctgctgtctatggtgtcgcacagagtcagacacgactgaagcaacttagcagcagcaatgttccattgtatacatgtaccacaccttcttgatggacatttaggttgttgcaaatagtgttgctatgaatgtgcaggtatatatctttttgttgattcttcttatttgttgtaggaccttttgtttctgtgtccagcattcttttggataacattctctctcccattcagtgcaatccaattagattgtatgatcaatgggatgattctcttctccactctcacctcatcacaaacccacaaacacctgggcatatgacccaggccaggccaatcagaacg

SEQ ID NO: 62748 - DNA, 1211 bp, Bovine  19866881502539
  misc_feature (1)..(1): n is a, c, g, or t
natgttttatcctcttaaggttttgaaaaagtgtctattaatgtagtctctattttccttttatttttgtttagttatttatattttcctaaatcactgaacatggtgactgcatccatgaaattaaaatacgcttactccttggaaggaaagttatgaccaacctagacagcatattgaaaagcagagacattactttgccaacaaaggtttgtctagtcaaggctatggtttatccagtggtcatgtatggatgtgagagttggactgtgaagaaagctgagtgccgaagaactgatgcttttgaactgtggtgttggagaagactctttagagtcccttggactgcaaggagatccaaccagtccattctgaagaagatcagccctaggatttctttgggaggactgatgctaaagctgaaactccagtactttggccacctcatgcgaagagttgactcattggaaaagactctgatgctgggagggattgggggcaggaggagaaggggacaacagaggatgagatggctggatggcattactgactcgatggacgtgagtctgagtgaactccgggagttggtgatgaacagggaggcctggcgtgctgcgattcatggtattgcaaagagttggacatgactgagtgactgaactgaactgaacattccttcttaactattacaaacaggaagtggaaaaacatttgtattgactgccatttttgttacaacttaggaggtacaaataatttttcatcaatactcagcaactacttatagttgcctcatattaaatatagaacattttaaatttgtaaatattttacagtgcaaaaccaaacatttatttatttaatattttgaactgaattcaggtaaacttttaatatatttttacacaagtgatttaagtattgttttttaaattaattgctgtatatgattatatccagcgtgattatatatatgccctatatccactcatgtattgtaagtaaaagaacaaagtgttttcctttgacatttatttataatttggtctttaataaaaagtaatctgtgtaactaagtaaggcaatttttattactcagggagacaaatgagtatagatcataggtttactgtcagacaaatttggatatttcctttaattttgctaataaaagctaagacatctgagaacatgttatttaatatttctaa

SEQ ID NO: 62749 - DNA, 1540 bp, Bovine  19866881504095
  misc_feature (1)..(1): n is a, c, g, or t
nacaaattttttaaattgttttttaatatggtatgtctcatggttaacaaatagttcttagaacgtgtatttttgccaagtaaactctcatggaatctctaataagtgcaagtatattttgattttgatattaaatttagtacatatactccataagtatatttcaaagctagagaaaaaataatttgggttttatttttcaaatggtcagataatagacgctattactctggaaaaattcttctgtttctactatagctctatgtaaacctgcccctttatggcagataagtaatatatgagaaaaaaaagtactgtttaaaaaatttcttacaagtaaagaaaactttttatccagttcttatatgtgttcttgaactttctaaatgctgtacatgtttgtgtaaaatttaagataacatacaaagtatatattaaaggtatattttctcttccaaaaggctttatttataaaagggggatataagactttcaaagaaattacatttttaccaaaaagcttgatcttttatgacatgtcatctaactttgatagtgagtataatttaccaaattggtttgaaggcattgcaataactacaggaaccatggtctgcattactgatagatttatccaagtacttgatagtccattaggagaataattcatctgagagcaagcagacaaaaatccagacagtgcttcaaacacacaaacaatttgagaagtaaccagacagcaattacctagttagggtctgcttttgaccattgtaagtaatgcctcaggttgccacttgtaacaagattatatttgctactttaaaacttgctattttcttttaactagatgaatgtcacacatcctgtaattagaaggcagctaaagaatatccaatccagtgaaaagggtatggaggaggagaggaagagctataatacaaacagaaacattggaaggaatgaatcaaggttgcttataaagtcttaggtactatcattaatgtatcttaaattacagtgtcctaaaatctctgtgccttattttttccctactctctatcctgtaattcccctggtaatttcatgcagacactcaaacttccatttttattttatttttttttccatttttaaatattttatcataacaactccatgctcagggtggtcctacaaatatacttaggcatatttgtgacttgttttaagtgctaaaatatttattcaggctcaatggtgactaaaccctgaagaaataatatgaataaattcaaattctatttttagctttggtattactattttcaaaataatttataattacctatttttaatcttattgatctaattaacgttcttgattttcatattaataatttgggtttcagtcttgaaattaaaagatgcttgctccttggaagaaaagctatgacaaacctagacagtataatgaaaagcagatatcactttgccaacaaaggtccatatagtcaaagctatggtttttccagtagtcatgtatgggtgtaaaagttgg

SEQ ID NO: 62750 - DNA, 1085 bp, Bovine  19866881518246
  misc_feature (1)..(1): n is a, c, g, or t
ntaagtttgacagccaggaaggaaggttcacaatttcggcagctgttatttgtttttttcctttactaagatgagcagcaagaccacaatgtctagagatttgtttgattactcagcaggacagtaggagctaaagcagaaagatgagagaaagcatgagaagggaggagaaggcatgatgtgagcaaacatcaaaaaagcacagtttgataagtaggatctcaaaataaagtttactccagtgacatggtgaccagagggaagattactgatgcaaaatagctaaaatcaagggctgactcaatggcacatattaacatttatagtgtataaactgagtcccagacatctttatttccaagacagatttttatgttattagacagtaggttacaaaccttctgtatctcataatgcccctctctttataactactcttagtaaattttcaagtgggagactgtttccaaatggctttaagatagaatatttgctgcctggcttaacaagtgattgagagagaagcatgaagcccaagatataaaaaaacaaaagcagagaataaaaacacagagctgagatgagcagaagtttcaggaaagatacagagaaaagcacggtacaaaaatcggcatccagaaaatgcaagcaaataagcctgctagaaagaaacagaaccgcagcccactcagctttctcagaggaaaacatacacataacattcagtgaagtgtgaggaactaatggcctattcttcaggcatggagagcttcagcatgaaatcacaacatttattttctgtgcagcagcccaactcatgagccccggaaaagcagtctatctctgtgaagattagaaggaaaatttgaagagtgcaagacagacagggaaagaaggtccaaatcaaagtggcaaatttatgaaagactgtgtcttctggaagatgtaacagagaatgctgagaatatgttttataagcaacaatattattacaaggtatagttaatataaagaattccattttcaaacaattataaactaaacaattaatgggttgtttgccaattgccagaggtagaaaaaat

SEQ ID NO: 62751 - DNA, 805 bp, Bovine  19866881630123
  misc_feature (1)..(1): n is a, c, g, or t
nacttgatttgagcccaaaaataagtgtaggaactggatatcacccatatctctgaatataacctctttagagatagtctgtaaatattggtttatcatcagtgcttccctgatagctcagttggtaaagaatctgcctgctatgctggaaaccctggttcgattcctggatcaggaagatcttctggagaagggatatgctacccacttcagtattcttggtcttcccttgtaactcagctggtaaagatccaccagcaatgcgggagatctgggttcgatccctgttggaaagatcccctggagaaggcaaaggctactaactccagtattctggcctggagaattccatggactgtatagaccatggggacataaacagttggacatgactgagcgactttcactttccttatttataagactgggattaaagtattctgtgtaggatttttgtaaggatcactgagatatagtatttaaacttcatataacattatagccagctgtagctgtacccatcaagcccacattcatctcctactgacttcttttcttaccctctacttctctataagcaatacatataatacgaatctagccaaaaagaaccagcttcctctgtgcttttatctgagaatttaatttggctgatgctatagcatcagactggatacccttgggtttgaagaacatgtgttaagtattcttttagcagtctgccaaatcgattcactgcatgttttggaacactagatttctatttacctaaagtaaaacagatcaacgaatcatctctaatcaa

SEQ ID NO: 62752 - DNA, 922 bp, Bovine  19866880378451
  misc_feature (1)..(1): n is a, c, g, or t
naatggacttccctggtggctagtggtaagaatctgcgagcatgtaggagatgcgggttcatccctgggtcaggaagatcctcctggagaaagaagtggcaacccactctagtactcttgcctgagaaatccatggacagaggagtctggcgggctacagcccatgtggtcacaaatagttgacttagtgattcaacaacaacaataacacagttcttaaaacagtgtatatgtgctagctaagtttattgtcattttgctgaagcaccatcaatcacaaaacttgacatgggggccaaaataggtatttttcaaaattgacacttttgtagagagtcctgtgtggaggctggaagatgaactagttgaactccccaggttttcttagcaataataggcgcctgtgaaaatgctgatttcaatctttgttaccttcacaactagttattgaactattcttggctctcatatcccaggttctttatagagcaaactgtactagtgctccatataatctccaggcaatttgagtacattggttaatatttttgaaatcctcaagtgaaaggctcaaagcgtcttttcaagaacacatctctgtgcatctcttctgctttgagcgccagttatgaaactgaagctgggattaaactgtagaatgtcagcaaatggtttggagtcttctggagtaaattcttgcactgtaagcacttgtctctaaattattttttagaaaggtgggagggagttggctcacatcacccagggaaggcaattttccatgaacactgctatcccaatgcacgacaggaaacttattgaaaagttagtgggttggagaaaaacagtagctagctcgacagagagtgtcaagagaagacagggaaagaatgaagagggcacgacattacccagagagcaa

SEQ ID NO: 62753 - DNA, 843 bp, Bovine  19866880379942
  misc_feature (1)..(1): n is a, c, g, or t
ncaatgatacattctattactaaataatatgcttaggaagaaattctctgacaggtgacactaaatctagattcattcaagtcatcactaggagcagaggaaatccttccctttcccctttcctgttccttttcccattttgtgttaggatatttcctaaagaaaactggattctctctgtaacatcttttcttctttgcatgaaatagacgtggggaagttttggtaattctggtatggacttcaaataattacaatagagaagctttctcaggcacatataaaagtcttataatttgatagcactgctcatttaaacactccttccaccaccctaaataatatattttaattgagctgcactaaattttcatattttatgtttgattccttattgcttaatgtgattttatgaggcatgaaactactattaggaaatcctaggatggaaacagatctgcttgtgcctaggtaggctgaattttagctctactacctgagtggttaaaattacctaacttggaacaagatagatgttaaaaattaattttccttgggaagttatagctaaaaggggagttacatacatgtgtgtttccctcacctctctcccaaagctgtatagatatacactgtgttgctttttttctgaaggaaaacggggaaatggtaataacccactttaaagtttggcattttccaaagttcacctgggtcaatctggtttagttttgtacttattgaaattaaacatgtacattattcactaacatatatgtaatatgtacatactatatgtatgtaatatatgcatgtatatatgtatgtatggccgtgctggaa

SEQ ID NO: 62754 - DNA, 1481 bp, Bovine  19866880415458
  misc_feature (1)..(1): n is a, c, g, or t
ncatttacaaagcttgtccttcaaccatctccaagcagagcagttattttttaaaagaattcttcactttcaagggatgttggttgcattttatgatcatatatgcctattagttaaagaactgtcaccaaatctcaatgtggttcttccatctagagtaagaaataattacatttattttttctgtcctgtgtaaatatttcttttttagctgcctggatgtacactggtttgtcccccagacactgctgttctgtccctcagtgagcagcaagtgacagaaaactttccagtgtgcctggatgttagcagaaaatgtttaaaaatgttggctttatatatttgtcccaaaacatgagtgtaggttattctctctttctgttcctttggtttcctttcagagatgccttatataaagaccagggaaggcccaggctgaatccgctcgagttcgtgcagccctcaacaccatcaggatctctcttgccccggaatgaggagttcattgtgctccaagacattatgttgaagcccttaactgtgaactctcattcaagatgctagacttgccagttagttacacagaaactattctgtctgggctggaatgtggcagttaaggaagggaactttgatcttcaagataaagtggatacagacactagcgcactgtggccatttcaccacagctttaatttgtatagtttttttctcactttaatctaagttcattaaacctgtatctagtgaatggtgggatggcacaaatcaatgagtattttgttaggaaacattaaggacagccaatgcagttcatcccccaagacctgcccacccccacccccgaccccagtcaagaattacagggatatttagtcatgtcagttagttttcttttagaatgtgtgccagactttaatctctggatttgatatttatgcggttatttatttaatcttttaaccctgtcaaagttgttttagccagctctaagatggcggtaaccataacaaagtcacaacatctatctttattaagcttttactatattcctggcaatgtgtttaagggctctgcttactgtatctcatttaatcctcactagtacctgatgtggaagccatcactcttagcatcatcatcttcctgttagaaataaaaataatcaggtggacagagagtcagccatgacccgaatttgtacaatagtgggtaagagaaaacacagggctttgaacctgggtatttggacttgggagccctgttcatctggctgcctggctcctcatttgttctgtggtttggggcaaataagcccaccttcaggaacttgtttcctgatctgtggaaaaaaaatgtactcttgtatttcagcttattaaggagaccaaattagcatatgtaaaaaaaaaaacaacaaatccctgtacactttttaagaaatatgcaaatagatgagatgattttaatggcatcaacac

SEQ ID NO: 62755 - DNA, 1151 bp, Bovine  19866880532499
  misc_feature (1)..(1): n is a, c, g, or t
ntgttaacggcatccaagtgtcagattcccctaaggttttgtgacatcctaggaatgggaagatttggggctcaaactatgtctgtgtgattcccaagttagttcttcataatgaaggagttgttactaatgtcacagctgactttagaatgaggtagtttattaggtagaaggctctctctgttcccatacttctttcacatcaacttcagggatccagtcacaggagacaggatttaccctaccgtgtctgactaaattatgaatttcttgagagtatgcatcatctccttgaaaactcctagtatattgtctgaagctaaaatgagctcaaataaatactgggtaaatgaataagtgaatatgtgtttctggaagtattaacattttatatcccagtacctgtatgcaagttttcattaagtggaccccttgatgacctgtatcacattcacctcacatgcttaaaaaaaatgatgcatcaacgcatcccagatctcatgaatcggaatctttgaactcagtctcatgaatgtctgcattttaagaggtgatgattccaaagctatgaagttggtaacatttgcagggggacaaataagcttagcaaaaatttcctttgggaaacgggaagttggagtaagcctcaggtctcccctctttggacaggtcttacaaaggggtaaaggagagtggaaaagggaatttctatattcacatctaacctgtgcccaagctgataagcagggtggaatactggtagatttccttgaggtattttttaaattaattatattaatatcttaattttgagtacaattgatgtattatgttttgttagttcaggtgtatacagccaaatgattcagttatacatatattcatttattttttagattctttcctcacataggttatcgcagaatattgggtagagttccctgtgctatagaataaattcttaatggttcagtcaagttcagttcagtcactcagtcatgtccaactctttgtgaccccatgaatttcagcacgccaggcctccctgtccatcaccaactcccggagttcactcagattcacatccatcgagtcggtgatgccatccagccatctcatcctctgtcgtccccttctcctcctgcccccaa

SEQ ID NO: 62756 - DNA, 1589 bp, Bovine  19866880618471
  misc_feature (1)..(1): n is a, c, g, or t
ntttgggaaaattagaaataaattggaggataatgtgggaatcattaaatatatttactaagattttataaaaagtgttttagggcaaaaaaaaaaaaaaaagaggggggggagggagaagaaaaagaaaaaaggtaaggatatgggaagaagggaaacagttctaatttcagcattaaatctagttagcaggcatgaggcaaaggacagaaataaataaccaagttttatacaaaaggaagtcaaaagggtgtccttgcatttaatattagaagcagcagttgcagtatgttaataacttcaatggaagagcagagtagccctgctgaaaaacaccagcatgtttctgcttaaattagactggatccctgtcttaggtgtaatggccaggtttggggaaagagacttttgtctgtggccacctgtcacatttgttgaaattcactatcaggttcaaaattgcctttcctaggcaagcaaagaaagcttgctgaatctgagccatccagcccagtgcattcacagccgtgaacagcacattgaggaagacacaaaagaagtagacagaatctctgcctctgcttaggagcatgcaatttagttggggagacaaaactaaacactagaaccaataaaagaagattacaaagcaacctacaagtaagtgtataataatatggcacaaatgacacagataaatgcagaggggacatagaggaaagaggagtgagccaaacacaacagtgtcagattagttagggaggcatgttgcctaacagtactgtagcttctatgtccctttctgtatcattgatgaggaataacgtgggataggaaattcagatgttccgcattgatctctttctccttatctgccgagtctgtctatcacagatggaaattaaattgatccaacaatttactctccacaaagccatgttggtttctacctagtaatttatgcttttcttggtgtttgtaaatcgattgctattatgggatgcagtcaaatctgggcctggatccagtaggttgggggattattggagtggatatgtatgtatgcacgtgaaatcctggaaaaatggactctagtttctgtgtatttttactcattggataaaaaccctttcaggtttttttaaaaaagcatgtttcactgcactcaaattgcatttttagggaatatgtctgatttgtttcatattgctcctgacaggcccagccttcaagtcaccttcagtggcgttttctccagaccttttgttttaaaaaagcctttccctaccccatgaatattacagatctctacattttttttctctcgacaaagaaatatatatatacacacacacacctatctacagatgttcatgtagtttaataaaatattgctgctgaaaggcttaggaaagtatgctttatttaaacacttgacttcattgttctaccttaaaaaatttttttaagtccttctgcggattgtgaaattctttcaaaacaaattaaaaagaaaacattttctggatttctttacagattctggacaatcaggaagtccaagccacaatgatccgccaagaatcctc

SEQ ID NO: 62757 - DNA, 2582 bp, Bovine  19866880651101
  misc_feature (1)..(1): n is a, c, g, or t
nttcgttctttttctccccctgccctgtaaactctccgagatatcttgcatgtagctgaatgcctgctgcatagctgatgctcaatacacatttgaggggtaaataaataaactagcagagtcatcctaaacatgagaggaatgctgtctcagagatgtcagggaagacagatgagcatctaaagagaaggacacatagtcaacataagggtgatgatatgcctcctgtctcagtcaccttagctgccatcatcaaatactatagactgggcagcttaaccattatttcccacagttctagaagcccagaagtctaagatcaaggtgtcagcaagttagttttcattctgatgcctcttttcacggtttgtaggtgactgccttctcatggtgtcctcatgtggcagacagaacaagcaagatctctggtgtctctttttataaagacactaatcttattggatcttaatagacttccctgtagctcaaatggtaaagaatctgcctgcgaagcaggagaccagagtgtgattcctgggttgggaagttcctctggagaagggaatggcaatccactcctgtattcttgcctggacaattccatggacagagaagcctggcaggctacagtccgaggggtctcaaagaggcagacaggactgagtgactaacacacacacacacacagtcttattggatcaaggccacaagggtggggccgggacttcaatatatgaattttgggcatgcacacaagttttaagtccataatacctccctcatgctgggtactatttgtagtttgtacatagatagatagataagtagatattcctagttgaaagtataacatcggatccatagtggaaagtatgtacctttgctctgaattctgatccaaaggacgttgctgggacagcccacatatatacctagtcacagtaaggcagttctgatccagtaatttttatgactgatcctgcagagttgctcatgatatccactatatctgtctttttattcacttggtgatgactgaatgtgcttagactgtagcttgaaaggaatttcatgagtaaaagggtgttaggctcaggaatttagggagggaatttatggagcctgatttattttaaaattagatgattatctgcttaggttgctctaggtgtggctttgccttaggtgtggggatagcccagatttccttttaagtttcttactggctttcacatcctctggttggaatttaaaaattcttatttttcagaactatttgaaattcttgtcctctccatctcctagaaatactgtctgttgaaaataaggcatagtcaggaaagagtatctctatagagttgtagcagaagacataacagaatctttgaataattaatgaaaatacttgtcttattctataatggataatactgagacacataaaaactcattgctgatcatttttatttttctgaagaaaccgataatgtgtaatttattctcaactaaatgctcctatgtacacagacattagcagttcctttggtttctctattttgataattatttaacctcttgtagttactttctttattcttaataacgttattattgggcatacacttttgagttttgaaaagtcacttaagtatagaaataaccttctctggatataagaatggctgttgactgggcggatggaataagtccagggtatgtgatggatcatgtctcctagtatcagagagggaggaaaaaaagcatttgactttttgtatacaacatctatctagtcttagtagaaagatttgttggtttttttttttttttttttggtctatttaaaatgggcatttctatatttctataatgtttgctgggaaatttgtttccctaaggccggaagtctgggccagaggcaaaccctttgaagtgtgtctcctttcttcctttgtacattaaaataaatcaaaacaaaactctaatccctttatgatacttgacagccatggactattgttctgtactgcatcagcaaaatcactctttcgcacttgaactgggagctttttagggttgcctctttacctcctgcctgttttaggggcagagacgtgacacaggagcaatactagtttctggggggtgagtacttgagtgtagacactgatacttgagctcatagcttgcactgttcgctttcacttttcacggaatgggctgctccgtttgtctaagactcactttcccttttgctctccctaagctcttccaccactgagatccataattgttctccataatgaatacataacagatcctttgggtgaccggagctgtaaataggagggatctgggtgacaaacctgtgtatggccctcagtgccctttattgtcaccagtgctgaatttcatatatatgtatttctgaggtttcagccaggccacatgggaagctgtgtccctcttctctccccctgcccccacccccatctttttggaatgagtttatgttttaatattttaaacacagttttttatccaagtcaaatttaagtgtgaactgactaaaaatcagggat

SEQ ID NO: 62758 - DNA, 1794 bp, Bovine  19866880659878
  misc_feature (1)..(1): n is a, c, g, or t
nttgaaccctttttttttttggtcttttttttgtagcattcctagagttatgcccaggttacctttgtaattttgcctttttcttccccctaaactgtttccaaaatttgctgaaaagctgtagcctcagggacacctctgcttttctgacatgactgacaatcactccggtaatgtggaacacacgttctgtgagagtttgcccatagccttggattccaaatttgcaacttcagcatcttccattgaaaagaaacagcatgttttttcttaaacttcccctttgcttccccttaaaccatagtcttttatgacagtaataaggaaatgtggttctgggtataattgccaagaggcaattgcaccccagaggactggcagaattttcttttctatatctgaaggctgggctccatcaagaagctccatttgcaaataactcaattagaataatcacaacaatgtctttatttttgtggcagctttccccatagagatcaaagtactttggagacatcctatcaaattcattgttgtaatacccagtggactaggataaaaaagttttattatagtttgtttgaaataggtgattgaggcaaagagagggtaagtaacatcccagaggtcacaaaaaaagtcagtagggcatgcaaagaattcaggtttcctgttactctgcaagttatcaagctacattctttcctggccattggaaagattgagaataaagaaaacctcttttcagattgcataacaatgtaggtgaaagtgctttgaaaattgtaaggcattgttgctatctttatcacttagtacaagtggaaggtaagaaagagcctcactgtcaatagctagctgttccaactcatgtgacatgggtttttacaaattcttggttgaccgggcccaaattatcattcatctccatcatcagtgaaagactaatgaaaacttacatctataattctgaattaaataatgcacttaaacattttatagctcgttacagattcttaaactgcctaagttccgtgggatcgatagcaaactttgaatcagttaagaggccaatgatcaaaattgctatggttggataaaccacctaacgaagagctcatctgagcgttccgactttgcttagagtttttactcatagattctatagtcctgagggtgggtctaaggaatttcagccctattttttaatgggaattggagatttgggagtaaaattgctgctgctgctgctgctgctaagtcgctttagtcgtgtctgactctgtgcgacgcaatagatggcagcccaccaggcccctccatcttaggggattttccaggcaagagtactggagtggggtgccattgccttctccgtaaaattgctactcatcttctaatctaatttcaaattgctactcatctttcgatctgatttcaaagagccttggaggacacaccctctgggaaagagacacaattaatgtgatgttcttaattattattgtttgcctagtgattaaagtggcatattttggtgtagctttataagtgtcctctgtactggtattggggagggtcaggagtggtaggatatcctcctgtgaacaggattttcttttcccaaccaggagctgaaaactcagaaacatcccccagttatcagaccttgccttataatgggaaaaatgagaagttaggcataagacaaatacgtgatgttttgaagctctctctttgattttcaaagttctagagtaagttccgagttcttccctctaacccacataaatg

SEQ ID NO: 62759 - DNA, 1172 bp, Bovine  19866880661071
  misc_feature (1)..(1): n is a, c, g, or t
ncccacaaaagctacagcagcgccaggggtgatgaagcagcaacagacccaggtaagatcccccgagacctaaagatgtctggggcctcccaggcctatcactaaggggttcaaacctctccctgtctgtagggcacttatggatgagcatggaggatacttggtggtgggggttttgatttgtttccaagaaaagggaaaacaagaaaggagggggaaactcaaagggaggaaaaaatgagcaacagagacatggggtgctcagtatggggtgcttagtggatttggctttgactgtcttcttaggccttggaaccatgggtgaaatggctgacatccccccaacctcaccccacccagaactctgcttcttgtgcagccaataccagggtcactgcaagtcttctcgagatgaactctaagagagccttttgtaaagagggactggggtggggggacaggtagagcatgacttctctcagcaggacacttcactgtctgtggtttcagaaacgcctttctttcaaactccaggtagagaaaaaaaaaagagaaagtgagtaggtacatacagtattttagccactttcccttttacccagcatttctgtggcatggcattaagagtggtttgaaagtatctctgaaaagcatctgatgctatcaaagtgggcgaaacacttcttagactggtacttacctctcctaaacttcttctctctctcatactcactgaaagagttaaactaatttcattcaccccaaaacctggctggaagaaagaagtgaaaaccttctgtagcaacaggaaaatctgatatttcagaatccctaaagacctcctccctagatcacctattccctgccatcttatagagaagaagagttcttttttctgacagtttaatttcaagaagtgctggagtgtctgttcttcaggtgactggatttttcaaaactcagttgtatatttgaaaaagtaagcagtattacccaattggagcctttcactgacctccagagaggagcataacatctcaagggtcttccaatactgatttccttttaatcttctcctttctaaagaaattcagtgacagggtgtgaatcttgagtagtttaagggaaaagttcttggagcttaacaaagctggcattttcaatacactgga

SEQ ID NO: 62760 - DNA, 1941 bp, Bovine  19866880702091
  misc_feature (1)..(1): n is a, c, g, or t
nttaggaggactggttcccttagcaatgtgtgacctttctaactatatctcttatctcacgcagccttccactgtcttctgctaaaaccaggccatcgctctgtttcatgttaaagattgtcctcgattctttcccagatttactagctggagcataatcttgctaagaacagttttgtcctcatcttttatggatactcttggtatggatgctcttgaccagatcagtgtctgcatatgccagcttctgagaatgttcactatccacttatagctgtcccttctctgtagaatcccccttggctaatgggaacctctggactatggaagatacacccacacaccacttacagccaatggctagaaaagtcagcccttctctcaaggtatggccaattctgaagttaaattcatgctccagagtttgtcataggtttggggtaaagtcagactccagcctagtttactgatttttgcaatatggttattaaaatatcagacttgtttcagtacaaatcattgtaccttaaggttagacttgcaagactcctagaagctgaattcagaggagtggggtgtgtttggttcttgacctttttcccttcctatctcaagctgttatgatgatgagggagttaagtaggtaagggtaagtgaggggaattcactcttgattggcagcatattggagatagcaagctcgccatttttgccttgttgttggcagatgccttacctgggtctaacttctcggtattggtaaccagcttccagttatgcagtgtggtgtcttcggtggtcttggatgtccagccagaagtctcagggggctgatgctgtgtgagcggctcttggtaggctctctgtaccctccttacaccagcccatcacgatcagtatgagccgctagttgtgcctacccctcatctggtgagcttggcttagtctgtaggaaacttgcctcactctgagtgaaactgggaggaagtggagagcaaccttaacatcttctgactaccacctctgtctgaagatctaatagtcaaatgcagcaaaagttggtaacattcttccaatcccaataatgctttcagtacactgactgattctctgggggacatctggcttggttgggaaggaaagaaggaagccgaactgtaccccacccatcccagttgtacagaagacagagtaaatgctgattcacaaactttaccccaaaagatggttcttcttccactctctacccactgcataggaggttgctttattgattcttctcaaagtcctcattcttagaaagttgtacttgagtgatgtcaagtatcattgttgttcagctaaatcgtctccagttggtaactccattaggaaggggtctccatgcatacagcaaccttatgttactaacttcttaactggtacacatgatagaacttcttgtccttcccatacatcctttctattatttctaagttcagcaactctctatggtcaaaaaaaatctccttagactggtctctaaagtctttgacaacactgacccaaaacaattgtagttttggctcctaccatgagctcacccaatgatatgggcctattcaaagaagttttactctatcacgtctctggggtgtttctcatactgtactttccatctgcaatatcctttaagtttgactgaaaaaaaatctctattcattctttaggtcatcctcaacctgtcctcttctccataatgtcctaccccttccttcagtaggaattaatgctttccatgccattcacattatactttacttctctggttctgccttattatactgagagattgtaagaaattgtaaagcgaatgtgtaccttattcaccacattttcaccacgaacctggcaaagtaccttgaacctagtaaacattcaacgatatagtgagactgaaat

SEQ ID NO: 62761 - DNA, 1169 bp, Bovine  19866880735351
  misc_feature (1)..(1): n is a, c, g, or t
naagcagggagtcttaaccactggagcaccagggaagtccctccacaatcaattttagaacatgttcatcacccatggagaaacaccttcccattagcaattactttccatgtactctctaccctaagtccctactccactacaatccagttcctaggcaactactcatctattttctttttttttatggattgcatattctggacatttcatgtaatggaattgcatattttgtgatgttgggttgcagcaaaaaaggggctcagggcagagagtgactgctaatgggtatggcattttctgtttctcagtggatgatgcccatgttctaaaactgattgcagatatggtgacacaatttgtgaatattctaaaactactcaatcatatacttaaaaatggtgaatttcatggcatgtgaattaatctcaataaagttgttattttattttttttccccactggaaaataattttattgcgattctaccagctatacaatctgttttattaggccccttcttcctttgcaattcggtccttcttaagtggtcccatgaaggctttcttctcctccacagtctggaagcgaccatgaccaaatatggaggtggtgtcaataaatttgaggtcaatcttctccagggcccgccatttggtctgtaccagcaaggacttgagcagagtgagcactcacttcttggttcccaccatgcagcctttgagcatgacagtcattggtcacctcaccgcagtggacaaagccacccagagggttgatgctcttgtcagacagatcgtaatcagtagaggcattgttcttgatcagtttgccgtccttgatgaggtagccctgacccatcttgtagatcttcttgttgatctcagtgcggtgatggtagcctttctgcccagctggagccacagagaaggccacccaggcaggatgccacgccccaatacaggcaaccttgcgcagccctcaatgggtcttacagggcagcttcttggtgtgccaacggctggtgacacctttgtagccttggcccttggtcaccccaatgacattaatcatctcatcctggccaaacacttggctcacagggacctgctgctcaagcctctcgcgggcccagtccagtttctcggcctctgaacagtgcctccgtt

SEQ ID NO: 62762 - DNA, 2712 bp, Bovine  19866880740241
  misc_feature (1)..(1): n is a, c, g, or t
nctgggcagctctccttagggttgtgttaaggggagggtctagtctctccagggccagccctgcacccacataaaactctcagcctaggagactggactggggctaaccctggctgggccttgaatttcatcccctgtgccaaccaatgacaactctttttgtcaggaaatcatcatggtgccaactgcacccaaagaagagcctaaactatcttttcccacctcccccccacccacccccttaagctgatggccttcccagagtgttgatgtatttttgtttcctaatttaattcctgtattattttagaactttttcagctgtgtctggccctttccacctaccctttagttgacaacttttagcaagggtctctgatgaactcaagcttaagagacctcctttgcaaagtgtgtagctgagttttaaaaggtgcctcggtcactttggagggggaggtgagccctgctctgtcctccccatagttttccaaatcaactggcctgtaccttataattttacagatgaggaaacaaaggctcagagaaggtagttgacttcctaagagcacacagtgagctgagagcagagtctgcattatactccaagattcttgattttgaagtccgtttgctcagttttgagggtttgtgatcgctaaagtaaactactgttcaggaagcatcaacttcgtgccagaccacgtgcatgccagacactttatgtaagtcatcactacagcagttctgaagagcatcattagccccaataaaaattttaaaatcaaattatgaaagtaataatatgcataaatcaaaatacaaagggacataaaatgaaagtaaaagtctcccactctattcttccctcctgcccagaataccactgaccttttttgtcctttagtgactctcttccatatcgggcagaccttatcattactttatgaagaagaagccagctcacattaggtgggctggctggggctacctgtccccaggctcagcacttccattcttctgcattagctcaggtgagtggggagaaaatggaagtgaagaaagccagagataaaaagaaaggtcaggttagagttaatatcaccccttcctttcttctcttcctgccccatctaggcacttactcacgctacagtttttcaggagaccaaaccatggctctctcggtgcagatatcctgaggttcatctgtgacagcaattggacccgcagctctcctcaggccccggtcacctgagtactgcctccaaagtgctgcccctaccctgtactagctccaggactggagcagatgtcctgggcttgagactttcctgaacaactctgagagttgttctgaggctaaaatgagaggcagggaaaagactctgtaaacttgaaatctttccatgtaaatagagcagctgcctttcaaagacctggataggaaccctgcgccctactcctgtagaacagtggatttttagggatctaagggtttgcattttgtctgtgttctgtctgtatgtaggggcagggctacaagtgtgttttaaagtagaaacggctgtttttttatccctgaaagatgacaacactgagtctttggtatctgggtggatttctttctactggagaatagatacagccaagctgttgagggtaggaggaggcagttgccttgcttggggtgcacagtggagtggtaagaggtgtggctgaaaggatgcttcagctggtccccgtgggtaggtgtcttcctgcaaaggctgacctgagattgttcaggggcaggaagggtggtgaagctgaacactgccgggtgcggggtcggggggaggggccacggggtgggggtcattttcatttgtttgttattatttcttgagaggaaggggagggctattagagaatgaatttaataagtcttgcaggaagctagtcttgtctttgaggctccttcattctggaagaatctttagaaacatcctcaactgaggggcctccaagtgacagcaaatgataagctagggccccggtctcctaagctttgcagaggaagagcagctggggttgggctggtgcctctgaaaagcccttttagaaacttgcccagagtccagtaacatgcccagatctgagatgagatggagggagactgtgagcatcagggaagaagaaacggttttaaaatgaatgaagcgggccggggagtgggctggttccagagagaaaccatgaaaggagtgaaagttagattttcggggaggcccagccagctgcatagcctgctttcaatgcctgtgtcaggacaaaggatgctgcgccccctggtggcagactggcggtcggcgcccgcgcactgcggcggagaccggcgaccagacccaagtaccagctgaaaaagtcggcgggtcagatgccttttcttctgtttgctaagggagttgaagttgaaatagcctttgctttctcaactctgcagtctaaatagagacgttggtgtaaagtgagcgggttttgtaattctggcatgcaatttaggccgacaggacaatgcctgtttagaagaaacctagtggggtgggaattgccctggctgggagaaaagatcggcatttaagcgcagagctggtctgaggagagtctttaaaaatttaagaacctccctttctcagttttaacacaaaaggggctacagtaagatgtttt

SEQ ID NO: 62763 - DNA, 771 bp, Bovine  19866880810798
  misc_feature (1)..(1): n is a, c, g, or t
naagaatgtacaaacttcagggattcatgaatacagtccttgggctgaactcagcttaagcgtctcttttccttctgataataagatgttgttaataaataatcctaaagtctagaatgtctttagtagaggtgtgtgatatgcattcagtttgaaatgagctaggtgtatcaaaatttaagaattacatttaattgaccaggaaattgtaaacagtggtatggccttagacaaatcactgaatgtcagtaaactgagttttttcatctatgagatgccaaagttggatactaaggtaacagtgtgttctaatgttctggattttaaattaattgaagtcagagattttatagatatttaatatttgagtctttaagctttcattatcctgaatctttttgaaaactctgaaggttttcaatttcctaaattattttttagatgtttgttttaaatattcttattgaataacatgataattggctctgtaggtgcttggaggcatcatatgttttgccttatacctgaggaatgtgcagttcttacaaatacatgccttgtcctgcaccattctggtacaacaaatgattgagagagactgagctattataacagaaccttgttatgggatcagtgtctcctactttgaaaataaatgactcagccagacggcaacatttattttctctaaatgactagggatgtagcaataggagaccattatcctgtgacaatattctgtttcattgacattatctcacaaatgtaatt

SEQ ID NO: 62764 - DNA, 1072 bp, Bovine  19866880849837
  misc_feature (1)..(1): n is a, c, g, or t
ntaatttatctgaggtcaaacagctaaagactggagctgggcatgctttgcaaacttagaaatattgcaaaacatgctaagcagttaattttattttactttttgctggaagcaagtctgcagatagtatggagatgaaagttatctgaaaaacttactttagtcattctcgttaactcaaaagagatgtaattctttctttcttgggtaagagggtaagttgattagtaacattttttgaacttctcatgttaaatcagctgattgaaaatatatccatccagttgcatatatgtgtatatatacacatttttggagtatagttgatttaaatgttatatcagtttcaggtgtatattcagttatatacatgtggtatttattttaactttgttttcttatttatttggctgtgccggaccttagttgcagcacaggggttcttctgtctttgatgcattgtgtgaattctttgttgtttcttgtgggatccgattccctgactagggatcgaaccctggccctcctgcattgggagtacagaatcttagctactggaccaccagggaagtccctaactttgttttctattataagttcatttaaaaatagcccttatttgtcatttcctctacagcctggcttttaatataataaagggcatcatttaattggaaagagaaacctgtatatatttttagcaattatgtggtgtagtgcttttatgtagagttgtatacttaagacacacacacaatagcaattcctgaaaatattggctcataattgctgcactcttatggatgtattttcatatataattcaggaaagaaaaattattgcatatgatagatagtattaccacataaaactacagatttgtgtatcctattttagtgcattgctaattctcaagagatagcaatacagtaatttctaagaagccagacagtttaattttgctactggtgtcaggttaaagcattggcatatatttgcagctgtagctgggctccatctcatcctttgcaggacaccttgagtagcaaggatcaggtcgggctcacccaga

SEQ ID NO: 62765 - DNA, 1989 bp, Bovine  19866880861987
  misc_feature (1)..(1): n is a, c, g, or t
nttttgtgggtttgtaaaaaacaagaaccaagaaatcctgtaccttagggacactggtagaattggcaaaaaccgactggagacagagaggggtgtaaaatgatgaagaaagcagcaactggggtcagcagaattgaggtgagagttttgggtggctggatgaactgatcagaagcttctagaagcactggtggcagctgctctggaaaagtcatttcctgaaactgaaagtgatcttaattgatgcagcaggaagcttaatggagaaatctgacctgcagattcatggatgtaagttgtcattgttcatttggtcagtcatgtctgactctgcaacctcatggactgcaaacatgctaggcttccctgtccttaactatctctcagagttggctcaaactcatgtccactgagtcaatgatgccatccaacaatctcatcctctgtctcccccttctccttttgccttcagtctttcccaggttcagagtcttttccagtgagtcagctcttcacatcaggtggccaagaagtggagtttgaacttcgggcatcagtccttccaatgaatattcttggttgacttcctttaggattgactggtttgatttccttgctgtccaagagactgtcaaggggtagttatatcgaaatgccagcttttgcaggtgtagtagttctagagaagcagcttcctgagagagtatgtttcttccctgatgtggtgtgagctgctggtaagaatcgagcctgggatcttcaggcactggatgcagagggctgacataaatggtaaaggaactctccttgaacagttagggagattattcctgttcctggaaggatgtagcctcgcagctggtctgatcttggaataacagccttaccaggaactcagggttgaaacccattcccctacctctgtcactatgaccttcaagcccatcacctggaagtctgaaatgtatcctctaactgaagcggagacaaatcctccaccctatttctgagggaaatatcagccctggataggcttcttactatttcaatatgagaaactagagggaaaaatggatcctgtaaataattctgaatcataaagaaatgagcatatagtttaaataatctgaatcttaaatctgaatgatctgaatcttaaatattttgagtgtgttctttttagctttcctttattgtaaatttaaatttttgtctaagtaatgtatttagtgatagtttaaagatttataattcccctctcctttcctcctttgccaattctcattcctctaagtcaagcgcctataactcttactagctgcgtccaaatgtaaccaccacattatgctgttcatttttaaggtttagatattatttcctattgttggatataagttctttcgcccacatctctcactgcagtcatagcagtgctttattaaccaggattcacactattctgagtatgtaaataatgttcaccgtggagccacttttgtatcgtttgtattcttttcttttttgtacaactttgtgtttcagctagaggtaataattaccttctttccgtttatttgcttagcatctatgtgtctatgattaagttatcactaaactctccaaataaaaagtaaatctccttattttaggcaagtagttttggcacagggtttctggtcactccattctcctgtccccatctaggttccttgtacagttgtcatcctgggctccccctctaccatttttctggatttcccatagtttctaactgtatgggacttccagtttcctaatttccgtttctatctttcatggtttatgtctatgttttgatggagcacacccacaaatgacttcttgcaaagaacaagagagagcattttttttgaggcccagagagtctgaaactgtctttatttggcttcaacaaatgatttataatttggctggaatgaaggttctgacttgggaaataattgccgaaag

SEQ ID NO: 62766 - DNA, 1539 bp, Bovine  19866880927189
  misc_feature (1)..(1): n is a, c, g, or t
ntgttgaacttgacttaaaaatcagggtatctgctcttttttgtcagagtagtgaaggagaatgctgagagaaaaaaatctatcctggaagagattttctgcacagggaagaactgatggcaaccatttcttcatgctcatctttgagtctgcagcttttgtgaaacaaatctcctcatgccatacagaatgccatcgaaacatcaaaacacttaaatagtattttaaaggaaaagcctaccttgtttaatggtagtttatttagaggctgcacaaataacaaaatcatgttataggttaaaacaaaaagccacggcaatctaccctatcacgcctttccttttaggggaagagggccagatgtttaaacaatattgcaagcggtgtgcagactgcagctcttagaggccttgggaaagaaatcatgtctgcacccctagtgtttcacagttttagacccctgacctagaaacagtttaaacagatgtttagttcaagggatttatgtcgacattgaaatttttttcccctttggaaatggctgcctctaaaactggagctttttcttagaaaaaggaccagagaaacaaggacatctcacaacttcgtagtttcatgttgcatgtgtcccggtgcaacagaaacagaacaaataggtacaaaccacctcatcagccactactgttcatgtgtatggacatttttgtagcccccactttcagttctgtgtaggtgatcacagacttgcaacaagaagtttgctaaagcaaagaagacttttggaaaacccctttggattatgaaccaactgaaattatagcttctcttcctctccttatttccttccctctctcccttccaaatcttcctttacctcttctcccagaaataattcctttcaactttgatcctggtgtgtggagttcattccatgacttgggtcagtcaggaacagtgcattgcatcatagctgcctttatgaaagtgtttatttcatatctgaaatgttttcatgtgcattcgctctgctttgacttgcagaaggggaaagaaagtagttttactggaggcaaaacagccacctgtgaaaactaattgcgtaggtagacgtttgatggtatctctgggagggacccagcaggaagaaagtaaatgttcttaatctacagggaaattacctgtgtgccaagctgaccctcttcatcaaagccagagttgaaatataccatcaagttggtggcctctgtttaggaggccgaggtggggagggtgacaagaaggaggagtcctggaaggtggatacagttcttcgagatgaactgaatagatagaggaaaaatgacaaatgtgatatactcaactgaaccacctcgttaagggctgacatgtgatgtgaatgttctgtagtcactttcaaacaaaaacttgagatgtggttccttctttcttccccttcatcaagttttctttttagtcttaagttctgctgtcttggctttttaaaaaaaaaatctttcctctccttgattcatcagtcta

SEQ ID NO: 62767 - DNA, 2631 bp, Bovine  19866880930116
  misc_feature (1)..(1): n is a, c, g, or t
natctgctacctgatcggtcgagtctaaagcctaaaacatagggttggcaacatgcaaaccacccggactgcaaatgaggtgggtggttcctcaagagaacgctggggtgctattagttaagaaagagaaaataatagggaaaagacaaaaaagacaaagccacttcccatcattgtttacagacatattaatgatttcaggcttagaaaaaaaatttagcagtttgaaactgttacaggtattgtggctatgtgtagttcttcaaatcagtatctctacctaagataaaaatcagttttcacattctcacttttcttggttcatacaatctgtttttaagcctagacatatctatcccaaggcttccctgctggctcagatggtaaagaatccacctgcaatgcagaagacctgggttcaatccatgggttgggaagatcccctggattttatacccactccagtattcttgcctggagaatcccatggacagagaagcctggtgggctacagtccatggtgtggcaaatagtcagacatgactgagcaactaacactttcatatctatctcaaggcaataagcttcagaaaaagacataacccaatggtcttttttagagtatctttaaaaaaaaaaaaaaggttaaaacctttattgagacacaatttatacatcatgcaatttacccatttaaagtgcaaaattcactgttttttggtatattcacagagttgttcaaccttcaccacaattaattttagaacatttccatcactcccccaacaaaaactctgaaccactcaactgtcatcttccagtgcctgcactctgacctattccccttggtgaccactagttattttcttctctctagatttgcctagtctaagaatttcatatgaatagaatcatgtactaattgttcctttgtgactggctttttcaattaacataatgttttaaaggctcatccatgttttaatatgtgtcaatatttcattccttttttttgccaaatggtattccattgtaaggataaaccacaagttgtttatccatttatttagttggtggctgtctgaactgtttctcctttttgcctattatgaataacgctgctgtgaacatttgtggacaagttttcatatggacataattttcatctgtcttaacccagtggccttttaagttaaaaattttagtgaggtttcttatattccacacgctgaagggaactaccatttaggaatgaaatcagaaatgccacataccgaattccagttctcttagattttggatcactacctcaaccccttaagaatcctgggacgggttcagtccagaggaggactctgcttgccaactccaggatggaggagggtgctgtttgtcagaagaatgtagcaggtgactttgggcaaatcgccgagtaggtttgatagaatttcctctcacacccaaggcttggccttgcccagagaaggcttataatcattagtccatcacaatgccatttgggcactctccataagccaagtataaagaataataaaaataaaatcttagtctctgacctggaaataagagtcatggggtttgggacacttgcaggaaaaagggaaatttttagcttctctgatagaggccagtagagagcttcattttctcccatgagtgatgggaggagttctttccagttctgtcttgcagacctgggatgggggaaaaaaaaaacaaaactccatattaatttatacagcagctttcttccaaaaaattcagagtgtctcaaacagtctttcactcattcccctgagggagtttgcataaatgtgcatatgaaattatttcttttaaaatttacactctccagttagccagtactgggcagaaatagaaccagaaaagcagacctcctgactgaacattccactataatattttcagtgagcttctgtaaatcagtgcagagccttaaaaacaggatctctcccataatatccctgggactctgctccctgatgactgatgttcatttccacaggggcaaaattttcccttccaaatgagagtcaaccagcatggcgtgcaccacgaccctcaggaatcacaagtcacgggcttaggcccaccttgaaacaggcagcccagattccctcgcagctcagccctcctaacccaactggaaacctctcaagaaccttgagactggctcagcccaaaggagaaagagtcctgctccccaactgtgggcagaaaactgtggtctagccagtccctctcctcctgtcactgtcgtgtctccacgttgcttgtccagggagctggactacccctcagagtcatggaggtcacagtggggcacatactcagttccagtttcccagagcccaactaggtgcccgggtgcaaggctctgggagagcttccagcatcaggcatacacagggccagcctggctcttcaccctaaaccaaacacttaattcctcctcttggacctcttctcaacatattcttattttgaggttctgataactcatccctgaaaaaaaaaagttgtgttgttgttattgatgttgttagagtcacactagctcatgtattctagagaaggcaaggcacccca

SEQ ID NO: 62768 - DNA, 801 bp, Bovine  19866881000617
  misc_feature (1)..(1): n is a, c, g, or t
nccgacaggtccacttttataaataaccgctgggtaggaaaacaacaaaaaacgggccttggctttcgctcctatgacattatttgaggtttaataggcaagccgcacacattctgtgggatttagtcagctttatccacatgtgcccgcattccctgcacggtgctgtgctgtgtttagtcgctcagtcatgtccaactctgtgaaccctgggctgtagcccaccaggctcctctgtccatggggattctccagggaagaatactggagcggattgtcatgccctcttccaggggatctttccaacctagggattaaacccaggtcacctacactgccggcagattctgtaccatctgagccatcatgcatgcgtgctaagttgcttcagttgtgtccgaccctgtacaaccccatggactgtagcctgccaggctcctctgtccatgggattcttcaggcaagaaaagcagaatgggttgccatttccttctccagaggaacttcccaacgcaggaatcaaaccagggtctcctgcattgtaggcagattctttatcagctgagctatcaggaaagtcctccctgcatggcagtaagacattaattcgtttttacatctacctgggaggtttttcagttgttgcaagatttgcaagagtgcctccatctaaggggcagccagttttaaaaactgtggcaacccttagctctcagtaagagaccatttcacttcccaaaacacaaggtagaaaattaaaaatgagacccactttttaacctttcctttcttcagggagaa

SEQ ID NO: 62769 - DNA, 2369 bp, Bovine  19866881018991
  misc_feature (1)..(1): n is a, c, g, or t
nctgatagagttttgtctatctaatgccacagaacagagaagcattatagcatagcaattaaaatggcttccctggtagctcagctggtaaagaatccacctgcaatgcaggagactccagtttgattcctggatcgggaagttccactggagagggatagactacccactccagtattcttcggcttccctggtggctcacatggtgaaaaatcttccagaaatataagagccctgggttcgatccctcagttgggaagattccctggagaagggaaaggtaacccactccagtattctggcctggatggggttgcaaagagttggacacgactgagtgactttcactttcactaaaatggtggctctggtaccagtcttacctcacttttaattccaattttagcttttcctggatgtgtcctcaggcagattgttaaatctctgtgtttcagtgttgtcatctgttaaatgagggagggtggtttgtagattattatatgaatcgatgtatgtagcacttagaagagtgcctggtacgttgtcagtcctcagtaaatgtcaattaccgtttttactgttacagtgtagttacatacagtacctgcatcacagtgagcattcaagaacttatagctgtgatcatcaccatggcagtgaccagtatatgaaagacatttgtggtatttaggataagtaggcagactggttccaaataggaaaaggaatacgtcagggctgtatattgtcaccctgcttatttaacttatatgcagagtacatcatgagaaacgctgggctggaagaagcacaagctggaatcaagattgccgggagaaatatcaataacctcagatatgcagatgacaccacccttatggcagaaagtgaagaggaactaaaaagcctcttgatgaaagtgaaagtggagagtgaaaaagttggcttaaagctcaacattcagaaaacgaagatcatggcatctggtcccatcacttcatgggaaatagatggggaaattttggggggctccaaaatcactgcagatggtgattgcagccatgaaatgaaaagacgcttactccttggaagaaaagttataaccaacctatatagcatattcgaaagcagagacattactttgccagaaaaggtctgtctagccaaggctatggtttttccagttgtcatgtgtggatgtgagagttggactgtgaagaaagttgagagccgaagaattgatgcttttgaactgtggtgttggagaagactcttgagagtcccttggactgcaaggagatccaaccagtccattctaaaggagatcagtcctgggtgttctttggaaggaatgatgctaaagctgaaactccggtactttggtcacctcatgtgaagagctgactcattggaaaagactctgaagctggagggattagggacaggaggagaaggggatgacagaggataagatggctggatggcatcactcactccatggatgtgagtttgagtgaactccaggagttggtaatggacagggaggctggacttgctgcaattcatggggtcacaaagagttggtcacgactgagcaactgaactgaagttgttttaatccaattgatttaaaaagtaacataattatttaaaatgatgctcttttgcaaactaatatggaagtagaaaaagaatcattgtacttatagcttagtgtctagtttgaaaagtatgggacttttgtgtgtttaacaaaaggttaaaaaaaaagttgattgaaaatatgtatcaaaatgaatcatttttatatatggcaaaaccaatacaatattataaagttaaaaaattaaattaaatttaaaaaaaaagaaaaaaaattcccagttagagactaagaagctaaaatcaaacatctgttatccatagaattttacatgaaagacattaaaaaaaatttttttttaaagtaaatatgtaaaaaaaaagcctgtattaagaaacatgctagttatgtttgggaaattaaggctattgtttttaggaaaaactcagtgcaatcaaatattggatatagtcaggagatgctaaggtgttataaccatatacttacagccaaaatgtacctgtattattgaaattcctgtattcacaataataatagtaattttgctgctgtgcctctgaaatgcataacccttgatcctttcttttcccattgaagcatttgttctatgatgcatgatttccagagagttctcctattgctccttggcaaaacatactgcattggaggacatggtttgcatcaaaaaatgttatttttgctccaattaggggttgtaatattttatattgagccttctctggca

SEQ ID NO: 62770 - DNA, 1578 bp, Bovine  19866881038156
  misc_feature (1)..(1): n is a, c, g, or t
nttatatcttaagttgaggttaagtacgtatttacataaatcaactcagcactagattctgatacagaattgttttactgagagagagagagaaaaaatgaattgtattgcttcctgagatttgctttcattttatattaaacctcaaaggatttatcaatttaacatgttctgtgttaaaatgaactcttctgtgggttttgcttcttataaaagagaatgaaaagaagtttatttgctacagctggttatatagcttttgctacaatgggatgacttttctagaggtagaatgtaaaatatagtaagccgatatcatttagcaaaaatatcaatatatttttaaggaaggattcgtgttttcttatgggcagcacaaggactccaaaaaatttaaaaagttctttcagtaataaagatactgcagaaaggtaaagatgttttaaatttatggttgccagtatttaatgggagtactttttattgtgattcatgcaaatgtctttccagaattttatttcttttaaaataatggcaaagaatatgtctggctgtattggatgggtcatctattaattcatactctaaaacagtttttacttttgttaaaatatacttgtacatatttctaaatcataatgaaggtgttcagaatttggggataagatattttaaaagatatcttatcattgcaaatgccagaaatatataggatgagcaagagattgctggttattttaagtttattgaaaaacaacactgaaaacttgctactttcaatactgtgaaatactagcaaaacactactgactgtgaaatataatgttaaatgtctgactttaaattttaatatttttatgactactgaacagaatttgcctaattttaacaatgatagtttcatgctttcataaaactaggaaatgctaagtaacttcatgacaggtttttgttttcatcttgaatatattttcttcctagactattattagcattgctaaaatatccttctgtacctaggggagatattctgtctcctgggttcttgcaagtttatctaagatggcccaagtggagggggttgcattaattttgaacagcatagttttcttggtgggatggctttgtattgtgttttgctttgtttaaagaaattattattgactccttaagtgttcttcttgaggttccatattccctgacttcatctcattttgcaccatttaacgttagtgtggctgtctggccaaccactccttctctttcatccgttcacttgagaagataggatccatatttccagtctctgcaaggtggaagcatgtgttttgtccagctgagtctcttggtctggttttttttcctggtcctaatacatgtttattcctacatgtgacaaatctgcagtcatgttttctttctgagttataatgactcagatgtcataattaatttgatgagcaggtgggggttattagccttgtgcttcacttgctaatagctgcacagtttttctaaagtactctttcaactaaggaggcatttcttcacatagaataaacagtacggcacaaaagc

SEQ ID NO: 62771 - DNA, 925 bp, Bovine  19866881101031
  misc_feature (1)..(1): n is a, c, g, or t
ntccctgcataaaaagggagaatgctttgcaagctggccgattttaagctccagttaacaaaaaccctttttgttggagcctaaaacaagaatgggttaacaaaagcaaggagggaaaaaaatcttatttttttcccttcttcccaaaatatagtattacaggacttaaaggttttgaaaggccacgatgcggctgaaagacttgagaaaggggcgaggtctgggccagcaacaacaaactgaaaagatcccaaggaaaagcagaacctcttatcagtagggaacgttatgatgtgattccagtttatggctgttttggtttcgtttttttttaacgagttaaaggtgtagagaccaggaaggtgccaatgttccctgtctaggtagacgaaacctagggttcatggatgttaaaaaagaaaaaccataagccacggtgggcgagtcaatagcgtgtgtgccgtttctgcatggctgcattttctcatacaagagccacttctggacaataacaagaccccggaaagcatctgcttagggattacgacccggctacactgagaaatgttccgttaacatagagcgaccatgggcttaactctgtgcatgcctggcctgcccactggcacacacacaatgcacaccgtggtcctagatgctttctgaagaagacactcagctgtgggcaccactcacctgctcaagggaaggaaaggaagaaatgaaagccgccacatttattccacctgatgagcattaagaaatggaagaccaaggctggcaggtgccaagaaggaagcccagagaagcagatcatgtctcagaggatgagggagcaagccccagtattgaattatttcctaagatggacatcacctgagaaaatctcaaattagaaatttaaggaacagaatccttcattcat

SEQ ID NO: 62772 - DNA, 1470 bp, Bovine  19866881110153
  misc_feature (1)..(1): n is a, c, g, or t
nacagttctttagacataatttctttaaaaataaagtgcatataattttccacattcaagacttctctatttgtggaagattctgaaaatagaagcatctgccataatatcaggggctttggagctgaagcgtctgtccaaactcacagacaggtatttcaaaatattgaggtagtctccggcatagccgtgatgaattttgtcaggagaagggggccattttcagtcttggacccccacctggttttgcctcactgttgactcacatacctgcctacagcaatacacactggttttggcctgtgctaggccacgcaccatcaatggagtccattgttttccagcaaggcacctgcacaacaggctcaaacaatgaggccatacctcaagcccctcctttctcctcagggcacccaaggtgaaagaaaacttgttgaggcccggaagcccacttgcatcataattagactgcctggccaaatgaaaaccaccaccgtctctaggaacaattgccaagtttggggtactcgcaaagctctgggccaaggcagcgttagcaggacctgcgctctcttcttgcctctgaatgaatttaaagagtgaagactgagaactgccaggctccgcaactctgcccctgactttggttttggtttttacaagcaaacacgcacacataggctatcctcagacctgtgagctcatcatgagtggagctccataacctacctgcaccagggctgagccagagccaccgaacactgaattccacactatggaatgtcttgtctcaggaagtgacagtgctactacaataacaaagatggctcaatttaaaaatgcttatttatgacaataaaaattattcaatttattacagtctatggggtcgctcgatggacactgagtttgggtgaactccgggagttggtgatggacagggaggcctggcgtgccgtgattcgtggggtcgcaaagagtcagacacgactgagcgactgaactgaactgatggggtcacaagagtcagacatgaccgagcgactaagcgcgcgcgcacacacacacacacacacacgtataaaatagataaccatgggaatttgctgtatgactcagggaactcaaactggggctctgtaacaaccgagaggggtgggaacatatgtatacctgtggctgattcatgctaatatatggcagaggccagcacagtattgtgaagcaagttttcttcaattaaataatttggggaaaaattatcaatttgtaaaggttttactctttcactatcttatctatctgttggttcatttgaatgtaaaagacacaacacaaaggtaatgattatggcttttgcagtcaggcatacatgggttctacgcttggcccaccacatcaaggatgcatgactctggagtaaattgcttaatctctaattcctctttttttcatctaaaaatggggata

SEQ ID NO: 62773 - DNA, 2365 bp, Bovine  19866881236307
  misc_feature (1)..(1): n is a, c, g, or t
nctctccttgattcatcagtctagtatacccacgtgccttgccattgaaagggcaaaatggattgtgatggagaaacaggaatcagtgatgcaggctccctcttgttaccatctgagtagctctctgactgattatacgcaagtttagaaagatcaggtcccatggggccatactatgtacccaccggtaagtgtatgcctctgtgtgaaactaaccaactgagattggtcttccgatgacagggtctgagctctcttgtaagagtctgcgttttgctgttcaccctacttggcaatcagcagtagtcttggtactagatgttttctactcacatacctacatgttgccttagctgtgtagccagaaaagtttgacaacacgtgtctgcctgctggttcttgttcagtcactaggtcgtgtctgacttgtggtgaccccacggcctgcagcacaccaggcttccctgtctttcatcagctcccagagtttgctcaaactcatgtccgttgagtcggtgtctcatcctctgttgctccctcttctcttgccctcagtctttcctagcatcagcctcttttccagtgaattggctcttggcatcatgtggccaaataattggcgcttcagctttaacatcagtccttccaatgaatattcaggttgatttccttagtgtctttcctgaacggctgtctttcatgggaaatcaaaactctagaggagaggggaaaagtccctagtatttgaagcgccatgagatttagggagatttggagaaaagttagactatccttctgcaagattaataaaaaaaaattttagagaacaaccaggaagttttacaaaagctccataaattaaataagaacacgaattaaaaggaaagttatgtgatttttaaaaggaagcgttttgtgtttggaagactttggacacattccttaatgtgtggagtcctcagtcgggccctgggtgcagtcactgggatgctgagctgcccaagggagctgttcagtaggaggccaggttctcttggaggctccattgcctttagctttcactgtctgggagtaactagatccatgcctctgaagtccatgagtgctcacttaacccttgtgtactttgacttcttcctacctgttcctaccagtgtcttgtgggtcctttcaggatccagcaattcagtcttgcacctgtccctgagagtgcttccttggagcctcccacttcaaattgccatcagaagctcttctacaaaagctaaacatgaaccagtgtgaccctatctggaggtgatattggagtctagttctcaaattcaaccccagttgattaaaatacctgggatccataaataacattcggtcagaagacctttccaatcgtaatatgtgacagtactcctggggccctttttctagagcctcataagccacttgtgtgagaaatttctcctccatcaaatgtaagataggatcttgttcgggagacatctacagttatgtccagtttatttccatggggcctaagcacttaaagcgatgtatagtggacccttgacacttctaagggatatttcaagggtgatcatggatttctaaatttacaggcagccctgtggactatagtttcttccccaggtgtctgtatttggacaagaagcaccacttccatacgccttttcactttcacttaacttctgtcaccatcacaagtaattggcttttctttcagtagcctttattttttaaacaaaggaacagtgttatcacttcatgagctttctatgtaacaatgaatagagagagaacaacaaaatcgctccgagatgtgactgttgaatagttggctgggttcatacaatacccaagtgattctcttcagtcttgcatgcctgtggatcagatttgtcctcagaaaaatgacaaatttgattgtagaatttctctccttaaaggaacttttattaatagttcatgtactttagaacatggtctgaggaaacactggtattttgtaggagctcctgaatgaaagcagaccctagaaagaaggtatcataaaaagaaccagggataatgtgtttgttgttagtcctcgggttcaatttcaagtttagcaagtgtgtgtgtgatgtgaatgtagacagattcatgtgtgtatattattgttttaatgtttccatgtaatgtgctttaaaatggaatgacatccttactaacctgatatatgaagccactgtgtaaaactgtctaaaaagagtatttacaaaatgagggtgttatcgaaaagtaaactgctgggtagtgggactgttgctcaaagtagtttcctggttcacatcaagatcagcaaactcat

SEQ ID NO: 62774 - DNA, 1502 bp, Bovine  19866881273976
  misc_feature (1)..(1): n is a, c, g, or t
ncttttataagaaatcatactgtctttatgattttgtttttcctaagtttgaagacatagaattttgatgttgatttaagagtagtatcttttctcatgcagtaaaaactagtgcaaagaagaatttctaaaattttaatctgataagatttttaattgtacctctgactttagtaaaagaatgctctaagaataacgtaacgaaaacaaaagcaaaaaaaaaaaaaattcaaatcaatcacatataccctccacgtcccaaaaggatctcatgtatcttttcattgaaaataaaccccaggtttataaaaggtaatgataaaagttttcacaggtcgacctacttttacgtccttaatttcttgatcttcctatcataatactttgctaatctgaaattgaaataccggaaaaatcctcaaaactacaagaaaatacgtcagaacagtcttgctttaaaatgatattagaaagatatagcaagtaaatacataagtaaagatgcaaagtcaatacagtttttcttcctgaaagactgaaggcaggattcttccttgcctacattttgttctttatttttatcttaagaaaaattttttcaccaacatattaacttcttctatattgtacatgatcatattatatgacaaaagtagtatatccttcaaagataaaaaaatctctagttatagattaaactgtatactaagttgatttttctttactttcatcaaaatcacttaatatgactacaaattgccaacaaaacattcaaaaactgaaagaatttaaacgtaatttccagttaaattgatgattttattttttgtgtggatgaaaccacaaaggtgaattatttagaatatactaaattttgttagaaattttctaaagttgagaaaacttatcaactttactaaaatttcttctttttagttgactaacattttctctgtgtagcatgataaccaaaagtgaattgtatccaaacattttttaaaagcttcgttactcattttacaaagaactgggaaggagggaaaccttttctagaaaaagagttgataagtattgtaagtcagactaaacaaaggatatgttctttgcatttgaatgacagcttggtttgaaattaataaagctgttattgtttgaaatgcatttctgaacatgtacagagagaaccatgctcacttaaaaatgttctgtgcttgagctgaatgaataatctcagaatagttatgcaatgacagaatttgattttcagtatttgttgagaagcttgcttaaatttttcctttactacagtcaatgtagcagttattaatgtatctgtttccatagactgtgactaacagaaacaatcaagatgaaacatctctattttttttcctattaaattttccttagaaatcaaccttttgagaactatgtcttaagactggaatattgtaggtaaatgcatactatgattagttgaatactgtgtacatgtaaattgt

SEQ ID NO: 62775 - DNA, 600 bp, Bovine  19866881297694
  misc_feature (1)..(1): n is a, c, g, or t
natttctatcaactctttcttgaggaacaagtatgtccacaggccaacagcaattttactgtacaaattaactcaaagaatgctaccaatataactacttctgatcgaatgacttagaaaataaagcctatatcatgttttgtcttaaggaagactgagggagcaggaagtggcaatagggctagggggcaaaaaccttctacttcattcttaaggatactttactgcccctatccatgaaagcacagaatgaccagtaatatctgactcttctggggttctagaactcccaactgttttcctgtgtgctcacaagtgttttctcacgctgaagctactcatgtaaatcaatcccacttgcacagagatgtatatgatggggaggatttttttctttgtgagttatacttttagcccacatgtggctgcatatgaaatatcaatttttgccccacttttaccttgcatggcgagtcaggcctcttctctgtttacacaaggacagaagaaaagtttgaggaaggtaaaagggtcgctgggcccattatcccggccgtctacggttttctcttgccatttcctctcatccatcattgtcct

SEQ ID NO: 62776 - DNA, 2519 bp, Bovine  19866881362964
  misc_feature (1)..(1): n is a, c, g, or t
ntgggtaaaagaatcctcctgcaatgcaggggactcgggtttgatccctgggttgggaagagctcttggagaagggcatggcaacccactgcagtattcttgcctgggaaattccatggacagaggagcctggcgggttataatccatagggtcacaaagagttggacacaacttcagtgactaagcacacacacgcatggtaatatgagcatgttctcggacatctagtagcgtgtagcttttcttgcaggaaactggaaacatgtcaggatgcctttctgaactctggccttgctcctaactggagccatcacactggactctgagtggcattagcaccataccacttagaggtgagaaaatcaggaacctcagtgaagcttgagggaagagtgagtacatgctgggctctgagctgatgatggtaattaatagaagaaacagaatagacgtgtggcattggaggtagactcaatagagttccttggatgtcagcagatctgttgtagattttgaagctaatgtgtcagtctgatggatgtctagggcacagggggtgggaacttgctggaaggagccatgaaagcagtgtcatggatttagaatcaggaatactgagtctaaaactctgttttgatcatttttaactgtatgactgtcagcgagttttaaaattcccgatgctccatttcttctgtgtaaagtggggataataatagtgttaaatgctctgagtagggctacatgaattaatgacttgaaaaggccttgcctagtgagtagagggtctcgtacgaaagcacactaggataagaggaaacaacaaatgagaatgactacatagtttagcagaaaagattaggattttctcagctgtggcaatgttccactctgctttttggtgtatagttgttcagctaacattttgtgagcatttactgtgttatgaggcatcttttggagagttttatccgtgtgacttgttgattccttcttaatcttgtgaggtcgatactttactgtcctttcacaaatgagaactccgtggcctagtttagtgactgagcccaaatttgaacccacgtagtttgtctctagggcttccctggtggctcagatgataaagaatccgcctgcaatgtgggatacctgggttcgatccctcagttgggaagatcccctggagaagggaagggctaccactccagcattctagcttggagaattccatggagttccttcttaatcctacttgtagatgatgaagttactccatccacagcagggcagaaggaacaaaatgttacggagtgagggataatctaagtgaaaaagataagcttattttgacttagtcacacacatttttaaaaggattgacatcatcatttgttttacctttgacttgcaagttatttctttcaattttgagtaattctgatacggaaagtaaaagttgtagtgattgccaagctaatcttttctcctaaacgatgcagtcattctcattttgttccttccccttgttctagtgcgctttcatatgagaccctgaaattggatgtgtttattgtgtagaccacaaaggatccatagggaagatagaacagccttaaagagaggattaagcaagtcaagagccatacatggtaatccagctcttcaagaataggcatcatgggctttatgattggtttatgataaaaaaccttccctgtttcactcacaccatgctaaatgaatggttttcctggcaagtctcagaacagtttttcttcttctgttcttcttatttgttagaagagctggggcatttttctcaggtttattgacatctgcttacttttcagtaaatgtactctggcatcgttctgcaatgagagcttttggaaggaaacaagcacttgaatgaaggacaggtattttggtttccataataatttctttgttcagtttttctaaacaaactatttttgaattttaagtgcctgcgttgtggattatttaggtcagagatcatgagatttataaatcatcctagagttcgtagagcgacactccttcatccccgaattctctgtttcattgacctttcggtttagtagattgacttccttttttgataagagagtgagacttagaaggataattgatgagaagatgcagacatggctgttctttcttttcagaaaagacagggatctgtcttattattgctgctttattatggtagtaataattagtattgatagcagcaataacaaaaataattgcagagtgttgagaatgtcctgtgtgtcctatgaatgacttgttgttcagtcgctaagttgtgtccgactctttgtgacccaatggactgcagcacaccatgcctccctgtccctcaccatttcctggagttcacccaagtttattgaattggtgatgtcatccaaccatctcattctctgccgccctcttctccttttgccctcagtcttttctagcatcagggtcttttccagtaagttgtctg

SEQ ID NO: 62777 - DNA, 1750 bp, Bovine  19866881509314
  misc_feature (1)..(1): n is a, c, g, or t
nctgtttgataatgagcagagattggcagagaggtcactgtcaagagactccagtataaatatgagttgtcactagatggcgctgcttgtcgttattcatcaaagacaaggaactctttttctttcttttttttcctctccatggagtcctggcccagcctgtctgcaactgggatcctaatcatgccagaactcttctgtactgaagggaggttctattttcaacatattatcatcaagatctgaggaccaaacagactccacctacaatctgggggaattacctcaacagtgttgcctttatccagaggtgattttaaaaaaatatattgtatttggatgtcaacgttcaaaggctccgaggcagaaaattccatttcaaagaaagtgtgattaatgaagccacataaatcctatagatttatgtagaggctggagcagtttcagaaatcacaccatacaaatcaaagaagcgggtttttctacatcctctctcactttctcttattcttattttggcacatcttttcctttccttccctctttccctttcgaagtctcttgaatgcacatatcccaaattccaaaacaagagggaatttgatcggatatcctaagtacagccacttttaagctctaaccatcaccatttctcctcattcttcccccaagagatgcagagacagggttgaggccgtaacagttaactcacataactcagactgcttataaaattaagtcaattctggaactccatgtagtaagactcccagcttcagtaagggatcttacttaaagaaagccaaatttaaaaaataatgaaggtccttttctagaagaggtggtgggggaattctaaagatagctttgcatagaaatttgttaaaaaatctcctttagacatatctctgtatccttcatatttcacccacttatatcaacctctaactgtaccccttactttccttccttacttttatttatattcttaaaccattcactcttttatattcttctctactccgacgacatcctgttcggactccctatctctttcataaactctaacatgctgggagtcccctcagccccctgaaagtggtgtccttaggccagtctgactgtatctgctttcacaagtgagcctgtcgcctgggtaacaatgtagactgtagtactgtgttctctagttagggttgtggagtgtcgtctctaatggtgaagcacatgagcggtagagtcagattcctgtgttgaaattccacttctactcgttactttcaagatggccctgggcaagttagtaagcttctctgtgtctctgtgtgtgctgtgtgctcagtcctgtctgattctttgcagccccatggactgtagcctgccaggcttcactgtccatgggagttttccaggcaagaatgctggagtgggttgccatttcctactccagggggtcttctcaacccagagaatgtccgggttgtcttctgcactggcaggtggattctttaccactgcaccagctgggaagcccatccttaatagtctctccctcaaagggttgctgtgaggatcaaatgaactggtataagcagtttgaagagtgtctggttcagaaagagtacagtattcactttgttattatcataactgctaaattattactattattatatgccaggcacaatgataagtaaagaaggtaaaaagatggtgataaggaaagtaaagtgctcagtcatgtccaact

SEQ ID NO: 62778 - DNA, 1452 bp, Bovine  19866881691478
  misc_feature (1)..(1): n is a, c, g, or t
nttttacagtctaacccttggtggctgaaaataaacatatattcaaaagtatgtataaattcttagagctacaaattatatatatatattatatatataacccccaaaattatataacattgagtttttcagtgtgagtgattatcacttacctgaatacttcacacagcttttaaaagcaaaccctattgctattgtaactgtaaacagatcattgaagtttataaaatcatttgagaattaatctgaataaattccaggcacatttttaaaacaccaactgtatgttatatactaaactatcttgtgatggaattttaaacctttttacatagtaacacagtgctcttattttttctgaatttcaagaaattatcttctagtcaaataatcattttatagtgaaaaccatcttcccactaaaagcttgctgataacttgtgctatcaaaaataaaggaagctctaaatgattagcattactagacaaaactaaaatttacccttgagacaacctcagataaatgcagttataaatttaagaagattattatgcagctaactttgtatacatgtgtgtataaacataaatatacatgtatatagatatatttataaagtgctacaccataccagtttaaatatttatgcagagatcccatgctagaaaaacagaattaaatacaatatcttttcacagatttttgtgacagctttgaaatgagatacaatgcagaactctcacagcatgttttcaaatattgtttctcaactgaacattttctttaaatattacaagagagccccctactgaccaaaaatgttggcagtcagcagaatcaactcccacttttttttttgcttctgctgctgctgctgataagtcgcttcagtcgtgtccgactcttgtgtgaccccacagatggcagcctaccaggctcctctgtccctgggattctccaggcaagagcactggagtgggttgccatttccttctccaatgcatgaaaatgaaaagtgaaagtgaagtcactcagtcgtgtccgactcctagcgaccccatggactgtggcccatcaggctcctccatccatgggattttccaggcaagaagtactggaatgggttgccatttttgcttctagctagcatgtaatattaatccctatatctaacacagaacactgaaaaaaaggctgaaaggaagtgaaatgaggtataaggtatatgaaatgttactctttaattaaattggaagggaaatacaaacaatgagatgtatatggtttacattacaattagaaacaataacagctactatatttaaatttaagtactatctatatgtcttatactatactaaatgctttacctatactgcctcatttaataagaccactttagttcttttgtatatttgggtgcatgttaattttcagttttctgctcaaat

SEQ ID NO: 62779 - DNA, 1894 bp, Bovine  19866881741965
  misc_feature (1)..(1): n is a, c, g, or t
nttaacaagagtgtgctaaacttcatttaactattgcttaatgtgaaggggatcttcccctgccagggtaaccagaagtcaaattcctcagatgccggtgctaagagggacagtgaaaaccttctggccaactctctcacttgatggacagagaaaccgagtcaaggaggtgccagatcccccagctacttgcaggaaggagggctacccattttcttctctttggcttcagtgtctgcttcaatcactaagtagcacagagtgaaactctacatcagtacacaaagcaccagaagaaggtaatttcattaccaggtcactaaataatttagagcctaattttttttttttaatgcaaagaccgtatgttcagaaacctacagttcaaagtacattaagtaaaaccaagtacatatgcagatatgtcttctcccatatgcatcttaagaaaataccaaagaaaaaaataatttatcatcagcccctaggaaaagaaatctgaaattaaagaatggagtaaatctaaattgtatattttcagtccttctaaaaggattaaataacagaattctaaatggtttgtttgtactttccatgcaatatgtagattaagcatgaaattctgtttgggacactttgacatctgttttcagtgcattacaatgaaatctggggacttgatacatacatttgctgtaataaaactgtcactaatcagtgttttccaaaatattgcccataactattactattcagtagtctcatttgcatgatctaatattgttgctacatcatgtttttccctgacaatgtgttagctggtcccaggcacatggtctgaaatggctacaaaccactcaataattccagcacttccacagtactctgtacacacgcctgcaatctgccccagaattgaactaatactgcatccttcatgaaatcttttcccagtaactgcaacacccaaggctgaattcacatccctgggtgtgaaagactccataacaaaaagagaacccacatcgaggaggaaattatacctcctgagacctccacaacagaagatgtaaacacaatcctaattcataagtcctttagccaatccgtaataatgctgtttgaatactaagtacagagtctgtccttgacttaaaccatttctatgaaacacagaacaagattggaccagactttaaaatcaagtctgcttcactttctccagagttaataaacagctgtatcaatgcagagaccaagcaagacacaccaactcacaaagagttaacgtatctcctggatattaggttgaacaaatgcttccatttcatgttgtacatatctggtgtgtcatgtacaaagcttggaactcagagggaaagtgattctgagagcccaaaaaaggtcttcaccaaaaaaacaaaaaattaatcatgctaacttgaaatgaattccatattttatcagtacttagaatcatattcatcttccttcacagttcaatataatttcattttgccctcctatgaactcattttaaagtcaaaatatatttctctatacacatgttttgtattatacaaatgttggatacaaaaagcagattaattgtaggccctaatactgtgttgttagtactaagaagtcattccaaatgttctaaaagggattaatgtagtctaacaagtctatttaattattgtaagaccactgatcctcatattactataagcagcttttcctttacttggacactgtaaatagaacagacactgttacatgataactatacatctaaccaaaaatactaatgctttaccatcaggaaatttaaagaaacatgttagcatctccaggaggctaaaaaaaggcaaccaatatttaagaatcatat

SEQ ID NO: 62780 - DNA, 1120 bp, Bovine  19866881788283
  misc_feature (1)..(1): n is a, c, g, or t
nttggtgatggacagggaggcctggcgtgctgtggttcatggggtcgcaaagagtcggacacaactgagggactgaactgaactgagaaaagataaaatgtgacattcctatactctcaaagaagggaaagttacatgataaatattttagcaagtagccaatatctagccttttaaagaaaagtttctgttccctaaaatttacttatatgaaactcttcattgcctaatggcatacaaataaattaataataatacttttcatattaaagataataatagttgccatttattaactgcctactattcatgaagctagacatgaaccaccaaaccttacaacagctccagaattaagtattaatatccctgatttacaagtggagcaattgaggtttggcaagactctctttcagttccacccagctgtttagcagtgaaattggtactcagacctatctcttttccattcgaagaattacaccccttccactgagccacacttgccatattttttttctcactcggggagaaataggttttgcaggcgctcacatggcttatttgcaaaacacacattaatattttctgtaaagcaagcagacatagacctgagctatatctgtgaaagttgtctgcgtgaaatacaggctctcccatctgtcaatatcagagtgatgagcagaggccccagtgtgaaagctgagaaataaaaatgttgtttctaacatcatttgctggtgtgctctttctgtaagtcctcccactctgcctctagtagtttttaatatcccgaagtttcttaagagtgaatcacatttttaaagagtgcagagttcttggccatgcctccaggagagacagcacctggtgaataacccacaaacatccttcttgaggccagctctttgcctcatcaatctataacatatttgttctggtttcagatgttccttatcaccaaaatttgatttcattctacagaccttcatcatagccccactctgtcttatttctaattcataccaaatccttccagttggttcaagtatttaatatccacccataggccatatttcaaaaattatatatatgacagaaaaattcagagcttcccaca

SEQ ID NO: 62781 - DNA, 958 bp, Bovine  19866881996039
  misc_feature (1)..(1): n is a, c, g, or t
nccatttcctgtgtcttttccttgagtaaataatgcacaagatggtcactgcctgattgcagtatcacaatgtgttttatttttatttgaattttcacttattgattttgtttcccttgcacatgaataatgcatcctttttcagaaagcacccaaattcacattatttggcacactaagtaaaaagtcctttctttttgagcagtaacaaatacaaattatgtagtcaatgtgtttttaaattggttaaatatgtatttacatgctaaactgaggcattattggagtcatttgtatagcaagtgtggtttaaattgtccaaatatctgttcatcaaaataaaataactttaaaagaggctgttgtggttcatttgggggaaatagcatatttgaatatggatgtgaacagcattccctgtagtaactaggaggtggccgtaacagttgcggtaaacaacgcaggcccttaaggctttgccaggcttgagtaatgcattgtagcactcttcccaagtgttccttgttttgtgttcttccatacagtcaaaaaacaactcaaataatgtccaaactggccattcccaattcaccttcccaagaactgtgaattgcctgtgggcgggttcctgcacatgtgaattagtgaaggaagctgacactaccccagaggcagggcacggggctgagaggcagaggggtgagcatccaccctcctgccccactgccttcagaatggggcaaaggtatgatgacttcctgcttactatgcctttggccatggcactgtattggcagggatttgtctgaaatgaagaaacaggcgctatttctaatacaggtaaagaaactcagcaaaaataagacatatgaactaagaatttattcagttcagtgaccaaaaaaagtcttacttgtgggagaaatgagtcatctcctaaagcatggtgtttccggaa

SEQ ID NO: 62782 - DNA, 1653 bp, Bovine  19866880860112
  misc_feature (1)..(1): n is a, c, g, or t
naatgatagttattgtatgtatatagcacattttaatgaaatttcttagaccaaacagtagtaaatgctagagcagaggtatgaactcttccaaacacacaaaggagaagcaattaactcccagtagtcagaaatttattaatgtggcataaattccagcttattactcaacttcgtgtgtgcctgcttcattagatcatctttgtgcatttttattaaaactcttagtcctactggcaactgagacttattcatttttatcatcttcctgttgttgttcagtcaccaagtcgtgtctgactctttgagaccccaaggactgcagcacaccaggcttccttgtccctcattatcttctggaacctgaccaagttcatgtccattgaatcagtgatatcatccaaacatctcatcctctgttgccttcttctctgacttcgatctttcctgcatcaggggcttttccaatgaatcagctgttcacatcaggtgaccaaagtatggcagcttcagcctattcagtgttgtttcctttaaaattgactggtttgatctccttgttttccaagggacgctcaagactcttcttcaacaccacagtttgtaagcatcagctcttcagtgctctgccttctttattgtccagctctcacaaccagacatgacactggaaagaccatagccttgactatatggaccttacaaatgtttgtagaaatgactggatggatgagtggatgctgctgctgctgctaagttgcttcagtcgtgtccgactctgtgcgaccccaaggacagcagcccaccaaaccccttcatccctgggagtctccaggcaaaaatactggagtgggttgccatttcccttcttcaatgcatgaaagtgaaaagtgaaagtgaagtcgctcagtcgtgtcggactcctagcgaccccatggactgcagcctgccaggctcctccatccatgggattttccaggcaagagtactggagtggggtgccattgccttctccggatgaatgatacctgagatgaatcataataaaaatggggatggtgatgataataatattacataccccaaagcatttttctgaggatttattggattaatacataaaatacttagctcagtgctgtagtccagcagatggccagtgtgtggttaataagaatggtataattctctctcttgactatcacatattgtcttcacttggatttgctctccaaatcgaaggcaaatatgaaatcatcactcattggctctatagaggtgcttctcttcagttacaagagacaaaaaccaatctcttttttttcccctgacaacttctgatttaaaacaatggaagaaaagttaaatggttgcgatattagtgcttcgggaacttgactgggaagctgtttctatatagccttttatttatgtgcacctgctcccaaactgcagcttgaaatgacacatctgccaagattttagatcctcatctcacgttgctttatcctgacacactcgccagcctaagtcttccgttctgtacagcaggacatttcttaatatcatcattgacattatcctaactgcatcctcataaacataatgataatttttctgtcaagaatattttcccttatcctaaatgttaag

SEQ ID NO: 62783 - DNA, 1263 bp, Bovine  19866881100552
  misc_feature (1)..(1): n is a, c, g, or t
nctttatttttatagttctgtaaggaaagggaaagatatgacccagattttcttggggagagaagttttagaggcaaactttctgtgatatgcaaaataaatgaactcaacaaactgcagtgcagtgggagatctcctttcatgctgtaaactcatttgtcaaaataatagatgctatgtctacatggatgacctgtatggcttctcattaacttggtttgattagacagctaaactattgagtcgaatctgaggaagactgtacataaaagtgggggctaaatgttgaatgcatatggagaggccagaactgaagggtaagaatgtaaattcatttttcaagtaatttatatatatacagaaccacagaagagatcaaaattgtctttgggcatctttgtactacattaacaaccacttatctgtgtacatggataaactgttaaaacattggccagagcaatgtatttaataacactgttaggagttgctcataacggctgatcgtatctgtttaataatcttggttatttttaggaacaaacttaataagtgttgattgtcataaagcattagggatacaatcatatatgtatgctttcaaatacttgttctaattatcgactctgacttgaattgcatcttctttttggcaaatggcagttggattcattgtagaggatactcagcatctttaacttgttaaaaatgatgacaatgggcctgttttcattttgtctctgttggttgccatagtatcctaggatacgatgacttgtagtttccatgggcacaccactggctagggctgaaatgctgtctatcatgatgcaagggcaactctgggagtatacagtctgcctaaaaccacattattgaaagtttcaaaatgtaagcattagggggaaaaaaaaaaaaacagggactctttttgccccagaaaggcgtaatattaaagaaacagctgctaattggagacaagtagaaacaacgccaaaattcatagagaaagctaagaaggagctggacaaagaaggaaggggacacagataaagagattcaggaactgagagaaaaacattacatacataattaaataatgtggatcatattaaatagaatttaaaaatttttattggctgtgctttagcagtaaatcttagcagcattaacagcactgaatatatatatctttttgctttatatgtactctagcttttgatacctttttacctcttttttcagtgtcaattaaaagaaaaa

SEQ ID NO: 62784 - DNA, 879 bp, Bovine  19866880417839
  misc_feature (1)..(1): n is a, c, g, or t
nctacgtcgagcctttccaacttggacaatcacctctggttgctgtcctctgggtggaactgacaaaatcaaggcaaactaagaggttgaaagcccggagatgggctctgttttgctttgttttcatagcttagagacctctggagcctgggggatgagccactgagcagtgagagaacaacatgtttcatctttgtgtggtgtttggggccaaattacctgacccagaagcaagagaactggaagggataaagctgcagcgtcaaattgcctcccccagcctcccagagctccggtcctcctgcatcggagacagaggggaaccctgcgccagttaagccaccgagagctgcaggctgtgctccagctgggaggtgggtcaccagcaaaagggctcagagagagattatctcccagctctctcctcacaagcctaccctgggggcacggctgctttgtttcgaggtaaaacacgactgtgtctcttcagggtggcaggaagagggaagggatttacagggattccatcaagctagtgacttatgatgtcagttacaatctgagggtggaaacaggcacaacggttgaatgatcacaagtttgaggaagtgctgaccaccgaccactgtgagcgggagatcccacgccagggttcacaatgtcacaatgcccggacaaaaattgcctgctactgcatgtgcggtgtatcagaaccttgtccaggtgtcgacatcaaaaaaataaagcgcttcctgcttgtacatattttttctgctttaacatttcactctcccatccatgctgcaagggaagctaatttctactttgtatgctctagaaattaaccaatagatgcatgcacatccattatcccatctt

SEQ ID NO: 62785 - DNA, 998 bp, Bovine  19866880492827
  misc_feature (1)..(1): n is a, c, g, or t
ncatttatggctcatactgtaaggcaaatgtaggtattaaaattgttccttttaaatgataaacacccgctgaaatggagcaatagagctgcatcaaaaactattttcacccaaaactaactgactcaggaaaggcagtaaatagtgaatttgactacaatccccataactgctgttgatataaggagtggggagggatggggcgctggagagaaattagcacatggagaccatatttgtgtagacgacattcaccaccttgcctgcccagccttctgcaaggtgtgacaggtagagtttcaccccaaaagggacactggctacttgttttctcccctggtttttgatagcgaggcctccattttactgtgcatatcacaatcgttacagtttttatttggagagggaagtaatggaaaaaatagttaatcgcccattcataatctcttaaacattatttttaagctgatagttgcaaaacaaaatgcaatctttctaacatcttcaaacaattacttgtcattttccccgtttccataataaaagaaaatgggaggggggcaaactctgattctgactttgggaaagatgaaggacaaagtaaattctgcccagagtttattccatcaaaaaagaaggccgtaccaagcaaggacaagtggtgggaactgggggcagagcctctcctggtctaccctactcatcctaaagataatgtaaagtgggtctaattacctgagccttgttaagcaaacttatttctgcccatcccctggaggaaatgtagggacgtgcccaccttcctcctctgccccaagagactcaataaatgaggagtcacagccaggagtcaatttaactcctcagagcatcataatgagagcctaactcataatggatggatggatggaaggatgaacttccatgccaagacaaggcttctcaaattctcagcgtgaaaggaccacttttcatttgcaatcaatgcatcctctaat

SEQ ID NO: 62786 - DNA, 1411 bp, Bovine  19866880494875
  misc_feature (1)..(1): n is a, c, g, or t
nccaggtcactaatggccaggggataccaagctggcagggagggatggcggtctttatattatcctggaacctctgggagatggtgtggttgaaactgtggggcactcctgcggcaggataggagttggtaacagagaggagcccaggtagctcagtggtaaagaggccacctgccagtgtaggagatgcaggagactctggtctgatccctgcgttgggaagatcccctggagaagggaatggcaactcactccagtattcttgcctggggaatcccatggatggaggacgcagaaggagatgcaagaccaagcagtcacttagagggctctccattcactggccaagagctcaggttgtggcagtgaggatgaagataagggcacagattcaagtggaactgaagaggaagaacagacaagactgggctaccgattggaaaagagggtgaaggaaagcctcccccctttgctgggaggaacctgggtgaacgctggtgccattgactgaggctggagtaaaggaggaggaggtggtttggggagaaggatgaggagtttaatttcactgttggctgggtgtgaagtacccaggggcgtccagagcatatgtgtcaggagctcctgagagcgaccagggctggagatgacaggacgagaggcattggctgacagatgctcactgaagttttgggagagaatgagactatcgggggaaatcttctggtaagaagagaagaagttcgagagggaccctggaggaaaaccattcatttaaagagcaggaattaatgacaacctgttagagataaaatgagaactgaaaacatttacaatagcagcaaaaaaaaggtttaaaaatcctaggaataaacgtaagaagaaatgtgcaaaatctaagtggagaaagcattaaaatgcttccaagggacagaaaagcctttgaatacaggttttagataggaaaattcacatcataaaattgtccattctccctcagataatttagaatttaataggattctccataaaaacaaagactttgttgttttttagactgattctcaagttcatatggaagaataaacaaatgttgaaaagacagttctccatgggcttctcatgttttgagtgagcagaagcagtaactaccttttccccagactccctttagggatgttcgtgtagtgaactcccttggaaaatagaggtaatgactccctctggagaactttgtttattggtcagtataataaacatgaagtcttcttctggagcaaaacccaggcaggcttactgtccattataaaaatttaggttccctaaactcaagatggaattccagctgagctatttaaaatccccaaatatgatgctgttaaagtgctgcactcaatatgttagcaaattt

SEQ ID NO: 62787 - DNA, 1738 bp, Bovine  19866880508976
  misc_feature (1)..(1): n is a, c, g, or t
natctgcacgtagggagtctttcctctgtgggccactgttcccagtcatggccatggggggaagtcctgtatgggcctttccctgctgcagccagcaagaggcatctttccctccagtgggcttttccttggtcagtcacatgactctgcccacttataaggagtccaggaaatgtgggggagcagatggcccatctggggagcattgctacctctctggctttcataactgtgggctgatctagtcgggaccttagggtgctgtcctcaggccctggtgctggcctgagtcctgcaggcaacccctcttcccgttgccagaactcagttttccaatcagcaatcaaagttattaattaaccaccctggctacagatggaggagagaaccaccctccatggttccctaacatgtgcccccaggggtctgaggcatttgaaaccacagttgggaaagaccccaaagaatacggaaacgtgtgaaacagagagatctgtccaggaagccagggccccttttccaatgtttggccctagatccctctgaagcaaaatacgagtaagaagggaggccacatttctgttcctatttcaccccagtctgggatgctgacaaaatcgccccacttttaatagtgcctggggtgggaggaaaggcctggtctgtggccacagagagaacttttgtctccaggggtgtctgacctgcctccatcctgaggattactgtaactttttaattagggcgaagtttgtagggagtgtgctcttttgatgtggcagctgtagctggaaaacaggcctacatttaagactttactgcctgccgatggctcagcagcctgccacccacatatcagagtctacaccccataaacagtccggatcgtgtttctttagagcaagctgtgtgagaggggtctgggaccaccatgacgtggaaggaccacctttgctgatagtcttatgggacctggaccacccgaggggcccccctcccaagtgggggtggtgctctgaggtagcagaggagtggataaggtgacctctaaggacacatgacaaagtgttcattcttgaccttgatgttccacaatacccagacaagaaccaagtgagagccagaactatcctcagcatcagactcatcagagcacatgcttctgggcctgctgaatggggggagggaaggggactccttcaggcatctttgtatcccagagtcccacacacagtaggctgatgaacacagctacaactgtatctttgggagagtgatggatagagtgtattttgagcatgctgttctattatgggcaacaccccttcaggagcccctactatgtactagacatttgttctaggcaccgacgattcatcagcaaacagtaaccctgcccaattagatctcctgctctgcgaatgtgaagttaatgacaagcactgggatgtatgctggatcacatggttaaccaggggcagacctaacacaaggactggggtttgctagctcccatgggagcagggcttctcaagccttcccgctgaggagctccccatggaggcagagcccaaagcagccaaatatggatgtgacatttctttgactttccaatgctttactttaaaagtttatacagatgctgaagtctgtgccatttcacatctatgtttgttttactataaagtaatggtgtaggttacctagtgtatatatatatatatatacatatatatat

SEQ ID NO: 62788 - DNA, 2767 bp, Bovine  19866880515434
  misc_feature (1)..(1): n is a, c, g, or t
ncaggagacaggagttcagtccctgggttggaaagatctcctggaggaagaaatagcaacccactccagtattcttgctgggatcatcccgtggccagagaagtctggcaggctacagtccatgcaattgcagagtcagacacaattgaattgagcacataaacatactctcaggctccaaacctttgtatttcctgacactgggttccagaggtggccttaaagggtggagcagaaggataatctcccttctggtccagggagggctcctccaaggacagagactcaggtgaggagctaggagaggaggaagatgttcagtgggaggcagggcaccccgcaatccagaggcaggaatgtgcttggtgtgaggtgaggaggaccacagaggagccagagcaggtggtgacggggacagggagcctggccgaaggtggcctggtggctgctcttcctgggcagctggagaaggcactggccctgagcccagagcagggagtgaagaaggaagtcagccactggctctctgcctgtgccttgatcctcaccgtggagcccagcattcccattttgaaacccgtggagcggtagttggcattaaaaaaaaaatgtaaatctgacagaagactctctcgtcagggtatttctcctttacaagagtttaagagactagaggggtcagagcgactctcgcttcccgctgagctgtgtctgtgaagctttgagcgcagaggaccaagggcacagggccggatgttcagagaggcccgaaatgaaagggaggatcagagaggacgtgccagctgccccagcctggccggccgcgcttcgtgggccccgagggatggaggaggcttcattcggggaaaccaagggctctggcacggcccacgaacaaagtcaggcctggaaaagcaagttaaaatctcactaccctcagagggggagggtctcacctctcttctcctggacacctgcccagctctgtcattcaaagatgcttcaggaggagcctcacagacccggaaagcaggacttccatgccctgcccctccccttgcccccaggaaactgccctaatcagaaagtccagaaatctgctccccttgtctaatgttagggcacttcaactaatactgagtgaggccttctcggaccaggctctctattaaggatggaagttccaagatgcaggatacaccgcacctgccctctggctcccaaacggtgggggcagagggcggggggagggatgggggaggcacagaaactgttgtaccacaaagtgattgtaccttgatggaaggatatctaaagttttgaatgcccagaggagggaccctaacctatcccgggagagtagtcagggaaggcttcctggaggaagacggcatacctgaagtgagcccttcctgagcaaaggagggagagtggcattccaggcaaaaacacatacacaataacagcagcagcaactctgaataaaagacttagttttcttttcctggttaagagaaagagagttttcagagtttcttagagagtacaaactctttaatccctaggtaaggaaattgaagctcagagaggtagagctttgcactcaatgtcacacagcaagctggggtgggatggaggttcagaggctccccagggtcccaggccgtgtcctctatgccatctcttgctgtgacttgagctgtgctttccccagacagggataccacctggaaagtagagagaaagcttctgcagggagcagaggtgtctggagcaaaggaactcaagggagccaggcagtcctgctcggtccccagggaccatatctgacgagtaagacatagggaggcggcacagaagcaagtcacaacatcaaggagcttcacagcaaagaggagactgttgtttcaacatcactggccattcgctggccctctccttcagagccacccctggaggagagaagggcattgccaactcccctggaaaaaccctagcacacctccattcttaaaatctggctgctgagccagcctccgaggtgggagggagattggtgagggcaaatgggatttcaggaccaggaaatcccacttatatattggcagtgggtcttgggagaagtgataaccacagcaacaaacataacaaccatagtaacagctcacactcagcccttaggagaagccaccttcagacagcttctacaggtcagctcacatgaccgccataacaacctgtcaggcaggcgtcattagcatccccattgcacagatgagggcactgaggctcagagacacaaggtcacttgccccaggccacagaggtcaggagtgccagagctgggaattgaaccttctttgaggctcagttctcttttcatgaagagtggggctgatcacctcctggggaagcaaggggcctagaccaccggtctaaggggaaatgaagtgggagagagacacgcaagggccacagagagcaagggcaagtcccctggagtggtgggagatagcagataggagccagcagaaggagggcctgcactttagggcacgaggccctcagggggcacccagagggaaaagcctctagtccagagagattctgagaagcaaggcaggccaggagaactgagccgtgaagcgtgagcaggtgggactcaatgcccaggggttgaaggacattcaggcaaaaggcacagtgcatgcaaaggcttggagacagagtgttccagcagcgctaaatgctttcatctttggagcac

SEQ ID NO: 62789 - DNA, 1413 bp, Bovine  19866880533346
  misc_feature (1)..(1): n is a, c, g, or t
ncaggccttggcctaaactccaatataatttggtgagctgtacctcttgacttgggctattaaatcattttccctccaaaggtacacatgttgtggcataaggagcaaactgttgacagatggtggagaaacttcgcaggcccataattgagacttattttcatacattcgtgccagtttgaaatctaattgccaataaaacaatactgtgatactgccacatctaatacctctgccactctccaaagttacacttgaatccactagtaaattctaatctcccagagaaaaatatttccccctcttcatcagaaaagcagtgctataaatccatgtacagtggttcattttcaaacgcgagcctactctccccggtccccaaagagccctcactcggctaatgttagtgcctgcctgagagctgtagatattctttgtttacttgacagagcacagatgtggtttggcgcagcagcaacgagatcttttgctgagaaacgctctgatgggccagtttctccccatcttagaatgacccagtaccactctttagagaccttttacccccgttaaggtaacgtggctagagacccagcaccacccactgagcagggtgagatggaggagccctgacctctcctccccaattttccattttcaaccctcctgatgaaaaggtttgcagacagatcaacccagatcaatcagggctgtaaacaaaaaagaggcttttggtgcaatgaagacatgcaggggcagggttcatttgtatctactgaaaacgcaatctgtcaccccaaaccacaagcctgctaacagtagtaccagccatccttcacatgccagagctctgcctagtttacaaagaaatcctcactgcggacggaatctatgccatgtctgagcccagggaaggtgtggtaaatacagtgattattgtccttgcctacgtggtcttcacattagccctggggatgtgggctgttatttttcccattttagagacaataaactgaggttcagagtggctaagaaatttttccttgaggttgcacagtgattagtgatgatgaaatctcaactcagattatctgggttaactccaagtccagttctttcgttatgaggattaactgaaattaactatggaagcttaaaaaagttcacttccctttctcccaccccagccccacctccacctgtggtctcagttcttccacctgatctttcccactttccacatatgggcccttaaatgtttgaaaattatcatagtctcctgaagtttccttttcccatgtgaaacatggtttcttggcttcttcatatattccccaagtcatcacctgacatctagatcactatttctcaagtgagcacatgaatcatgcagagaatttgctgaagtgcaaa

SEQ ID NO: 62790 - DNA, 3431 bp, Bovine  19866880552920
  misc_feature (1)..(1): n is a, c, g, or t
ncctttatcttctgggtgacagcctgtagaaacttcaaaagaaacagtaatgctggcatctaacggcttttgttaattactatatcccaaagaaaatgaaataaaggaggaagaaaaatgatatttctctgtgacaactttgtaaaaatatcaatgatgaagcggcacagtttaagggctttaactattcatgcaggcgcggcgggcctccacccacccgtgcggggtctggaggatgtctgaggatggccggggcccaggcttcttcacaggctgcccgcgctgtccacgctgctctcatggcccctcacacagccctccctctctctctttcacatgcacacacaagcaccccatcccctccaccctcatacacactaacgcacagcacacactccacacatccccctatagcaccgtcccaaatattcatactcaatccccaatacacagccctcaaattcacccccattcacagcctcacatccacactctttcacagccgcctgtacatgcacaccctcctgtacacatgtctcacacacacacaggcaagcgttccttccttcatctgattgttcagagccctctcacaccccacactgtgccaggtgggctctgcaccaggtgctgggaagcaggtgtgcaagagctctgctctgggcagcagggaagacaggccggcagaccatagtctgtcctctctttgtgctcacgccacactgctgacgtcccaagtgaggtgagtgagtggggacagtgtggtggagggtgtaagagctcaggctctggggctggaccagctggttagaatcctggtactctcgtgttagagctgtgtgaccccaggcaagtcatgcaacctctctgtgctgcagtgtcctcgcctgtaagctgaggataagaataggacatcctgttcagggcctggtgagaactctatgcagtaacacaggtaaagtgtcccccaagtgctttaagggtcatttagggtcaggcagggcagctgactctgcctgtggggagtggcctggcatttaggggaggcttcacggaggaggtgatatttgagtgtggggccttgcggcttggaagaaaagagggagcacacagcccgggcacagaagacaacacgggaagaggtttggaggtatggtggggcacgtatgtcccttggatgctgcacgtttggtgtgactggagggtagcgtgaagcttgggtgggagaatattctggaaaggtaggtcctgatggtgacagactctgtgtttcattctcaaggggtgggtttccctgtagaagctgacgctgcagctgagtcatgttgtcagaacagatgaaggccggggacaagcaggatgcaggtgggcctgccagggtgggcttgagggtaggggcaccagagaggaggctgtgacagagctaacaattcagcctcccaccacacacacatgcacttccacacactcacacgcaaaccctcactcatatacagtcacacgtgaacacacctgctcacacgcttagttacacatacatatacacaatcttttattcgtctctcaaatcaaatcaaatcatgttaggtccaattccaaatctctgcagtggctcttgactccttaattacctggcagtgcactggcagaggtgtgactacggcagaaactgccaaatagacctccaagggccctgctctgtgatgtgtgctcctgtgtggtctggagggggcacctttggggcagagggatgggctggtcatggccctggggggtggggtcgggtgacctggcatctggtttggccttagtctctgcagctataaaatgggagagttgaacatcttctccaaggacccatctggcgatgttatcctggcatcttcttgagggtaaaccaacactttggagcactagagaggtgcacacgaggagcagcagactcatttcaagaaaaaaagagggaacatttttgaaggaaagcctagtgagtgttaagcccaatgccaggagcctcgggggatttaaacctgagtcagagagaaacaagggcttcccaggtggccctggtggtgaagaacctgctgccagtgctggagacttaatagacacgggtttgattcctgggttgggaagaccctctggagaaggtaatggtaacccactctggtattcttgcctggagaatcccatggacagaggagcctggcgggctacagtccatagggtcacacagaatcagacacggctaagccacagagcatgcacacacagagacagaccaggaagctggcatcctgcttgctcctgaccccggctcccctgggagagtagggggccctggaggacagacattgtctcagaagagatgctggcatctccaggcaccgggcagggaggaggcggccttctgtttggggaggtggcagtgaggactggccagtcttttggtggggaagggacatagcccgaacccaaagggaggcttaggatgggcagagggtgggtctcacagtcacagagaaacaaaggccttggagtggatatttggaagcctctatcttggttttcttcccactccagtactcttgcctggaaaatcccatggacggaggagcctggtaggctgcagtccatggggtcactaagagttggacacgactgaacgacttcactttcacgcattggagaaagaaatggcaacccactccagtgttcttgcctggagaatcctagggatgggggagcctggtgggctgccgtctatggggtcacacagagtcagacacacgactgaagtgacttagcagcagcagcagcagcagcagcagtatcttggttttcttgagcttctagaaacagagactcatcccaagtggcctcagtggaagtagggaggtccaggaagtctcacggttgtctccagggcccagggaggtacaggcagtgggccatcaggagcagctagaccaacactggccgctctcaagccaaggctcacctctggatggttctagaggagtcccatctgtcacctctggttttctcttcacaactctttgctctccttctttcccaatgctggaagtggtgcccacctcaacttgctacgtcctagactgagtggggctcagaggagggggtacccttgtttctctccagcagccacctctccctcactctggccttgagggctggcagaaggcagcactcccatcgggaggccacgggggccaggacaggtggaatccatggtgttttaggaaggctggtctgttctagaaccataagcaggctggccaggagtgggaatgcaaggaggatttcccagacctgtgagaaggagaacagaccctgttccctggggcctgatgtggtccctggggaagtcctgttgtgaagagctcctcacctctgaggagcagcagggg

SEQ ID NO: 62791 - DNA, 1611 bp, Bovine  19866880636223
  misc_feature (1)..(1): n is a, c, g, or t
ntgtctgaaggtagtccctctcccatctctgcaccccatctctggcccggagctaagggaaatactgtctccctccaggcttctctgaccctttcctgacccagcacaaaggccccatctgctaagaagccctcctatcccacccctttcacctatgtgtaggtctccatcctgggcctctgcagctccaagtgttgcctcctgcatggccctcctttccacctggaaacacggaccatggttacttggtccttgggggttctcccttcactgttgccattaaaagtgatgtttgaggaagaccaaattcttcaggctggcattcaaggccctctctactcctgcactctgcaaatgctgacctcattttggtaacctccccgggctccattttccctgcacacacaagagcctttgtccaaaccgtgttccccccagcccccacccagagaccaggagaatggggtggattctgaaatacaggatattctggccagagctgccctggggacaggccatgaaagagagtcctgaggccaaggcagaggggtcaggttactggagagataatctgattatatctagtcaagggaggagggggatggggtttggggggaaagccttgagcctagaaaattggagaaagagacaaccaggatgctgaagtcagaagtaggagcagataaacaagaggatagaacaaaacgcagaggaataaacagtcctaggttccagccccagctccaccacttacctccacctgccaactgggtgaccgcatccagttcacctaacctcgctaaggcctagtgtcttattctaaagtcaggctaacctgtctgatgacccaggtttgctggggtgattcctggagaaaccacagggaaaggagatcaggggctctcctaagtttccttgtccccctctccatgcacagagcccttcaaagcggccccactccaccctgggggctagcaagtacccccacagcactgctggcagctggcctgtcaacctgagcgagaatctgcccccagggaggctcctaatttaatcagcttcacaaatcagctcgatgggcttaattgatctttttcactcctaatattgtcgctgtcactttctgagctgtgcctcctccagccaccccatgcatcgtgctcagccagctggagaggcagaggaaacacggagaaaacagccaggaggcccatggaagggagctggcacatgggaaggtgagaaggttggggtagtggggagggtcaggacagacaccccgagccagacctcatggaccgcacagcacccacagtggccacgatgggagtgcagagtggaggggctcctagtgagtcatcaaccaaagcctcaggaaagccactctgaacctcagtttcctcttctgtacagatcacagcaaagctctgcccttcacgatctgttcattcgctaggttcttgtggaaacctccatatcccaggcacatgctgggtgtaaggaaggaggacaagccaaaatgaacctgttccggcccttgtggggtgctccaggcaggcagacttcctgcaggtgactcccgccgtggagcacatagactaggaggggcaa

SEQ ID NO: 62792 - DNA, 455 bp, Bovine  19866880650285
  misc_feature (1)..(1): n is a, c, g, or t
ntctcctaaacctctctcctgcccgcagtccttagtgggacattgagacactagcatctttccactcacatcccccaccccctgacaaagagttctgggagacttttaaaacagggtatctcaggtagtctggaaagagactgaacagcctgagatgtgcaggggagctgggcatgcacggtgctgtaacctcataccccagacaagtccatagggattagtgtcacactaatgaacactagaggaattaagcgtgatttgtcgctggttgtaaaatgcttccggtcatcatcaattcatcacagccattcaccagaagcagcaacgtagagagcctgtgagatgctgctggaaagagccaggctccctactagctagatctaggctttcatcccagggggcagcagagctgggacagaggcccaggctgatgggggccatcagactcttcagag

SEQ ID NO: 62793 - DNA, 4119 bp, Bovine  19866880657631
  misc_feature (1)..(1): n is a, c, g, or t
ngagcctgaggactttggactcttggtccattgagcgaattttcacccaagccacgccggcagaagaaccccctggactcctctgtgcagcccactgctccctttccacacagtaccccacctagttcttcagacagtcagactctctttactgccccagcaacctccccaccgtgtgctcagatacccccacgtatacacagccactgccgagtgtaaattttaaaggaggacatcgcacagtcctttatctaattcatcagctcctccttcgtctatcttcacctcctcccctaaacagcccatctttcagtgcagcccgcctcctctctgttcctccaggtcgacacaacgctttcatgtccacacccttttgcgtgtgttggtctctacctgcgactgtttctccttatctgaaaacctcccccttaaagttcaacctccagctcagcagtcattcggcgggggaacggcctcaatcaagccttcttatgacaattcacccccttttccagcaggaccccaccctctccctctctgccggctacgtacacatcttgaagcccccattacgtagggtgagagcgacgttctgcccacctgcctgcccttcttgtggaccccttggaggatgaagactctggcttcctaatatttggcccaccaaggccggtcacagctcctggctcctgtcaaaggtcatatgccacagtaaaacctttctaagtccccctctcacacagggcgtgttcactcacttgtcctccctgggaagggaagataagtttatatgccattgaacagagagagagccaagctcagaaggataatcattctgtccaaacccccagagttccagcagttttgagcttggtcttcctgaacccagactctcccacagtcctgcagctcttaggagtgagtccaagttcatggactagagggtagaaatttcgagctttgtcttagacaacaggcccgggactagagggaggtgggagaggctcaaaatttaatcaggcacttattctcaggtactgcattgatccccaaagatgagagactccctaagttttctgccctcggcaggcaccttgctcacctccccctgctctctggcctgcccgggactcccgtcagctgtatcagatttcaggattggctgtgggtttgctgatttgtgcaatgaggctctctgagcgccagctctgtgccaggcactggaggcagaggggaggaaggagctgcagagaaacggacatgaagtctgctcctgatggggaggtcggtcgggaggagggagggggctcctgacacaggaactagcttcctagatgggaaggcacaacagccagactgcaagggctgttctgggagcccggttctggtgagatggctggaaacagatcagaaggtagcctggcacctgcagtgtggccaggcccacgcatcggcattgcatccagaggacacagttggtacctctgaagccatgaggctggatgtcccggatggagggctctggctaagggcagacggtgccagcaagtcacgtctcaagcaccagctattttcaaaaccgtcaccctcacctcagtcgggctccgtccttcagagtgagaagcggccttggagggcctgtgctcatctcctctagttttttaaacaagttcagtcagccatgcaccttgttctcctgctgagattccgtggaacatgccaggaggtggcagaggttcctgcccagcactactgcttgtactggagcagggcacgatcgggctttgtaaggccacggctggaaaaaccatcacgatggggtcgggggggacaggtttggctgagatttcccccttcacatacttctgctccatcctctgctgtgacccataaattcatcgagatgaagtcattccccagtcgtggctgtaaaaagtcagcctcatagctagagagtttgcagccgagttagattataaaataaaaccagggatttctggaggaggagggtcaaacccacagggccctgggggaagggagaatgctgttctgttctttttaacaaggaccagcaggttttcaactttgaaagattcctcgccccattgccccatgtgcccccaactccgttttgtacggggtcattcctgcaaccgtcacggtgcttccaaatgaaaccaaaataaagaatttaaaaaccagcctgaaagttctctctggcctgctgcatttgaaacaggcctcattgctctcaagtcgtctgaaatgtgaccagaatctgaggtctaagagatgccccagacccagccatcagctagggagagtcagagcagaatttgaacccagatctatgttaatccaaagacaggtttctcacttgcatccaagttctgaaatttctgtagcactgtggaatatagaggtagaaggaacttagagagacctcgttgcctgcagcccatgtcccaagctgtcttcatcaagttggaaagattattttgagttcccttggaattcttagaacgataagctcaaagggttgacttcagtggtgtgctggtatatgtttaacattgctttcaaaagaaaacaagaaaaaaacagcagtcaaacaaacaatccctcccgccccaccagcaatgtcttgatttgtagcatttgctgatttctgtcggagaaggcaatggtgtcatcctctaaccatagctgatttcaggttattgtgaaagcagagttagacagtctttctactgtacagaatcaacagatgttatagcgttatatagcatttctgccctatagataaaataggtgctgaacaatcatgttttcccaccatatagatacagtaaatgttgtagagttacacagtatttctgccttacagacataagggtgaagacatacccttgcctttcaggcgccctgcctttgcacacagtgggagctctgtgggcgcttccttactgatcggccacagttctcacggggtgtccacagatgtcttagaaataagctcagttttagacttgcttcagacagcctttgtgtcagagctgtaaggagcttgcacttaggtacccactgctgtgtcataaattatcccaaattgagtggcttaaaacaataaactaggctgtcccacagcttctgtggatttggaatccagacatggcttcaccgtgtcctctactcagggctcctcaccggaggctagggtctccaccatctcaaggcttgattgaggaggccccactggaaacactccagtggttgttggcaaggtccatctccttggggattgttgggtgggagggctcagtatcttcactggccctgggctcaaggctgccctcaacgtcttgctgcatgggcttcgccacagagaggcccttcagagggagtgagtgagagagcaagaaaagatgtgcgagatggaaaatgtagtctttataaccttgtcttgggtgtgacatccctttacttctgctgtcttctctccattaagaaaactttgtgaaatccagcccatactcaaggggctagcattacataagggtgtgaacaccaagaggtgagaatcactggggtccgttttagaggctccctaccacagaagctaagtgagaataaatacaactactatgggatttccctggtggcccagtgcttaggactttgtgcaggggcgctggtttaatccctggttgggggactaagatccctgcaagccacttggcatggccaaaaaagtaaatgctaaaaataataataactactaatattttttgagcttttattgtgctctggggactgtcttgcatcctttccatcaaagtcttatttgatctacagacaactcagcaggttcgttctatgcaccccatcttacagatgaaaaaactgagccctaattcccccaaaccacccagctaggagccgggagacctatggacctggcagtctgcctccctgaagctcacacttggtgatctggaccatctttcccaaaagacttttcagggatccgggcacacttccctttttgtagatgaaaagcctgagatccaaagagttttaatgacccactaaggtccctcagcaaattaggagcagggg

SEQ ID NO: 62794 - DNA, 1323 bp, Bovine  19866880669340
  misc_feature (1)..(1): n is a, c, g, or t
nttcctgggggtaggcctgcactctggtcccagaagaacctaggggcgtgatcgcccagactcaagacatgaaaatgccggctaggaactatgagctggaaaacagtgacggcaacatcagatggagccacctccctgcaggtaagtgaggagccctcctgagactcctgacaccccaactggggaatcttcttggccaggtttcccagcaagtcgggctgagaaccaggtctcggaagccctggactgctggattccaccactcctgcaggaaaaggcacagtgatcccagagcagcgaggaggtgggagcagtgggtaagaccttggtcacacctgtgctgccccctctgggaagtgtccccatctcctctaacccaacagccccactttcccaggctctgaaggctggcccaggtgtgtctctctcctagccaacaaaggtgatctctgcatgttaagactctaaagatccaaggaaacaacaaagagatccaaactttggtgtaaagaaacagaaccagaccttgcatcctggcctgccctgcttccctcctccctggtggcggcctctccaactcagcttgcttgccctgagtgtgccatgggtggcactggaaaacccgggctgttttggaaaagacccagccctccccagctgcaccccacagggcaagtgtgagccagtcacagcaggcgtcatggaaacacccctcccaccagctgtgcccctcccgctcacccccgcgtggcaggtcccttcttcccagtgccgcctgtctgcaatgggagaccagccctggaacttctcaatcagagagaattcccactgcttcagtgttgcttaattttttctttctctctctccagcattagtaataactggatcagatgcctgcatgagtcagcctagctagaggcccaattaactcgcccacatgcacccattaattctcccctggaccccgggtatcaggcagcaggcacctctccttgtgagcctggtacattcagagactcctcccactgcggccacacacatctaccccatcctgcccccactatctccaaccactgcccagattcaggctttatcacttctcttgacttgctcccaccttctaacagttgtccccacctctaagaccatctcaacaggtctggttccctccaccaccagctggttgcagggcggctgcctaaaagcagacctactcaggtcacaactaggctcacatttcagggtccaggcagcagtggcaggaagtaaggagccccccaagtcaatagagcatgcacatgggctgccttctgcaccatcagg

SEQ ID NO: 62795 - DNA, 1645 bp, Bovine  19866880796729
  misc_feature (1)..(1): n is a, c, g, or t
nttagaagttccctgtgtagtggcttcccagatggcgctagtggtaaaaaacctgactgccagtgcaggagacataagatgcaggttcaatccctgggtcaggaagagcccctggaggagggcatggcaacccactccagtattctcgcctggagaatcccatggacagaggagcctggtgggctacagtccatggagtcacaaagaggcagacaccactgaagcgacttagcactgaagtgacttgacaccctgtgtcaggcactgttcttggctgtacattaaaatcaactagagggggcttccctggtggctcagaggtaaagaacccacctgccaatgcacggttcagtccctgtgcagaagagtttgggaagattccagatgcctcagagcaactaagcccatgtgtcacaactattgagcctgtgctcctgaacccaaggggccaacaccactgaagctccagcaccctgcagcccgtgctctgaaacaggacaagccactgcaacgagaagcccacgcatggcaactggagagtaactcctgcctgtcgcaactagagaaaagcccaagcagcaacaaagacccagcacagccagatagtaaataaataatttttacaaatcaactagagggctttttaaaatcccagtgcccaagccacaccccagaccagtcagagttgagtctctacaggtgcccaggaatcattaagttttttaaactgactgcatgattcccatgcacagccacgtttgagagctagcattctaagcattccgcacaggaactcgttcaatccacaaacaaccttctgaggcaggtaagaattcttattccctttctaacaatggagcgcagagatgctaattaagccacagcagaagagaagagacaaaattttaacccaggggttgggttccagacactgccatcctaacagctcttgctgctctgtctcccggaaccactcactgtcttcacaaagctcctgcttcagagagaagccaacagatgatggagcccagtatcggaagagcagtacctggaggggcaatgcgaaagacaccgtgggttgtccagccaccagccatttccaactcaccttcacctgcctctcaccacagaggcggaaaatccaggctcctcatcccagcatcccttacagctagggtctagccaatgagataccaagggaaatcagtttggctgcttctgggaagggtttttcccaaggtatcaggacagctgtgtgaggagcattcctatcgcctatcagcccatcttcatccttctgcctggaatattgctgctgtgtgaggacatgtttggagctgctgagcccaccctgtgaccgggagaaccgcagagacagtgatccaggctgcagacgcaaccatcaacaatggaggaacctgcggaaccttctcttttcagattggttaaaggagataattaaaacgtcttcttgctttcaggtattcagttacttgcacctgcatcacttagaatgagctctgactgtgagtaacagaaagccccacaataacagtgacttacacaagacagaagcttacttctctttcatataaaagaaatctgaaggtaagcagtccagagtgacagggaagcatgtaagtca

SEQ ID NO: 62796 - DNA, 1429 bp, Bovine  19866880827116
  misc_feature (1)..(1): n is a, c, g, or t
nccggcagtgaggaaaaatattaggtacaaggagttccttgagggcctggagaaaagacagatgcatacacacgttcagttggaaaacagccggggagcaggcaatctggggctaaatgcagccgtcttctctgctgatggaggggtcattatattacagcaccacacttgctgtcaaaaacatctttaccagacacagcattaatatgaggcacaaggctgacttcttactcaccgctgaaacatgaaatcaaaaagcctctgtagcaaaaggaggtgagaggagaagggggtgatattgatgttctctaaatagacatgttggagaagggtatggcaacccactccagtattctggcctggagaatcccgtggacagatgagcctggtgggctacagtccatggggtcacaaagagtcggacacgactgaagtgacttagcacaaatagacatgtggaggtacgagaagggtgcccctccccacgaataaaggccccagtgggaaaaaaagatgggggtgtatgtagaaagtggaaggctttggacagtccactgggtgagcagtctccaactccagggtcgttcacgctgactggagtggtaggaacatggaaggaaagagttcaaagaaaaaaaaaagagagagagatcagttagggcccaataactgttgactgtaagccaacagaagggtttgcattttattccgtaagcaatagggagccagtgaatgttcgttgaaggagagattccatcagcattgagtttcagaatgagtctccacatgatatatgagagcagactggcagctaggagcatggccaggagatggaaacaacaggttaagggagcaggatgacagcctgagccagggcagtgaagatgggatggagaagaggagacagatgtcataatgatacagagaaacaatccaaacatcttggtaatggttgggcactgatgataacaaagatgcctgcaatgtgggggaggatgatggtggcactctcagaaggaggaggaagaacaggtttgaagggagaagacgacagttgcagacccatgctctgaatgattagtcaaagaccagtgagcaacctcagggcttggctgcatcagttagagggtcctagagtggtatggaactggagggtactgggcagaggaatccccaagggggtgtcatggaggagccatcttcccaccaacactgcccatgtgagctccagtttctgggggcctgcaaaaccaaaccttgagcacctatgggaactgtcaatatttgcctggttaagagccccagctagagactcagcaacagctcctccacacacagtaatcggcatcattcacgggggcttaggggaaaccgtctcaagtgataccacttcacactcagcacttacatttccaagacactccacagg

SEQ ID NO: 62797 - DNA, 1543 bp, Bovine  19866880833493
  misc_feature (1)..(1): n is a, c, g, or t
ncaagaatcctggagtgggttgccatccattctccaggagatctactggaccagggattgaacccgggtctcctgcgttgcaggcagattctttaccatctgagccaccagggaggccccaagtggcagatattgtcacccccatatccatgtccccttctcccatatgaatgagtgtttaagagggtggcttgcatggctgccctgaaccaggatgacacctccccagcctctgttgcacagccatgtggccaagtcctgaccaatgggacagcagcagcaatgttgtgtgataacttccaaggtctttgctaaggaggagagccagtgtgcatacttcatcccttcttctccatcattttctctgtcctggaacataaatgccaccttggactatcagggcaagggccacactgcaaggatggcaaggtggagatctagaaggttcttgggtctctgacacagtggggtgctatattggcatgacctactttcacataaaaaataaataagcttctatcttgtgtaagtcactgttatgctttactttttttttttttcagttgcagttttaatcctaaataagatagttgccatgaatgaggttgttgcttgagatgaagtatgtattaacgctcaatgacacagacgaagcgcagagacaccgctcagctttggtgctcactctacggagacagaagacaaaagacctcacgcagccatggcattgtctgcttctcatcttgctttgacgttgttttctcttctctctaccactcgctgtcctggagtccctgttgctccatattggagtggtcgtggccaggctttgattccaaatgcagaggacgtctttcattggtgatcatatacggtttacacttgaggtggaaattctccaccagcttggcatctctcactctgcctgtcctcaaccctcccgtcagcatgctggccatcagatgctggggcaagttccactgagcatccaaggcgtgacttctttctctgagcaccaatctgctttgccattctcaccattcccactctatcacagctctgagctacatcacagcagaagaaaagattttggaaacccctgatttctaatgttttaaacgaagcaacttccagagtaaataatgacatgaaaaggtctccctaaggtgttgcaataaaaaaaagaagaaaaagcacattccccatcacccaaatcaggatggactggaagcttccatgccaagttcatgtgtaagctccagaggatgcctggcctagagcagcacagggaactcagcgaagtgagctgatctgagtcatggcttggatcccaagtgttatatcttctctcatttcatctctcttgagcacatgctgtcccttaccctttataatataaagcttatattagctttaaccagtagtttgttatgtaaaatgttccacatgacagctcagctttgccctaattctcccatttcctgtaacctcttaaagatctttcttaatgtccttgctctgtaatccattaatttctatttta

SEQ ID NO: 62798 - DNA, 1132 bp, Bovine  19866880867872
  misc_feature (1)..(1): n is a, c, g, or t
ncaggtcagtcccaccagaggctggagaagacagcaggtgggtctccatggtgagcatacccggcagggttagaagaagttcagggcttttagggaacctaagtgagagagatgagcatatataacaattctgtgcataaggatggttactaaatagccaggttgatacctttctggcccttcttctatccatcctctttcccaaatagtgcctgtattcctagggctctgggttttccataagagaaagaaatccctctgtcttattatcattgatcctcagtgctctgtagagcatggatatttatggccaggtctgaggtggcctggaagttctcaggattatttgttgaatggatgaatggtcagagctgcctcttggttcttgtctttccgcaacccacatgcagacctggtctaaagccagagaactaaatgggccaaactgttttatttgaaagcccacttttctacgtcaatgtccatcaggtgtcttaaccaatttctattgcactctgcaccagatgcaaggcattgtggaggacagtggaaccaaaggcacttgttcctgcccttgaaacactaacaatgtggtcagtgggaaaaacccagcagattcagttgaatgagtcctcaaatgtcctttcatgcctcagccccacgatgatgaccattattgtccttatattcttggtccagaaaaatgcccagcatgctgatgccagttggtacagggactgtgtatgaaagccccttagccttctagacttcccttgttctctacttttcttggtgtgtggtccaatttccaaaatgtgcccactttattctacctgtatatctgcagatgtctgtcttagccaagtcatagttttcctgcacccacctcctgctaagactcaagggccattgtcctggctgtctcaccagcctctggtctcaatcctctaaggtaggtgggacacaaacacacacaatcacaattctcccactaatgacagatctccaggtcatgtccttaccacccaccgtggcataggcatatgagaaacctattcaggaggttttactttttttttttttttttttttttggtctcagaaggatgccattgggaaaaaggccaagaaat

SEQ ID NO: 62799 - DNA, 1415 bp, Bovine  19866880888809
  misc_feature (1)..(1): n is a, c, g, or t
ntcttcatccctcatgggtattgaaacatgagcaatttcatccaattcttatacccctgtgggccatttcctgttaactcctgctcactgttctggctttgaattttgttttatttctggcatgagaggattttcccttcttgctttgagttcatggaagtggttgtaaattgacttgtgttctcttgtagccagcatgtcttcatgtgtgtagtgggtgtgacacttctgttgagggtggggagaatgctttccccaccaacttggtgttctgtagagagcaggaagtgatggtgatttgggctgtagaggctggtccttctgcctggtagttagaaagagtgctaaaagcagaagttccggaggagcctgagaagggaaacctgggaggagactccaagggacagagaagagcggcacagtgcgcgtgagaacttctgcaggtgggtccgtgtgagtggctaacacacaaagatcccctgaaggagggtatagcaatccactccagcattcttgcctggagaatccccgtggactcctcttgtcagagaagcctggcaggctacaatccatggggttgcgaagagtcggacacaactgagcgattaagcacagcacacaacacacaaacccaagtcatctgtgaaactggcctgtggttaccatgaacctctaggaacagtgctggtgggctcgactgccttctttgagtggtattttgaggaaattaaggaaaagggtccatctttcacattagggaccacttgaagtgcaaagacaaaagtagcaacatcagtatttttaaagaaaactggagcaggaaactgaatgtcttctcccaagaattttctgaaatctgggggaggacactgaacctcccacaggatgaggttaggttcaagctaactgtatttactactgcagggtgaggcaacctctagttcacatgtagctagactgaagcgacttagcagcagcagcagtaatatttcttgccttgtttagtctacctgacagactctgaacaaacaaaactagcctcattttctatgtgtgtacatgctcaattgctcagttgtgtccgattctctgcaactccatagactacagtcctctaggctcctctgtccatgggattttcctggcaagaatattggagtggattcccatttcctcttccaggggaccttcctgacccaaggattgaacttgagtctctggcgtctcctgtactgcagatagattctttttactgctgagtcactggggagtctctggagcaatggttttcagccagggggtgggtttggacccccaaggggtgttatctaatgtatgcaggcatttgtgattgtcatggcgtgggtggaggaaaaatgttactggtgtctcatgtgtaaaggccgaggatgctg

SEQ ID NO: 62800 - DNA, 765 bp, Bovine  19866880984854
  misc_feature (1)..(1): n is a, c, g, or t
ncccgtgtgcagcagctactgaaacccatgccctagagcctgtgctccacaacaggaagagccactgcagtgagaagcccacgtacggcaactatactgtagcccctgctctctgcaactagaggaagcctgtgcagcaaggaagacccagcataaccataaataaatcaatagataaaatgtaaaaaacgttaacatttattaaggaaaaaaagaagtcaatgtaggtgggatcacagtttgttgcaaagcccacctaaaacaaaatataggatatgtaccttaaattctctcatagactgtctctcagcatcaaagtatttgcagttgtagctggaggtctgccagtgcatttgaatgcaagatatgcatcctcaaaacgcagcatctaaggccaacctattagctatgcaaaactatggatttctgcagtcctaaactcatttaaatcagcctattactataatagtgccaacatatagacatgatgtgagtcattgatgggtttgaccaagttgatgagacttctgctgttgaacagacttcaacactctggagaaccccagggcttattctgtcgatgcgcctataattccgtctctaggtttacatcagcgagggtgatttcagcttggtttcagtcattctacgcattaaaaaaatagtgctttcactgaaccagcaggaggcaaatgttacctagattttgatattgagtagcattcttagatttattgattcatgttccaaatttcagagattcta

SEQ ID NO: 62801 - DNA, 797 bp, Bovine  19866880985846
  misc_feature (1)..(1): n is a, c, g, or t
ngaaggggtgcgcaattagtataaaattgacatttaggggaagcagaggctccctagggaagattaaaggacatttaaaaggctcttctgggaatcctggagagaggagatgaagccagagaagatggcactgggcagggaccagacaggagagacatcttaaatggagccggcgagtccccaggacaatcaaccagctggtgatggaaatacctctgagcctgcaaaatcctgacctccatcccacacaagagcttctggaaaaacggcagcattaaccccacaagaatgtctgctcaacaactgtgctgaaaatgagatgatttgatttggggaggtaaagtacatcttgaagttaaattcttggctctacttttaaaacctctcaagtgggttagaatagctggctcatccttaatggatggagctgggcactcccttcccctaccagccacttgaaaggatgtgaggacacatgaggtctccctttggatggtacatttctctcctgcatgggggtcagattgccctggggctcagagtcagggaggggacacacctgagaacctggattctagaaggcaacagggagcaggcccatcccctctacagaggaatctctcacacctcaagcccatcttctgttcaagagccactgacacagtccagcacccggactgtgtcccgaggtcacaggtgggaaagaagggtgagagggtgtgaagtcatgaccagcaaagacctgggtggggggcggggggtgttgcttggagggtaggtggtcaggttttagtgat

SEQ ID NO: 62802 - DNA, 1447 bp, Bovine  19866880995864
  misc_feature (1)..(1): n is a, c, g, or t
nccagagcttgtcctgagccataaggccctcttctgccaggaagccttttagaatccttccccacacccaactgcaaagaggtttccctcctttccttccctattagatttctacctcaattacactcttttggcatattcacttcctgacaccttctttatgtaggtctcttagcacactggatctcatgagcaggtggggctaccccacaaaggcagaggcattgcctttaaccctaggctacaaggcctaacccaagtggtatctgtcacagcttcaagcggcctaacactgagatggaccagagaagtcatctctccctgaattttacagcaaggggcaccaacttgcttcactcacccagtcaggcagtggaggaaccagactcaaacccaggactcttgacttctagcccagagtctctcacactgagggcctggaggactgtctccaggatgattcaggatattgaattaacaggcaatgtatacaagaagggacttatacacacgcatttccccaccaccaccatcctcaggatactgagttccctgctcatctccctggcctgctcacaattatagtccagtgtctgtgcatttgcgtcccattgatgagactgaaatgccagccattagtctccattcttcacactcttaaatgagagggccaagattaatgaagcatcttctctcaatcaagaagccatttcaggctgtgcttcttaagcccagtgagttgtgcagatgaattaatactgacctttttatttttcactgaaggattggtggtgctccccctacccctacactgtttgaggagcaatcctgctccagccgcttggttcagcagccaggagtgtgagcgcaaagtgatggtgtcacctcacagcactgagggcagatcattcccaggagcagttgggtggggcaagcaggctgatgtagcttctagagcctcctcctactcaatacacccacacctaacaaaacacaaaagcagacagaggacccaacaggaaagtgttgccaagccaagcccttgatgtgcagtgggggtcccggagccaagactggaactaagccagggtaacattcaaaatagctaacagcaaagtgtggcatgagcaccgaccaatcagggcagacgcccaccatgaaccaccatagggccagccaggcgcatcccaggggctatcagctgtggacagagcatttgttctcccaagaaatgaagaaggttggggtgttgatccagcgagagagaaaaagtaggcggagagggaagaggatcaagtaacatgatgggaagagttgaactcaagtcgtggaaacaatcaagggacattataaaaaagcaacatctaatcttaaaccttaagttgcttgtgtttttgcaagagaaattgctccccgttagtgaaggactctacatacaaatgtctgt

SEQ ID NO: 62803 - DNA, 1014 bp, Bovine  19866881090444
  misc_feature (1)..(1): n is a, c, g, or t
naattcacacgggaggtattacatacagaagatctcccccgtgcgctccagcaccagtctcccatccccgtgcatcagctccttccctgtgttggtttgctcctggaccaaacagttgccttaagtctctatgtcacagctcttctccctttccctttgctttgtaccccctgctggatgacaagcactttctgggtctctctgatgaaatgccaagggagaaaacgcggttgagcacttgcgtcactagctgctggcagcctggtcctgtggccggagagcaacagctaggatcggtggcagaggacctggccatgccccctctgcagagcctggaatatgccagatgcttgactgtgcagccctgggcctccccaccttgctttagagacacaggctgagcaaatgcaggtgacacagcactgcaagctgacgctgttgggctgcagggggaggcgtgggatgttcaacgaacccaatgctcttttctatgtttttgtttgctaaggatgtgagaggaatgggtgcccggggctgtcccagggcctctccttctccagggcagagctcagggaccctcctgcttgtagcaggtggttcccattttgccctaggacatggcagctctctcttggtcaggtgtgaaagctgccatttcacgctcatcttgcccaattaacaacagctggtcccctataaaaccaactggtgaggtggtttgttattggaagacaatgcaacatcattaggcattaatggctccagcctcggttcctggcccaagttcacagggttaatgtggcgagatgttgggactcacctggcagagctactcactccagtttgtaggcatcttgttcaagcttccttttcagaatcaggaactgggaggtgaagggcaggtggaggggctatattttctggaaggggcactgtgcaggaagtggtggatctgccacttacaggaaagagaccctcagtgctcctggcttgagaattgaggggactcatgga

SEQ ID NO: 62804 - DNA, 1063 bp, Bovine  19866881111824
  misc_feature (1)..(1): n is a, c, g, or t
nttacacccctgtgatcctgcgatcctgcttcctgggtatagatctcagagaaagccaccatacatgtccacaaagaaacatgtcctgcaacgtcaccatgtcacccctcccctgcttgccttcctctcactgatcgtaagatgcagctcaagcctgatccccctcaaagctttctccactaccatgatggctcctgctcccttcccccatgattccaccccactcttggctgctttctgtctacatgctcaccacactgtatatttgcaatgtgggcttccctggtggctcagatggcaaagaatttcccactgggagacctgggtttgatccctgggttgggaagatcccctggaaaaaagaatggcaacccactccatgtattcttgcctggagaattccatggacagaggaacctggcaagctatagtcctggggttgaaaagagtcagacacaggtgccatctgcatcttccattaggctgggagttccctcaacagtaccaactgtattttattcaccctgtgtctacagcacctagcactattcctggcacagagtaagcattcagctgggcggaatgaggaaattcataaaacacagggcctggatctggttcctggtatttgtaaggcagaactccatcctggtgttcagattccaccctgagtacagttatctcggctcttctgataagggtggggaggactgcttcaatccggggattcctggatatcggcaggaacttcacgtgccactccgggtgtatccttctgggggcaagtctgctaatggcctgtgtcgttttgaaggagaagacgtctgccaggatgtgatatgtactcagcacagctggtgtttgtcagccacaggcctcttggtctcactcaacttcaaccctccccttctcccctcctccccactccatgctcaagaatgtgaggcctggctccctctgggcttcaaaaatgcctcaggctgggtcctgtgaaatcttaacctttcctcccacctctattccctcagcatcaccaccttcatcgtaaaataatttatgcaag

SEQ ID NO: 62805 - DNA, 699 bp, Bovine  19866881163733
  misc_feature (1)..(1): n is a, c, g, or t
ngcagactcttccctgtctgcctgactgctgagcttctcttgtttcgttttctatctatgatttctttccgatcatcttttcctctttaaaagtgtttctaacatgtttgatgtatcactctctgttcggtagtgaattttgtgactgtatgtgttttaactgcacatagaagttctcaagctagatacctcactcctctttcatttttcgtcattgtgtacatttagttcattggttctaataactgcacagcctttcctgtgagatctgttcctttccctggtggtggattcttaaacagcctccactgccccactcccacaaacatgaagcaacgagcaacgtccaggccagtgggagcactgcagagaattctagaccgtaaagtaaggtagttccctattcccggactgctctctccagtcacatttcccagaacagtggattagtggacccagtctcctgagtcttccgtcaaactcgataatggtcaacttctgacttcctggtgagctcatgtggatcaagtcacatcacgttcaaatgtgcattaggagtgatacacccttctttgtctcttagatttctccttctgtgacttgccttctcacagtctgtgcccattttttcctcttggatttcctatctttttcttcatgatacataagtattttcttgtatagccttgatatcgatta

SEQ ID NO: 62806 - DNA, 985 bp, Bovine  19866881175365
  misc_feature (1)..(1): n is a, c, g, or t
ncctggagatcccggagtccctcctgacagccttcccaaagcggaatctcacctcttggcaactgcctccacctcctctggtttccctctcattggggaaggcatcacacagggagtaggatgttcagctaataaatatgtatgcaggatttttattacttaatagttgtaaggttaatcgtcgtggtgaacgcctatatttaatgtgtcaatggagctgcaaaatgccaaactgaatagctttaacacacattagttctacttgtgaatctacaaataggagccttgtcagaaaagtattcaaaccaagatcagtattgatttcggtcctcgggaaaggcactggactgtgacagtttaaaatgataaatgtctagagaattatttgcccgtattgataaaaagaagcagatataaagctgacagtctcagaggcgtcaccactgagcaagggcagcacgtgtaacattgttagggctctgggctaatctcccctttgatatggagaagatcctcttctgatctggccctgccctgagactgggcttgtaattgcagaggagggggcctctgagtgtgatcagtgggctccaggctcccgccctgaccactcccaccatagttttgaaagatagcattctgcagggacccaaggacctttcattccatccctttcctcttgctcagtaacctctgtggctcataatgcaaaactgaagcccccagcctggcctttaactatcttgtcccaaatgacaccacctccctcccagcctcagtactcaaaactcacccccacagacccacagtgtcagccagactggcagattgcagctcttgtgaacctccaccccccacctccgccccagaagcttggctcaagccatttctccagcctggaatgagccccttatccatttttagctgtccgaagcccatgctttcttccacataacacaaccccacattctcttcattctttact

SEQ ID NO: 62807 - DNA, 1975 bp, Bovine  19866881225739
  misc_feature (1)..(1): n is a, c, g, or t
ntgaatgttcgcaagccgtcgtctaatcaatgattggtgattttctctctaatttccctttctttgcccagttgtgtttctactgatttcatgtttcgggaacataaatgccaactctgtgtttttaggaataaatcgagaggcactcacttaatcccattatccaagaaacaaaatgtctcagccttcacccaatcctgcaatccaatcacctgcagaggagatgagaaaggaaatccttctgttttcttttgctttttttcccccaaactagtagtattttagaaaattaattatgttgtacttgatatccagggcccaggtcctcagacagagctggggactgaaatgggacaatgttggttggttacagaggcaggtatttcatggcatccttcagcccctatgtctttgtagatgaaacaatatgttttgttgtgactctaaatacttccattcaagtaagatttagagcattatcaatagtctctttttatcacgcgtgtggaaattccacttttctcgtgggcctgtgaaagcaagacacctcagctccacctgtccagtacccttggtctgagccccagctccgtacatggtgtgacctccggcacagacccccagggcaagtggggacagctgcaggcagaagtaaacagaagaagtggacggactggatttgaaccacactctgctgtttcctgactgtgattttaggcaattgactgaaattttctgagccttagtcttctcattttttcaagtcagaataataacatccagcccactggattattgcagtgagtaaaagaaagcgctggggcacagggaaaggtctgagatggggctcagtgcttggggctgctacatatagacgcatggcttccgccttgcccagagacgcccagccaagggcctgtgaggctgatatcctgccttacgttcaatttaaacttgctggtcactcacactgggttcttaaaaaaaaattatccacccagatgactcaccctcaaaaggaaagagaaagcctctttgcaatttacacaaaagagcaatgcgcggacagaggtccctgagtacaggaggcgactctccaccccactccaatggttcctgctccagcactctcctgccaaacattgtccaaccttggctacaaagctgtgcaaaagcagactttgcatcatgcccttaggcagcccagctcatctttagatgtctctgttaaaaagtattagagttccaattttgcaagataaaaagagctctgaagatggatggtggtaatagttacacaacatttagaaatggttaagttggtaaattttaaattatgcgtattttaccacaacttaaaataatattttttcatctcaaaaatattctactaccaaaaacaaacaaacaaacaaaaaaacagagctagctccatttggtgctgagacgcaagaaactgcttggccagggagcagggacttgctctctgagggtcagaactgagtacccctggagggtaaaaagtattttcttatgtttgagctgaaatctgttttcatgtaacttttctccatggtggtctttggagcactaaaggataaacgtatcagtaaatattgtgggctcattgggctaatttagtgtattggttagattaaaagctagggcgcattacgctgcagaaaaaaagtctttggggctaagcacagcaaaaatatatttttcgctaccatgtgtaaaatagatagctagcgggaagctgctgtagagcacggggagctcagcttggtgccctgtgatgacctagaggggtgggatgggggtagtagggaggaagggaggatcaagagggaggggatatatgtatgcatatggctgactcacttcattgtatagcagagactaacacaacattgtaaagcaattacattccaataaaagataataaaacaaacatttctctcccacagtgtaa

SEQ ID NO: 62808 - DNA, 1699 bp, Bovine  19866881259554
  misc_feature (1)..(1): n is a, c, g, or t
naacgtgtccttgtcgaggtctcagcttcatttggtattccctccctcctcagcaaagcacctaagtgccttccgtgctcccagaacgtcagggaacatcagcaaggcaggcgaggaggcccccagacccgcgccccgcgctgcgggaagggctggctcactccgctgacttccattaaacatttgacgcatcgcagagctgccgaaagccatccatcacggccgcctgcctccttctgcctttctgacctgctcccagagtggggcctctgccttcatggccaacgtataagtggagtgggagagaggggacatggccatggccaggtgcctgtgaccacctcttcccttgtacagggcccaaggaggagcttcagggttgactgagccctgatattaacaagaatactgtctactgaatgctcagtgcaccgagcagaccggagcgccttctggagttcatctcccccaaaccccacccctctcaccaccgaaaggcacacttatcattgcccttcgttagatgcggagactgacattggaaggtttggttactgtgggggtgctggagccacactgggccctggcatgtgaatcccgtccctcccctcaccccttctctacttggggatggctgggaggacaggcgctcagcagggaggtaggggatgagcctgaaggtcagggtgtcctgggtgggcactccaactgggcgggcactttactcagtgcccagtggaggatcccagccttggatgagccacaggacagcctctgtgcatggtggggtcctgtccctccctccacccagttactccagccagaactgggcccctcctggcccctcgctcactcttggtccccagttcagtcagtctgaagtctctcagttcctcttcctgagtgttctttaatccttaagccagacccctttcacatatcacggctgctcgtggggactgctccagcccctgctggtccctggcctcaccttcaggttctgtttcttctccccactggagccagacaggtccagatgtgttctggagcccacatctgctcctcacccctctgcttaaaaacctgaactcaccttggggtagagcccacgtgtcttacttggctagacttgggggctgctcagctctccatgcccctctcccccttgcctctgtccacaccccaggctcatgctgaggtctccgctcctgctttgctctcggcgggggtaccatctcacgcctcacttcctggctgattcctgcctactactcaaatctcagcttagatggtatttcttccagggagccttccctggtttgccagcctgggctcaaggggccctttcatgttcttccctccatagtggcacagtctgaactgtcccaattgcttccctgcttggttgccaccctctagtgactgtcagatgcggggaggttgtgagtgccccctaccagtgttcccttggagtttagcacagggcctgctctgtagtaggcaccacgtgaatgaatgactcatgtgatgaatgaataaatgaagactgataaggccacggtggggccctgacggtgtggcacaggaggcaggggcagtgccagcaggaggaggcaatgtggagctttggagtttaaaccagaccccaagggggtgagagattgggcttgacatgtatacactactatgtatagaatag

SEQ ID NO: 62809 - DNA, 1577 bp, Bovine  19866881274155
  misc_feature (1)..(1): n is a, c, g, or t
natgagatggggcttggctccccctgtagccactcccccaccattgccttaatctaaatgcctttggatcccaccatccaccttcagagcatgtggttctaggacctacaccagcctgaacaccttcttttggacttactatcaaatgctccctcctccacctggcacccctatgtcagtgaggctctcatacttaaccccctcccactccattctactcacagggcaggggtactccaagcaagactagggacaccatctcagggggagctgggggatcccactgcaggcctagcttgctgtaaagagggagtctgcatctgctctgacagcctgcacacgctccccaatctggagccagggccccccatcttcctgagaagtcagatatctgctgcctgcctgcctgcgcttcatcagaattcagcaaaagggacataaataaataaaggaaactctgctaggctccttccgcctaacgatcaccaacatgcagacgcttaaagagacatttttccaaagcaacaatgggtgaaagccatcccgaccggggaagaatttgctgtcagatattattgttggtcgcatttaaaaaaaaataaataaaaagccaaagcagggggcctggggtggggcaaacatcatggagatttccatcagacccaagaggcttcctgcatttcaacttttgtttatttgtttatttttgtcaatacgtgagcgtttgaaattcgtaacacactcactagcagctagaaaaattccccaatcggagggcagtgtttgaaaacagtctttttaatttctttcagctgggcctctatcgctggatctttggttaatgtggattctttattcatgatctttccacctcctcatctctgtgcagctaatcagccgttggacatatggaattgttcatgctcaaagcggttagcaacgccccaggccagacgggcttcagacaaatgtgtcactcaccttttgggcagagccccccagaccctgttaggccttcttgggcagaacccctgcagcacaaagataacatgctcaggctgtgccaggccaggagcgtgttctcccaggctgcgtagggcagtgagtcaggtggctgcagggcttcccctggctccccactgcatgccgtgtggccacaatcctctttccctctccttctgcagcagttaagtgtggggttgaactagaatcaggaaaaatgctgagagaggcaaacagtcgagggcctctttgtagcaggacctctgaggatcagggactctcactatgtgggctgtctcatgtaatgacagcccgtggtttgctcagctcacctattgcatcagggtgagatgaaaacagggtttccgctagagcatgtctgactcatcagacacatagacttctgtccatagactctgaagacatccatcctgcccattaggcggcattggactcggggcagagtctgccctccttggaggtggggggggtcctcggctctcactgctccacccttttaccttcatggtgctgaagaagcaacatacgcctagagaggatctaccactcccttg

SEQ ID NO: 62810 - DNA, 1319 bp, Bovine  19866881274418
  misc_feature (1)..(1): n is a, c, g, or t
nagtgtgggaaacaggctagggctggagctgacagtacattctgtgagtcaagggctacattaacagaggtccagtgggcagaggagggaggtgacaggcccgtgtgacacacgagaccagcctctagcaacttcgctgtctgagctcttctggcccttcgtatctgcacaaacgccagaccctgggctgtatggagacaaagcacatccaacaaaaacagaaaagcctcctttcagtcctggaagcacatacagaaagcagaggttgtgggttctgctggtcctttctagtctacaaggagtttcttttttaacgaggtgagcagaaaaggggttgggggtctccattatacagatgctgcaactgaggcctgagaagagggttgtggtttatctggggagctcagatgattccaggaggaatcaggctttcccattctcaggctatcccatggtaccatcctgtctttgaggcctgttctcccatatctgactgtctccatccatggtgagcagtgcctaaggcacagtagatgcttaggaaagtcctctgagcatttgctgtgcttctgcagagggactgtgatcttgggtgggttggaaagagcagccacccttccccctcgaggcccatcagttatcaaccagggagatgactgagtggagcgtgtgcacacgtgcgtgtgcacgtctgctgggcgaggaagtggcatgtgcttgggggagcctacagagcggcacttggctggatccccacctcgcctggctctgctttcatacttccttcccctgcaggcctagggaggccacgctgcacagatggccatctggctggcactttaggacacggcccagtgctcactcccaaccgtctcctcccttccttctctgcttcactggctccatggactctgaaaggagagctggacgaggatggagaggcagtgggggtgacgagcagagggcttacatacaggattgatccatggcagagctctccacactcaccatgattagactgtctttgaagagaacccgtgtctgtgctgtcccagtcctgaggcctgggaggcagcagggtcacaggatggggatatgctgtgatgctgggaaaacttactcatgtgagcatcctgcatggttccataaatactactgccaagagccagtcagggggactgcaattcagcccatctatccatccattacctcattcattccataaaccttttctgttgcttacagcatgctagaacctgttctagtctctggcaggacccctatcactaattcaagatgaataaagagccattgggttt

SEQ ID NO: 62811 - DNA, 893 bp, Bovine  19866881416487
  misc_feature (1)..(1): n is a, c, g, or t
ntgtgggaaaggtagtatactcccattttatagcccagaaaactgaggctcagcaaagtgaagtgatctatccaaggtgacacagctgggaagtggcagagctaagattcgcacccagagcagtgatgggctgctcctcctgccttgagccagcacggctgctttggtgtcccagctaatcatggatagtttctccctgaggacaagaacagctgagcctgctatgaagtagaagagatagcacaacaaaataaaccaagacggattggagcagagggtttccaatggaatcatgttgcaaaactgtctttttctgcaagctgcccctcttaggagcttcaaagagaaacctgctcccaagcaggatcttttgcctgagccaaaagccatttgtctggaatattaatatgccagcagctgcctgtgacggtgtctgccgctgatcacacactcccagcaaagattccttctgggaatgctccgggaggctccaggaagctaatgggccccctgcgacacattctagttacctttgtttggctttcccagagcctcagatgggacctctgggtaggacgggacatgtctggcagcacagccacccaccacaccacggacgatgggtctgcctggctcatggcggcattatgctcaggaaagaacagagaaagacccttgagatctgaccccggtgctacatctagcaccagaaagagacaggctggaggccagcctcatcttgaaggaaggagcactgaacttagaggagacccagcctccggctatagctcagtcacgccaatgctgggcaatcttaagtcagccacagggtcccaggacggcagtctccctttctgtaaattgagggggttgggcttgatgctctctaaagg

SEQ ID NO: 62812 - DNA, 1464 bp, Bovine  19866881455423
  misc_feature (1)..(1): n is a, c, g, or t
ntttcctgctctgtacagtgaagttggtgtgaatggtccttccacctctgactttctacaaccatatggaaattttggcctgttttggcttccaaattccagaagagtgagaatctggccaattcagaggaaacatgatgttagggtaaccattctctgcatctccttggaaaagagtttaggaccatggaactagaggagacagcagggggactgcagctgcaaccagcctgtgtggggcacctctgccaccctgggctttgagtcaaagcagatgtcttggtccccaatacatttagagctccagagagctctctccctccctggcttctcctactacccccaccctggtctgggccatagccctcagcactgtgagccagagggatgggtagcagtggagatgggggaattatcattattatacccattttccagataggcaaaccaaggcacacagaggtaaattgattttctgatgtcacatggccaggatgtgccagagatgaatttgaacacctttctgccttgctctactcggtttaagcctgtgttcttgaacaccagattcccaggcagatgagagacatcggtttcctgaccatttgggacagtccctgagcctgcaagagtgaatgccagagacacagccactccttcaggttgggttcaaggtgagacctcacctcccagcccagagatggagaattcagggtgggcaaagtgcgggacaaaccccactgctccagggcagggctgacccagcatagaaagtcagactcaaaagttccagcttatttctcccaggctctcaggttggaggccaaggccccctggagcagagccaggatacctttccttctctggtcatggctggcccagggaagggggcctggtgggaattctgactgggaggggctgacaacaagcaggaagctggcagttcagtatggcaggaaagcatgagacagagggtgaaggaccctgcatcctatgggagaggtttccatgaatcccctcttggcactttacagtctgagcactgcagccactccagaggcctcctgggctctgctcccagcctcttctggagtttcttttggagttccacagctgagcctgatggagaagcaagggaaggccagtgtctgtgttttggaactttcctatcaaaataaaaggagctggggaaaagcgaatactgttgaagcccaggcaaagatggagaaaactgtgccttttatggccaaagctattaaaagtctacttaggaacacggtggctggccgaggtttgccttcctgccaggattcctcccagccttccctccgctgttggcccttcctgacttcacctcggcgcttgtgaagggttttcaggggctcccgacaactttacactcgcagcttggcgaacacccatctgcgtggatctcaaagcgcatcaggattcatttccaaggac

SEQ ID NO: 62813 - DNA, 1834 bp, Bovine  19866881480513
  misc_feature (1)..(1): n is a, c, g, or t
ncagccagactcctgccatcgcctcattgtgggaagagtatttgttcatgcttcttaactttgggctcagctgtgaaacttgttttggccaatgtaccagatgcctgaataaagattcagaaagatggcgacacccgggagtaaggctaaatctaataggagggagtttaattggaactggggacttccgtccaacatggcggacaaagctgacacatgatggaaagtgccagcgtgccagtctgggcctgagtctcccttgcttctgctggctggctgagtctctgccagagtcttgaaaggtacatgccctggttattctgttggtctaaggaagataagagaatggagagcagggctacccaagctgaccacagataaggtgtccaaccatcccagttttcccaggactgtgaggtgtactgggatgtgggacttggaacacccaaattgagaaagtcctgggaaaaccagaaagagtcagtcatcctacccacacacttggcgagagaagcatggccaacccagctgcagtctgaagagggccaccttgccactacagccttgatcaggcaatgcagagataggcagagagcgctgtcagctgatccacagacacatcatccacatgagtcgttcttactgtatcctctctgactttgtgattatttgttccgcagcaatattgtggcagtagctaacagagatattgccatgaactcagatattgtcactgtgaggagtgagctgcccacaccaatggaccctagagccgcaaggtgactgaaaaatccacttcttggtcagtgtgttaaatcagtggctctctatcctgatcgcatattagaaaactagggagcataacaaagccgaacatccagaacgctttccagagagtctgttcaactcttctgccacgcggtcctggcttcatcattttttaaaatccccacctgatgtgaaggcaggtttgggaattggtggattaagtagtagaccagacacagctgaaaaaacaatgctgaagttggctcagtggaagttcctgtacctgaattggcacacagcagctccttctcaccctggaaggggagaggcagcttggaagaagtttctgtgatggagactcaggggtctgagtcgacccaggatcctttgtgttctcagggtcctggagatgtaaagaagcgtggggaggagcgaggtgggagtcctgtcctacacacccgagttctgtcctctcctctaagaggcaggtgcacggtgtgagctatgtctaggccgagcttcccaaactttaagtgcccaggaagtggctgtggatcttgttaaaaacataggttccaactcacgtggaactcataggtctggggcggaactgattctctgcacttctcaggtgatgcccatgggctggagcacatattgaataggaagggggtgggaaaagaggggagaggacgccaggttccatgatcccctggactgcttataccagagagaagagggttcatgaaggtggcgggtgttcccattctagaagggctgccgtgggatctgggggttcagcacggccccatagggcagatctggggcacagagaggcgtctcattgagtacggagacaaagttcaggatgaaatgactgctgtgggaggtgggttgctgcccattccagcaatgcagtggggctgtcaccgggagcaggacgaccccgcagggggagggcccaggtgtggtcatccacccggagccttcagggcctcttcctgccccagactcttggatccttgaggtctttcgtttctgtatttggctcaagaacagagcctgg

SEQ ID NO: 62814 - DNA, 1269 bp, Bovine  19866881500121
  misc_feature (1)..(1): n is a, c, g, or t
nggccaaccaggagctgagcatccaagccagggggcctgtgtggcagcaatgccagcctggcgtggtgggagctggaccagggcagaggcagggcaggtgtggagcccagaaatgggaagacccattgggaggaggcatcatctccaaagcctgggctgcctaggtaggaggacaccctgttaggggtcttggtgatgctgtcattctgagagatggagtaagactggcctccggaggctgtgatgtttggattggagacatgttgcaaccctgcagggttgctcagaggatcgattgagtgtaacacatgtacagcacccagtgcactgcctggctgggagaagactggagacagggcccccagggaaggaaactgaggccattttccttacatccctggcatcatgtgctgagctgggcacagtaggtgttcagtgagtgctcgtcgagaagaactgtgggctggaccccagtcaccgggtttgcggccatcgcaaacgcaacacgcttcacagcacggggttcatcctgcagacctcatcaaccatgcagtcatggggagatcaattggtccggctccagctgttgaaactagcagcagagaggaaccatggacaaatagtcctcagctcagcactttctccatctgggaagaaaaccaggtgtgggggggagagcaccaggccatcaagaggttacgaggccataaataagagatttgtggtaaataagctggcgaacatatccgctcgctgctcttttttatcactcacctagagagcaaaattcccccgcatcttttctgcaggccaataaatatctttcaaggagccggtatttacatagagagtaaggggggctccacggctccccaggccctgtgtcaagaaggaacaatgtatagccctaaagagaatggctgtgcagagaatcgatgcaaatgcagtttcttttcccaggatgatgctcccgagcagggttcagcccgagttcaaggattgtgctctggcggtggtgcgggcccttctctaagccacgggggatgactctttcccctaggctgggggtcacatggcccttcctgctctagggccctgtgcatgaaactctctctcccaaatgaagcagaccctaaggagataataagggacctctagatcaaccactttccctggtggctcagtggtaaagagatctacctgcaatgcagatgacacggcctcgatcatctgtagtatagggaggatcccctggaggaggaaatgaca

SEQ ID NO: 62815 - DNA, 1038 bp, Bovine  19866880561536
  misc_feature (1)..(1): n is a, c, g, or t
naaatcccatcatctttgaccgcaaggaagtcaaactgaggctccacgtcaaagtcattaaagatgaggtgaattctgctgcctggctcagagatgatcagccagacgcagttcatgttgttaccatactcttctgggtaattcggcgagaggataattcctgatgatgccgtaaagttgaagaaacaggaaactgtgaagacacacagataataatggtttcaaacagttttgtccacatccaaagatctggctgtgtgctaaggacctgggaaggaagtctataccagcagttaactaggatggttcaactttttctttttttttaaattttgagagtatctactgaatttgttacaatccagcttctgtttttatgttttttggcctcaacatatatgggaatctcagttctctgagcagggattgttgtgggttgtgaacagattaagttcaacatacagaacaaccatagccgatacataatcaagtgtacgcttgattcaaaaatgaccctgtcaagttgactgaaacttgtggcaaatattaagatttcttgttataactttctgccttcagaagagcaaatattaatatgaaaaattatgctggtttcataaggacaatttccagaaaacaaggttgattctaatcacttccctatttttcattttaaattttgcacatgccttaaagcatattttttgaaattactttttaagtcatttacagggtaacaatgattaaagaacaacttggaaaatcagaccaaatcctggtggataatataaaagtctcttggaatatttacttaatgtgtactgagaaatcagtaagatatatgttttatatatgtctataaacatattctttgggagggagcatctattggacttatttctagggtgtggatttgcttattattttacattatttctgtatgtttccaggttattgctatacttagttataaaaaaaaaatctgtttttcaatcttctatgtagtccttcttttctacttgttaaatcacttacaag

SEQ ID NO: 62816 - DNA, 965 bp, Bovine  19866880572397
  misc_feature (1)..(1): n is a, c, g, or t
ntgttggagcttcagctttagcatcagtgcttcccatgaatattcagagttgatttcctttaaggttgactggtttgatctccttgctgtaagggactctcaagagtcttatccagtaccgcagttcaaaagtatcaattctttggtgctcaggtttctttatggtccaactcaaatctgtatatgactactggaaaaaccataactttgactatacggacttttgttggcaaagtgatgtctttgctttttaataaggtgtctaggtttctcataacttttcttccaaggagtaagtgtcttttaatctgtggctgcagttgccatccacagtgattttggagtccaggagaataaatggtcgaaaaccgttttgagccaattattaaagcttaagactattggaggacactttcaactattttcaaaagacttttataattgcctcttgctagttaattgcattacttaaggaaacattcatatttaaatgtttcaaatccataattaatctacacacaagtggattcgaaaatgtcaacagagagtaaatatatagcttaataaacatcttgaaggttttcaaatgagtacaaatcatatttgtatatcctttaatatttagagcatactcctgagtaccttgtaattttaccatcttggcaattccaggtcttgataaatagcccctttaactctccctcataagttagaaacttttaattttccaaatatgtaagtgctttgctgaaacatccaacatacaggttgatgcagcctggatccaatccaggtcttcccaacaaaggtcagcactgtcaatggccttgttttaaaatactttagatgatctcacagatgagttccacattaattgactgatatttatatatgtaaaggcactggcaagggaggaaagccaggcatcctttgggacaagtaggaaaaagtatattagtacccac

SEQ ID NO: 62817 - DNA, 1363 bp, Bovine  19866880792697
  misc_feature (1)..(1): n is a, c, g, or t
naatccagcaataaaacccaaggagggtcatcatgccctcctccaggggatcttcctgacccagggattgaacccacgtctccacggttgcaggcggattcttcaccactgtgccaccttactaattatgcagcctatctaattctgccctagcaaaagtcaaaactgtatacattgtcaaatatgttttctgtgaaaggacactctacctcccagataaaatttcctgagttaagaccagcagtggacatgacgagctgacacaggatgatgggctctgtcacctgggatgtttatctcgtcttcagtaaatgatgctattagataaggatagtcaaacaaagtgagcaacagataggatttttatgggtttcccccttgaaaaatatgatgataaattcatacaatagcatttgatttctttccctccctaccaggaggatcaagcaaagcaaatgagtttgcccttcagtttttgaagctttttgatgcatgacaacctaaagtacagtgataagaattaagctccacactttaaacgaacaataagccagtttttcaagctgtctcctttagtctcccttctgcttttttttcccttctcatttttagtttcacattatttttttagaggtgcaatgcaaaaagtggctaataaaataaaaacaggcataaccaatgattttctacctataattgcccctcattctaccatatgagcatactggaaaaattctgaagccactgacagtgtttctcttgataagaaaaggaaacaccttttaaacttattccgaaaaatatttactgtcaatgtattgaaaaaaaaccttatactcagaaaccatttctaatgcaccatatgtgtagaactatacacagggcacaccttcttctttgctttgaaaaatataaagtcagtgctgctataactgtatgattatcaataataaaatgagtataagacatagaaaagtaaaaaaagaaaagaaaatgaaagaaacacatagctaaaaccactaaacagaatgaatttagctaattaattttactactattcactgagtatctggtttgtgccaggcactgtcttggctgatacagaaaccacaagtgggcaggcgtgcagggattttaccttctgatcaatcaggaggggtaagggggtgcccctccctactttggccagtgttcggctttgtgtctaggacctttctgccacgttaataataatgaatttattttacatgctaataatagtaacacacagatgcttcatcactcccaagacatctttttttttttcttccacattttagcatctctgatttgggatatgtcttacagtcactaataagaggat

SEQ ID NO: 62818 - DNA, 2693 bp, Bovine  19866880813560
  misc_feature (1)..(1): n is a, c, g, or t
ngggttttcatgacattaaaaatatacatgtgagagaaaggcaaaaccaaagaaaataaaccatcgaaatgacatccacaaaacttccacaatggcacttttgatagactttattctaaaagtctatcaccttaatctcgaatgtagacacatggtagcaatggtaagagaagagaaacaggttacagtttgtatatttaaagtaaccaatacaaaaacagggaaacaaagaagggaaaagcctgtgggcagagctctgtttcttaggagtctctgggctttgcgaacatacctggattcctgatccttctgtaacgatgatcttccatatgcagtttaagttgttgccataaggttcagggaagccgggggataaaatggtacctctccgctgagtgaaattgccactgcaggggactgaaagccaaacccacacttagtgtaaataaagtacagtgaagaacactaattgtactcagtgccccttcgctgtgtgatcagctattaagagatattacatggactatgatacttgaaaaggcatttgtagccaaggtcagacttagtctgttttcttttaaatgatcaataccatagatgatcatctgctctgctgctaagtctcagacactgtacccaacaacagcatctctgaagtgaactctgtttagagtaattgctctactacaagttaagaagctctgtggagttttctcttccatatgcagacaggcagctccaacggatactaatgggatttgtgagcaaatccagagagaagagatgcttaaaaggcacagatgaattcaagtgctaatcatgattgccctggaggtccttacacaaaatgaagcaaataaactatcaccaacaatgtctttgttatttgggatgtattaacctactatttttcagatcttcatcagcaccaatttattaaaagggtattacacaagacatgaaacaaatcaacattataatgatttttcccccaaatgaaattatgttgaatacccatggcttgtgatggcatacttaataagtatcaaaaaggaaaacacatttcatacttgttaatctgatgacttatttcatgaaacacagtaatttttaggatttggctgctactcaattatttctgataaaataatttgccctttaaacagatctggagcaagagtccgcttacgtggaccagagagagtccttagtgaactgggactgcagaccccgtgcaggtgatcacaccgtggggacacacacttacccacgcagctggggatcgtgtcattccactgagccagagcgttgggcacagactggcagcggatggccgtggagccctggagcaggtagcccgggctacactcgaagcggacgatggaccctgcggagaactccgagccgattctcctcccgtacctgggctcggggacagagctgcactgcgtgtcactggtcctcgggacagctagaggcaagcacacagcacaagcatctgtgtctgcagcacaaagccacgatagctccttggaaacagatctaagatgaatccagggagagtttctgctgatgtggaaattaataatgtcttttgcagactctatgaggaatggctcagggagcactgccacatctacatgcctcctcaaatcaaccccgaggaccacctcagattcccatcacagatggggaaaacatggcccatggagaactggcgctttatgaggacagagtgatattcaggcactgaatttaactaagtacccagattattgtgccggtgataatgagatgactaagaacttgcgctcatccttaaggacctcagactctagtgagaagagctgctatataaaggattacttataatgtgaccatggtgattaaaaagcaaaattaaaaacagaactaccatatgatccagcaattctacttctgtgtgtttgtctgaaggagatgaaatccctcccctggaaaggcatctgcacccccatgtgcgtcagggtattattcgctatagccaacttatggaaacaacctccatgtccaccaatgaataagcaatgtcgtatatacatatgatagaatactattcagccgtctaaaaaggaaggaagttgagctacttgcaacaacatggacggacccataggacatggaagtggaacaagtctgtcatagaaggacaaatactgcacagttccacggataggaagcaattaagagacaaactgagagaagcagagagcagatggtggttgccaggagatggggggacgggtgcggggaaggcagagctaacatccaacggcagacgttcaagacgcccaagttctaaagatcagatcagctgacaaagctgtgccaacagttaacaatgctgtattgcctgagtgctaagttgtgtctgactctttgctaccccatggactgcagcccaccaggttcctctgtccttgggattctccaggcaagaatactggagtgggtttccatgccctcctccaggggtcttgccaacccagagatcaaacccgcatctctcacgcctcctgcattgacaggcaggttcttcaccactgtggctcctgggaagccccgaggtgccgaatcatgcactgtaaattttacaaaatgctaactgctcattttaaacaagatgaaaggacagcatagagggtaatctcatg

SEQ ID NO: 62819 - DNA, 1634 bp, Bovine  19866880827523
  misc_feature (1)..(1): n is a, c, g, or t
naaaatattagatgggtttaaagtatatatttgacattaaaaaaaactagcatttgctttcagggtgatgaacacatccttaatcatggtgatggtttcatacatgtataggtgtctcagaacatagtaaaattttcacatcaaacaggcaggtgatagtattttaattatacctcgttcaaaattttaaaggttttcagaagaaaacacccagaatatctttatgacttgagggtagtaagccttcttaaacactgtctgtaaaacaccaataacaaacgaatgcattgaacaagtagattattttcaaatgaaaacatgctattcttcaaaaagagaccaagaagaagaggaggaggacagagacagcatgagagaaaacattccacaatacatggattcaacaaaagagaggcccccaaatgcataagcaaggcttattattctataagaaaaaggtatgttacccaatataaataggaggaaagaaacaaattattcatggaggagggtgtactcttagccaaacaagcaggaaaaggagctcaaaataactcaaatgttcatacaaagtatcatggaataaacagcggtggtacatttatacagggaaacagatgacaggaatgaaggaggtgcagttaaatgccatgccctggatgtcacagtgtatgactgagtgaaagaagctggaaatagcaaagaaacatcctgcatgacttcctccacatagaatctttagggacaagggaactgtagcctttgtggaggcagtgactgggatgaggcaggactcctgggttgctggtcacattcatctactgatctgtgggcttgatcttatacaatatgcttgctgtgggaaaattcattctataaatagaagctctacctcatagagaagattctagataaacttcaagcactaaacagccatgtttttcaggtctaagaacttgcaaacagaagtcctgtttcagtcacatcctgaaccaccccataaaatgctcaccacccaaactgtttatataatttctgtgcacgtcttcctggtttgctgctccacctaccgtcacagctgggcaatgcgtggttccactggtggttccgctcacagaccaggggctcgtcgtcactcagcgtgtagcccgggtcacagctgaaggtcactgtggacccggatgccaaagtgactgccgtgccgatgcccgttcacggggatcccaggatcgaggcaggagtcagactccagagtcacacctggacacacagggaaaaccatcatatggagaccttcctaggttatagaaaaaatagtatctgtgccataatacaaacaaaatattcctagacgtgatcagacctggaaaattatggaagtgaatccagtaacccattcacatgaagacaaatatattttcaaatatttgcttttactgtagataggtgtatgctgttacattaataaccaggtagtagctagggagtaaaatcttgaataatttgctgacctccctgaatttctctttctttgaaaatcaatcaactgtactaaacaaagtctaagtctgttttctgtctctcatctctccttattcttatatttgatataccagtagatttggcaatcatac

SEQ ID NO: 62820 - DNA, 2502 bp, Bovine  19866880887281
  misc_feature (1)..(1): n is a, c, g, or t
nactatatttccctgtacagtataactttgtggcttatctattttatacatactagtctgtgcctcttaatcccatacccctgtcttgcctctccctctttccctttccccactggtaaccactagcttgttctctctatctatgagtctgcttttttaaaatattcactagtctgctttatttttcagattgcagaatctaacttatatgcaataagtcaattatatttcaataaaactggacagggggaaagacatgaccccaagaacaggagaagtgtcattcaggtgtcctgtttctctctgttcctcttcctatcaatcttggtggcatttgacaaaactaaccacagctaaaagggcttccctgatggcttagttggtaaagaatctgtctgtaatgtaggagacccagttttgacccctggtttgcaaaggtcccctggagaaggaaatggcaaaccattctagtattcttgctggggaaaccccatgacaaaaagcctggcgggctgcagcccatggggcctcaaagagttggacatgacttagccactaaaccaccaccaaccacagctaaaaccccagcactctgtggaatccagaatttagaatttcagttaagccagcatcttagtctcagtaattcaatgaacaaccattctacctctgtcgtgagctaggcctggtatcaaaggtggacaaaactctggcctcatttacaatctacgtgtgcatgtggccaaagacaagaatgtgtggtcaacgttccacggaccccacgagtcctgagaaagcagagagggtgggtggccgtctggtggcacctgccgtgtactgtctgcaggtagacaggaggcgcaggagcccagggtttatgaccaactcattcctataaaacaaccctactctgctcggcaactggcagccccaagggcctctcttgctataaacaacaaatgattttttaaaatgaaaatgtacctattaaattatcttccaataaagtaaattagggagggatgtcgtgtagttacggccgctatttacaggaaatccatcttgggactccgaggaagcgagatcaccctggagcccgtcttccctggggtgggagggcctagaagtctgaccgctggaggctcagccgacgtttacttaaccccccagagtaaaggtcactcctgtgaactgaactccattttcttgcattttatgcatgattaaatggtaattaagctttaatgaaaagtgttaggctgattacaagtaacataattgcactcgtcagttcttgtcctcatgcgttacatgctgtgtggagctggcgggacaatggaccttgagcgggcttgaataccttgtgagcactggtagttctcctttctaggggagggggtgctgttctacagcacagggcaggtaaagtgcacggcagggaggtgtgctgtgcagctgctccatcagcggcccgtcgaacctgcacatggacgtgcagcactgtggttaagggtcaccaccaataaccagtcgttcctcgcccaaggttgccttaacgctgggaagaatgatcatttttataaaataaaataaggaaatttaacaaatcagaggttaaactatgttcatttaaagtggatattaatctttataaaatgaaaatggactgcttggtttctacctggtatcaaaataattaggtaaagataaatgtataaagaattataaaacttaaaaaggtcaacaaagatgcatacgaaggcaatggcaccccactccagtactcttgcctggaaaatcccatggacagaggagcctggtgggctgcagtccatggggtcgctaagagtcggacacaactgagcaactttacttacactttttcactttcatgcattggagaaggaaatagcaacccactccagtgttcttgcctggagaatcccagggatgggggagcctggtgggctgccatctatggggtcgcacagagtcggacacgactgaagcgacttagcagcagcagcagcagttaatgctacttggtgttgctagggagaactgttagctactagtgcttctgctgctcaactgaatgcataatatttagagatgcccatagaagaagcagcttgactacagggaaattcctaaaatttacatcttccaccctggttcaataattttatgcccattttactttaagtgaagcacagagaggttgaataatttgcctcagttcatatgtgttatgtggatggatcaggattcaaacccaaatctttctgtctccacaaacccaatggcacagttccacttttcactcactcctagataaagatgaatgctaaagttattacatgctgtatttaaagaagagagaggagttcccccagatggataagaatctgcttgccaatgcagaggacacaagtttgatccctggtccagaaagaaagactccacatactgctgagcaactaaaccaacgtgctgcaacta

SEQ ID NO: 62821 - DNA, 1292 bp, Bovine  19866881195910
  misc_feature (1)..(1): n is a, c, g, or t
ncaccgtcacatcttggaaaagggtagttccagtttctgttgatcccatgctgacaggtgagcactgggtggccaattaaaatgtacccaggatagcactcaaaagatattgattgtcccacactgtagtcagagttgaccatatacccattctggaaaggtggtgggtcagggcagttctgtaattcataggctgaaacagacagaaacaagctcataaataagaagtgcattagtctggaatttagaggaggaataggatgacatacagcttcttagcatgaactttttagatataaattttatgaaatctttactaagatacccattatcatccagtcgcatcacttcatggtaaatagaaggggaaaaagtagaagtgtgatagattttatattcttagtctccaaaatcactgctgatggtgaattaagccaagaaattaaaagattcttgctcctgggaaggaagctaaggaagctaagacaaaccccaaaacagcgtattaaaaagcaaagacatgactttgccaacaaaggtccatctagtcaaaactatggtttttccagtagtcatgtatggatgtgaaagttggaccataaagaaggctgagcaccaaataattgatattttcaagttgtggtgttggagaagacacttgagagccccttggactgcaaggaaaacaaaccagtccatcctaaaggaaatcaacccgaatattcattggaaggactgatactgaagcttctatacttcgaccacctggtgtgaagagctgattcattggaaaagaccctagcgctgggacaggttgagggcaggaggagaagaggatgataaaggatgagacagttcgagggcatcaccgacatgagtttgagccaactctgggaaatagtaaaggacaggaaaacctggtacgctgcagtccacagagtcacaaggagttagacatgacttagcacctgaacaacaacaatataaaacagtacttgtttttagtagtataatcataagaatttgcatttagtgaagacatattgtgcactttagaagttatatggtacatactaaaaataaatttgacaagacataccttgggaagaaaatatatgagaagaattaatcaaaacaagttcagacaaacaaaaagtgcttgtaaagaatgtcaggtgaacacagacctaacaattttaatttaaaagaaaattaccccagctctcctatccaagtgcttctaactagaaaacatgctattgttttgtttagttcaattaatgttcagtgca

SEQ ID NO: 62822 - DNA, 1695 bp, Bovine  19866881199246
  misc_feature (1)..(1): n is a, c, g, or t
nctgttctaacgccaggcgccacagatgacccacaggcaacaaagccatacattcaaaacattcctgtaaatacgtaagagtgtcaagcatgtctctgttggagagacctccataagctaaatcattttctttatacatctcagtaaatacgtttagttgaaagaaatttggaagcaaggaaagaagaaagacagagagagggattgaaagagacagagagagagagggagagggagaaagtaaagaaggaggaaggcaggcgagaaggagagaaggcaggaccgatgactcctagcccctcctcctcacctgtcacctctctgccacctgctgtgagagctgagccacttggccagtctgtaagtcgcaggtcagttagcatctgatctacttccttacctactgttgagctaaaaacagtttgcttttatagcctggcccaacatctgacaataaagagggttgttttttcttttttttgactaattaataaactatactaatggatttaaaaatatatatatttttggtggctgcatcaaggcctagaacctgtatggtccacagagtttcataaacacccatcacattcttcacgggaggaagaacacagaagccgacataagaacaatcaaaaacgaatgacgaattattgaaatttctatttttcatccaaaaactatgagataggatgtgaaacgagggcaagattagaacacttaaaatatttatttcctttttgggtataaaatcaaatggcagggaaacggcttaaaacgggctcatttcagatgtgcatatgcagatgtcagatgaattcattcagagatacatttgaaattcacagaacggcctggttgagaaagaaatgagagattgcaagcagatcaaggggcacaaaaaccctaaaagatggccaatatctccaaagtaaaggaaatagtgaaagtggcctttccctgatttggaattaatcttgaaatggaaatgggattatgaaaattataattttatgaaaacttagcatattaagcaggataaagtatccagccccatatcaaaccacctaatatgtatcaggaaagagaactgagcccaactctaatctggtttagaatgaaatttttagctatctaattttcagcgaattgtgtccagtttgacatcatgaagccaaaatgaagggattaaaataagcgtaacctagttatccttctattatctcacagaataccaaaagtgtgttattgcaacaagaaaacccatctgaatgcccatctagggtgaaatttacactgaccgtcattacacattggaaattaagtgtcaggaaaaggcatctgctgaaaggattttgaatctggacttgacaaaactttgaatatgtaagctgaccatagcttcagagttaaactcttgtctcttggttgacagaccctgtggatagtaagtgctctattgtacatcatctgtgcataataaatatatagcaaatgagtgaatagtttcagaatttagagggagtattctaaagagtcttttatttcatccctatgcttctagatggcccaaagccatggccaattttgaccccatgctgtgtgatgtaagtgcaagggtttcaaatataaaaagtaaagcagaaaacacaaatgatttaatcctctgttaaatatgcttttagaaactttcaa

SEQ ID NO: 62823 - DNA, 1318 bp, Bovine  19866881259157
  misc_feature (1)..(1): n is a, c, g, or t
nttttttattggaactctattaaactcattctatttagtatttcaagaatatatcatatgtcagtcagttaaaaaaaatggaaaggccttgccttcaaggagattataaggttagcaaaataataaacacgaatatttattatgcaaaatcaggcacgaggagtgctttgatgactgaaggtacaaaagacggtgattactggggaagtgattgagagtattatcttcatggttaaagcagtgtttggctttaaagtggttccatcaaattttggattagaggggtattgagtgcatatcttaccctagatacttttttattgtttaactttacaataataacactgatttggtatctcagaaaactgacttcatttttgtagttagatttgaatggcacgtactagtttgctactcagagaccatcccagagagaagaagcagtgttagcaaagacatcctagaggagcagtcttggggggaaatgaagtagtgtcctaggatggtgcttgaggatgagggtttcttagaaatgttggaatcgggtgatgggaatgacatcaaggaggatctagattcagtgaatatccttgtctgagcagaagtcacttcttcaaagcttctatttgattatctaatttttactatgactttgaaatttctacaactttaagttaaatatatcgagtactttatttttgaagaattcatctgaaatagaaaagtttgctgtaaacctaatattctaacattataaatacagtatttctgaacgaacatataatgaaattaccaactctgtggacctttgaaatgctaaatacttatatcccaggggcaaaaaaaggaaaggtatccagctgtgtttgaatttctactgtagaagttaaaaaaaaaaagcatataggtagactttttagatggtatttttcacctgtatgtttccattctttatcattatgtaaacaactataaaagaaaaacatttgctgtgtttcttaaatagtacttttaaccaactacagatttaataacttaaaacagcatttaaaaatcattttataaaactagcaacagcagtgggatatctgatattttttattaaaacactttaaaaactactcaccattttacaaattcatgtttttatgtaaaaattgctttgaattgttaggactgaaatccctttttacttgtagttgtttcctgagttctttgaattcagatgtaagtaggagactccttggcttgatataaaaaatagaattaagtatttaattgtattccatgctttttcaagctcaactttccaacagga

SEQ ID NO: 62824 - DNA, 1508 bp, Bovine  19866880417977
  misc_feature (1)..(1): n is a, c, g, or t
ngggccttgcctcagacgtggcctcagagacgcacccctgactcaagaatgcccgctggaccgagcctttgcacacggagctctcagaagggctgtcccatagcaggggcaaacggcacgctttctacaaaggagggtggtgggcgtccagccatggggcctggggcatcagcagcttccatacaccagggaaccctgaaaaacggtgtaaaacgccacgaaggctctgtcagatgtaaacacggcagatttcatgtctcgctgggaacaccgcctgagaaactccgacacgcaatgaatatgtggctcccagaccccaccgatgtcaggacagtgagaaggtgagaacactccctccttggagtggatggaagaaggtgtgtggacagacctcaggagcaggtgtggggataagacaagcagattcctgatggcaggcccagcccagccccgtgactaacacggggagcttctctgggtaccaaccctcacatccatacatgacttggactgcaaggagatcaaaccggtcaaccgtcaaggaaatcaaccctgaatacttattggaaagactgatgctaaagctgaagctctgataccttggcccacccgatgtgaagagccaactcttcgcatcaggtggaaggtctctgaaacgatcctgatgctgggaaaggttgaaggcaggaggagaaaggggcgacagaggacaagatggctggatggcatcaccgactcattggacatgagtttgagcagctctgggagatggtgaagaacagggaagcctggcgtgctgcagtccatggggtcgcaaagactcagacatgactgagcaactgaacaaccgcctcgggtaccagaccagtcagcctcaatccatgtgcatatgaacacctctggcacggcccacaccaggtctgcagagggcagacgctcccaggtccctgcctgtggggtcctccttgggggctggggggctggataaagccacacctgtccagatgccagacagcctggtacccctagaagcagaggccaggagaggacatccccctcgctctctgactcccaggtagagccagtcggaggcgtcccaccctgacaccccaggctcacccctgggtcagcccccacccaagctcgggccttgaggatgagagccagaccgctggctcacgcgcagcaaacatccacccacccccatggaaactcagccaggctgccaggtccccctgcacagagcctactgcgccgctgttccctgattaaagctttacaggatcaacagcaataaagccatcccaaagaaagccatctgaggcaaagcccttttttaagaaaaaccactctctccacaggcaaaaaccactgaaaaataacacagctatgttgaggcagtttcgctgggtctctgcaaaggccctcctggtgttacctggaggcgaaccaggtgctgggggtctgtctgtccccagagagctgggatccggcgcgcccaccccacg

SEQ ID NO: 62825 - DNA, 2204 bp, Bovine  19866880421547
  misc_feature (1)..(1): n is a, c, g, or t
ncataactaattattacactgggagattttttaaaatgaaagaaggcactaaagtcatcaataagcattaactgagctacaacatgtatgaaatgggaccatcctggacaaaccaaactgtagcatcatccaatttgttacatctttgtaggcattccttgggctggccgtcatcttagccagtcagatgactccagggcagtagagaaaatatttttccttttctacacagttaaggctttccaagaaaaggaaactaaaatttgggttaaaaagcaaactttggaagctaaagagtgttagacttaaaactgttagctcccatttctaggataactaaatttgtctctccaggaggcttgcagtctagggtagggactgtcccctttacttcctaagacaattggtttccattcaaaggattgtacataacaagagagtcaaggcttttctccctctctcagaagcagcgtttcgattaattgcttttttcctgtgtataggtcagactttcttgtttctctatatgtctcatacattttgttgaaacctggacatttccaataatataatgtggcagctctggaaatcagatccctactcccctccaccagggtttgttgttgctgcttgttgaatttgtcttgtgacttttctgaactaagtctataaaatatgtattctttgtcaaggattaccactgaggtctctgctgctgctgctgctaagtcacttcaatcgtgtctgactgaggtctctactcagcttcataatcaactgatgactgaatggagaatttcttaaagtcttaaatgaatctccaatctttgccgagggcttctgtgtgcaggttgaagtttgtcttccacattcaaccaggcagcgtgtgactccgccttagcctttactccttacttatacagagcctcaaggtcaaacagaggtgagggcacaggatcttccagcatccatcataagtgtgtacacggccccacatatgcacatggataattcattcttcaatgaagaacgcaaataaggtaattcatttaagcttgtgtttaatctattgtttgtcttgttatccatcacctgaggcacctgtgaagtacctgtatttgtttctaaacgttttcaacaaatgacccagagaaagggttttagccttgggtgctgctgctgctgctgctgctgataagtcgcttcagtggtgtccgactctgtgcgaacccatagatggcagcccaccatgctcccccgttcctgggattctccaggcaagaacactggagtggcttgccatttccttctccaacgcgtgaaagtgaaaaatgaaagtcaagtcgcccagtcatctccgatgcttagtgacccccatggactgcagggctacctggctcctccatccatgggattttccaggcaagagtactggagtagggtgccattgccttctcctatgcttcatagagcccggcattttgcatgacgtactctgcatgtaagtcaaacaagcagagtgacaatatacaaccttaacttactcctttcccaattttgaaccaatccattaagatagccatataatttttattcttttaatctgtgaacatagtggaatgtgtttaaataaatgtattgctagattttgcctttttttttaaagaagtttacatttatgaggacagaagagatgaatgtataattttttctaatattatccttttctgattaaaggaacaagttttacatgagaccatacaagcgatcagggagcttttgctcttatagtgttccctggatatgatatggatgatctgattcatgaatatttggtgtaactcataaaatggtcagtcaagagagttcttggtgtgttcgtgtgtgtgtgtgtgtggtgaggtgtgtgttattcaagtgtattacttattcttgagtcagttttgacaagttatgctttttccaggaaactatttttcacacttagagattcattaacagatattgatagtattttttattttctatcaagcttgcatttgtaaatatacttcaccttttttttttaacttccaacattgtttgttatttcttttctcctctttattcttgagaagtctcaccaaagatttgtttatttttattagtattcaaagaataagctattaatttggttggttttctctaaggcattcaagtaatct

SEQ ID NO: 62826 - DNA, 1886 bp, Bovine  19866880473061
  misc_feature (1)..(1): n is a, c, g, or t
ntcccacgctcactttgtagttctaatggcctcctggccggaggcctcacttagccattctggcatcccccaggtcgtggggtggcagggtggggcactgggtctgcaggactctgaagtctcgcctcgtccttgcccctccccgccctctgctctgcccaccccaggagatccgcatgttgaagaaggtcgtgtctgtctacccggtgagtgcctggttcagggcaggagaccgaggtggggggagggcaggaaggatggggagggcagaggccgtggaaggccttccaaaaccagttctgagactccccggggttgcacagggggcccttggaggggccaggaccagagggcacttggggtcacaggcctcctcctgcctgatcagaggaccacagacccaagagcttcagggagagatgagggcctggggctcgccagtgggtcgctgaccatgcagcagggcactcttgggcagggtgggggctggcccaaacgcaggctgtgacacccgaccagccccacgcagccaccagctggcctgtggcccaagtaagaaagcggccagagaagtcgactggtcatcactccctggggacactccagggtggtcctcaagtgtggggaccccgggggccactgtcgagttcctccgggtggaccgaccactgtggtcactcgtgggtccagcccagggcacctggaccccaggcgggcaggtgctgagggcgtctgtcgcctcggccctccagggagacgtgctcatcacctcttgcacatacaacacggaagacaggaggctggccaccgtggtaagtcaccccaacgtcccgcccctgccgcagagctcaggcaccagtctgagctctgctggagcgcagggcgggggtgcccctcgctcactcatccagtaaagcagcagctctcacgctgtgggccctgggccagcatcagcatcccctcttcagttcagttcagtcgtgtccgactctttgcgaccccatggactgcagcatgccgggcctccctgtccattaccaactcccggagcttactcaaactcatgtccatcgagccggtgatgccatccaaccatctcatcctctgttgtccccttctcctcctcctgccctcaaacatcccctgggtacccaataaacacataaactcatcagttcctccccaggctgggtggtgactcccggcgatgtctgctttaatgagctacctgggttattttgatggctgccctagtcggagagccaaggccacagacatgtgtcagcaccggagcccacgctggggtgaggctgggggcgtgagggggctccctgcctcctgcgaccggcaaagataggataaagccgaggatgcggaggaggcgtcgctccctgagctgcacatgccggctgactgctgtgctgtctgtctctctggcaaaggctgaggaccccaggagggcagggcctctgcccactcagaacacgatctggcctcgtgtgatgagtgggtgcacgcgtgcgtgtgtggaagcactgaacacccagagaggctgaacggcagcgtctggggtgacactggcgcgccagtgctgacggggtcgtctccaccctgcaggggggcttcgggatcctggaggagatgtgcgtcaactatgtgcactactacccccagacgcagctggagctctgcaagagcgccgtggaccctggcttcctgcacaagtacttccgcctcgtgaacaggtgatggctccacggggcatgcccgctgtgccttccatcctgggcacggcagggcaaccccggccccgaacactccccccaaccccaaaccctccaggccctgggcgaaagcagggcgcccaggagcaaggtgagcaggaa

SEQ ID NO: 62827 - DNA, 1466 bp, Bovine  19866880482280
  misc_feature (1)..(1): n is a, c, g, or t
ncagggcgggaatcgggaaggggctcgggcctaggtcagggaggtccacccggaagccttcctggaaggggcgttacctggggagcggctggaggccctggaggctgtgcgttcccaggccttgtacgggtacttgagtgtggtgtccagctgcttgaagctctccttgagcgagtggtactggtagtactccaccagctcctgcaggatgcacgtggcactgctgcctccgcctccaggcagtcctcccgggagccctgccctgcctctgcccctcctcctagccgcccccgacctcagctcccagacagggggcggggcgcggtcagtatggcaaagacttttgatcctgcaatttctctcccaaacatttctaaaggaagagccgcgggaagaaggccaggacggatggccacagacacgccctgcaacactcttcacaacaggaaaaaatcagaaaccccccacccacccaacagcagggaagtgcttctagaatgcacagcatatccacgtgactgagtgccgtgcagctacagcggggctggaagagagagggccgtccccctggtgagtgttcactgtgcccagaggtaaactaaggttgggtccatgtgaacagtggcattgtctggaaaaggaacccataaaccacgcctgggctccactccaggctggggggactcaccctgaaacaagaacgtcagggttgggggcacgttgtggggcactttcccttttaccgtgggctttcctgcggccacagtgggacgtctgagagcccacgtgctcgggttagacggtctccacacacgcaacacgtgtgattgagcaaagaaacactgggtctaactttaaatcattttaaggaggactgttcatgtatttatggctttctggctgggccgggacagttctgggtgaggcgggggcaggcaccggaagccccgtgtgcgtgagtccggccggccggcagccagacctggatgcagcctccctgggcctcggtttctggctcccgcagaggctcggcgtgaacgcgctgtgggaggctggtgaccctgctgtccacctcagggtttgggggacagaggtgctgacctgggagctgccttaccggtcccaaggtgccttacagaccagctttcctggatctttctcacactggaagcaccccccgaccccaccatagaagagcagcccctagcccagcggtgggggacacttgctgggccctccccactgggagcctggcctgcaggacacttgctgggctcctccccggggtggcctcagtgggagaccaaggccctcctcccaccttcggggatgggccagtgggagctccccaggaccacgcacgtaccaagaggctctcaaatttcttggcttctgtgatgtggacccagctgtccttctccaccaccttaatgtgcttcacctcgtcgttgaaccggccaagcaca

SEQ ID NO: 62828 - DNA, 1188 bp, Bovine  19866880507717
  misc_feature (1)..(1): n is a, c, g, or t
nccgcccccaggccctgcaccccacctccgtgcccctcccacctctgtgggcagcgtcagcccctatgccctggatctcacccctggggtgccacatgcctcctcctggcaggcctgtcccatctccacccctgtcccagccacagcgctcctaggcccatccccatcccaggaaggggcggctctgagaactggaggagagcccagctgggcccctcacttccgagacggcaggagtcggggaagctgcgctgcccgtactcacctgcgctgttgaagccgcagcccaggaagaacccgcggagctcgggcgcctcccccatcaggggcttgtggtccggggtgaatgactctgaaagggaggggagagcctgagggtccctcccggccacatgctcctgggtgcaatctcccaagaggacaataactgaggtgggagtgggcatccgaggccgcttcctccctgctcgctcctgccacgttccgcttgaggtcttcctcactgatgatctgaactgggctccgcctcgtggggcccggggtgtgtctcgtgacttgctgctggcgggggacctctccccgagtccctggcacagcttcccgtccctgcgccagcttcccgctgtatcacagcagggcattcctgcccgtcgaaccccgggcaatgcaagggccgggctttgctcgctgccgtatctcaagacacagggtccagcaaacagttggtgcttgatacatgctcgctcagtgaatgaaaggttgtaagttctctgggagaggggaccaagcctctggcttctgtctgccgccagcgtgctggggacggaggctaggactggtggagaggaacgctcgagcatgattaaaaagggtgtccctggtggctgagatggtaaagaatccacctgcaacgcgggaggcccaggttcaatccttgggttgggaagatcccctggagaagggaaagactgcccactgcagtatcctggctgctacccactctggtatgattataaagagccgcacttggcagccacagtcctgggtttgaaccttgctttactgattcctggctgtgtgaccttggctcataagagccttggaccctcgtctgtaacacagggatcatggtcccaatgaccgcggacttcacagggctgtgagttactcggtcacaaatatttgcag

SEQ ID NO: 62829 - DNA, 1808 bp, Bovine  19866880540031
  misc_feature (1)..(1): n is a, c, g, or t
nactgctctttgatgatccgtgttggcccccaccttggggctgggaatgttcaattagcgattagtccagctcccagtccttccaggaaagctgcctcacagagttgcaggctgcgtagccttctccacctaactcagccccagcccaggccctgggccctgccaggagctcgcaggggctgagcgagatgcctttggatcccggtgggtcctggatgaggagggaacccagcctgcagcctcagaccctgacttctcaccgcccccaccccctgagcgctgtgttgttaggctccgggggaggctgcggatgccccactcacaccactgaggttagtcccgtgatgtgccggcgtgccagagagggcggcaccttcaggggcagtggttagcaccctccgtaggtggtcggctgtctgtctgggctgtctctcaccacctggtctttgttttgtgtgagtgcttcttgccagctccttgggggaggagccctgtcacccactggggtcctctaggggttctggggcacagcggtgggcagaacttgctgctgggtgtccggaaggggcgactgtgtggccaagggcagccagccggccccagccgatgcaccctccccccaacatgggcagccacacctggcagcagacaaaccacacacgcgcgcgcacacccacgcatatgcacgtacgcacacgcgcgcacgcacacacacacacgtgtacgcacgcacacggcagcacacctggaagcggacaaaccacacgcacatgcgcgcgcacacacacacacacacaggcagccacacctggaagtggacaaaccacacacacacatgcacgcgtgcacacgcacacacatgcacgcacgcacacatgcatgcagcacacacacatgcacacacgcacgcacggacacacacatacatgggaggccacacacgcacgcacacgtgcacacacatgcacacacgcacacagcaggcacacctggaaatggttgcccccccagacacacacacacgggcagccacacctagaagtggacaaaccacacacacgcacgcacgcacacacgcgcgcacacgcacgcgcgcacacgcacgcacgcgcacacacacgtgtacgcacgcacgcacacggcagcacacctggaagcggacaaaccacacacacacatgcacgtgtgcacacgcacgcacacgcacgcacgcacacacgcatgcagcacacacatgcacacacgcacgcacggacacacacatgggaggccacacacgcacgcacacgtgcacacacatgcacacatgcacacagcaggcacacctggaaatggatgcccccccagacacacacacacgggcagccacacctagaagtggacaaaccacacacatgcacacgcacacgcacgcgcatgcacgcacacagcggcacacctggaagctcacaagccacacacacgcacgtgcacacacgcacacgtgcgcacggcggcacacctggaagcggacggccgaggacctgttgcagtgcatggagatgggtgcgaagccgtacagggccttgagcacctcgcggttgaaggagttccagggcacggaggcaaactgctcagggacagacgcctgggggcaggtgcagacttcctcgctgttgaacctggtgagagaaggagccgtccagagtggggtctgggggagcggaggggagtccaacaaggcacccgtgatgcctccctgaagaggggtggggtccccagagcgggccttctagcacactgccctggccctgcctcccgccctgacg

SEQ ID NO: 62830 - DNA, 1230 bp, Bovine  19866880621910
  misc_feature (1)..(1): n is a, c, g, or t
ncagcacggcgccactcacgcccagcttggccagatggtagagggtctggcagcccaggctgcccccaccgatgaccaccacgctggctgtgccaggcaggggctggcttgggccctgggccgccgccgaggcgtcctctgcctctttcaaggtccgctggtacggcacactcttctcagaggtggggccaggcccgctcaccaggggtctcagcccccagccccgggcagggctttggcgaggacgggtggccgcgatgccacgcagggctcggctcagcgaggccatggggagtcagcttcagcaccacggggagctggggagagagctggggctgtctgggtgcggaagggaccagtgggccctgggccccccaggctgcgaccctccagcttccctcctgccgcccacagcatacgtgcaccctgcattcatccagccaggtgtatgggggtctgtatgcttcaggctccggctgggcccagggaagaccacggtgggggagaagggggcagtgttcatgctgagacaggaccacggtggggtggcaggggtcacaaggccgggaccccaaccctccagcctacattcagcttgccctccaggggaactcccgtctcaaccccacacagaagttatttctgccacgttggcccccacagccctttgggacccaaggcagaaggtgaggaaggcagtgaggcccggcctccggctgccttgggccgtcttgaatctggagggtgggtggctcttctgtgacctcgcagtagcctgcagggcttaccttgcctcccttctcctccaggaagccctcccagccctccccagccagaagaccctcacagttataagaagacagtgacagggagcccaccttctaaggagaggaggtgcaggcgaagtctccttgggggagggtcccggcgggggacaggacgattctgaggggccccgggcccacctgtgggtcagcaggagagtaagaggggtgtggctgagactgcgttaataaccgtgacggcgtcaatcagccgatcattaacgaagtccacttgcgttttcaagcgtgcattacacggcaagctgggaacacacgttctctctgctctaaaatcaagatgactgttgtccccgtttcactgggtcgagggggactgaggcccaaggaagctggccaaggtgaccaaggtcacagggccaccgtgtgactgcgcctgctggctgtc

SEQ ID NO: 62831 - DNA, 1356 bp, Bovine  19866880651580
  misc_feature (1)..(1): n is a, c, g, or t
nccggacacacacacaccccacaaacacacgccagagacacacaccccaccaccaacacacgccaaacacacacacgccatcaccaacacaggccagatgccccgcccgtccagcgccacagcccccacgaattcctgaggccccccggcacacccaccctgacaaaccccgctgggcaccggtcacccctcattcggatggttaaaaattcattcacggcagcagattggttattacatctcggccttaattaaagagggccgcacagcggcattttaaacagcaatgtcactttctaattgacaaggctccattatcgagagaaagactcaaacgggcctgaaacggagccagctcccctcctccaccctcccggggtgggggatgatggttcggcttcaatttttaatccactgatgaaatattcacaggccaggaaggggatcacgtttcccggggcgtcagatcctcgccccaccgggggctcctgtgctgggagggagccaagtttggggtgacgcggtcaggtcagggcgggggctggacacctgcccacgcacagccagctccgtcccatcgcctggccacgcgcacctccctgcccggtgccctgccctgggcccacagaccccaataaggggtgagcccccggaggggagcaacagacccgaggccaccagcagcttccccgacctcctgtttccagccctgccttgtctggatctccacggccggcccgcccccagaagagtcagcaccgtccccagagccatcgcttcctaaggggaccacagagagcggcctccgccgccagcatctgttcacgagctggcaggcggacctcacggggcagacgctcctcccgaccgctgcatcggctgcccccgctttacaggcggggacgctgaggcaggaggccctgccggccctcgcagggcgtctgcccaccctgacccgggagcagagaaaggcccgctgaaaacacagatgaggacagaggggacccgggaccctcagcccccctgcaacacggccccgggtgctgtggggcggacgcggagcctggcccacctccctcccgcctgcctcccgacccaggaggaaaacatctggggtgagccgctgcccggggtgggagggacagtccacgaggccccacacagccagccaggcgcccacatgacgaccccggctgcaagtctggaagcgtccatcagctgcgtgcccgctgggcctccaaggaggaagaccctgcgtggaaactgccggcctccaaggagcaggagcccacggcaggcgcccccggaggcctaggccacccaccagccaccaggggcctctgctccgcccaggtg

SEQ ID NO: 62832 - DNA, 1029 bp, Bovine  19866880722496
  misc_feature (1)..(1): n is a, c, g, or t
nttatttgctcccggtcatcaccctttggcaaatttccaagtaggggagcccagtttgggtgagttctggcaaagtgagaatttaaacccaagaagcagtgatagattttattttcttcggctccaaaatcactgtagacggttaccgcagccatgaaattaaagacgcttgcgccttggaagaagagctatggccaactacagagtgttttaaaaagcagagacatcactttgcccacaaagatccatatagtcaagactatcattttccagtatcatgtacggatgtgagagctggaccataaagaaggctgagcgccgaagaatcgatgctttagaactgtggtgctggagaagactcttgagagccccttggactcaaggagatccaaacagtcaatcctaaaggaaatcaaccctgaatattcattggaaggactgattctgaagctgaatactttggccacctgaacagaagaactgactcattggcaaagaccctgatgctgggaaagatggagggcaaaaggagaagggggcggcagaggatgaggttggttagataacatcactgactcaatggacttgagattgagccaattccaggaggcagcggaggacagagaagcctggcgtgctgccgttcatggggccacagagtcggacacaacttagcgactgaacaacagccacagctgcacacccgtggctcctggatgaacgaagtgcacagcagggaccctcagcctgcgcccccttccatgtcccggttccctctgcttgctgactggctctcagaggcccccgccctggccgcgggggtcatccctccctcctccggcctggacgctctgggctcgggctctgcagacctggagcgctcctccggaacccaccagaagagctgagcacgtacaaccattttctcggatgaattataattttctttcatttccccttcaaaacacgctaattaaacggacattgttgagacagccaattgaaattcaaaaaaccgtcctctttcta

SEQ ID NO: 62833 - DNA, 986 bp, Bovine  19866880992224
  misc_feature (1)..(1): n is a, c, g, or t
nctcacaggctaagtttctgcttctgtttgaactgagtcctgcagatccccagcgtcccccggcaggagcttcgtcacggcgcttttctccaggggggagatttggcaaaatctttcgtgggtttctttttttcctcaaggaaatgaagaaaatgtgctgccgccctgaatgcagggtttgaaagcattctgaggccgaatagctctggcccgcgttgcccctcacctgctggtcggggcagggcctccctcgcagccgcctggcccaggggctgtctttggtgccctggcctggagcccctgggtggccgggccttagagctgggtgccaggaggcagctggggataggggagggaaggggctgaccaaagagcgccgcccttgaacatcctggggaccggcagtgggtctgtgtggtccggggcctcagtttaccttctccaggcaaagctgggactcgagtgaggtgcgcaggtgcagggcttcactctctcggggcctttgagtatgggctggtgcccacaccccactgccagcgcctctctctcccttcattctcccctctccaaggctctgtgtgctgtcaggccgctgtcccccagaccaagagggattctttgtctaggaccccacgtccccagtcctggcacctcctgggtaatacagtttctgggtcccacccagaggtctgggaacctgcttggctgaccagcgccggctggcatttgaggtcacctgtcaaggccaggcaccccagggcggggtgtgtccaggggctgtgctgtgggtgaccaccccggccccctcggcccggccgcttgggctccaagcctgaccttgtctctgcaggatgcctggagtgaccagaaggggcaggtccacctggactcccagcaggattaccagcttctgcgggcacagaggactccagaaggcctgtacctgctcttcaagaggcttttggcacctgtaccccaacgactac

SEQ ID NO: 62834 - DNA, 1786 bp, Bovine  19866881007377
  misc_feature (1)..(1): n is a, c, g, or t
ncaatctccctgatgtagtcacttgcccccataaagataacgggaaatgattcataatatttatttgacagacatgatatgaaccataatagcctgttgggattaaaaatatccgtacgtctctgtcacccaccaatgtggtttaaatattatatatgtggccactgcagcaaccgggagaagggagcgattattgatggcagccgtgaaggggagttgccgtgcgctgcaggatgggagcgtggcgacggaattcacctggggctcctcgtgcctgcgtccagagaagctgacccaggaaacattgccccgcacctggcttacccccagaccacccgccagccgggccacagctgccctcagccagcgccatcccaggagggcctggctgcagctcggggtccgaggaagcagccacccagcggagggcagagccctgccaccccacgcccagcaggttaaaaaccctttcctgctccccatcgccctcgggataaagtccaaactcctaagaaaactggccaggccctcccttcctgccctgagtcatctccctcctgccagcacccagccctgcccacaaagctgcccgatcctgggcagacggcagctctggaccactgtccacaccggccactccacattccaccgaaggcccggccccaccgtggcccctgtgggcagctggctgactgctcccaacacgcacgccccaaagccgggtgagcctcctctgccgcaccagtagcccacaccctcccggtgcctccgggagtcctgctccctggatgtccccaccggcctgagagcccgtcaaggctggggacctgggcgtgggatcaccaactttccattgccctacctgggacattgtgggagctcacgatactcatggagtgggggcaaggaaggaagtatggtgttgttttcacggggctggcttcctctctgagcctggggatgggctctcagggtccctatttacatctcagaagttttgtacttacgaaaacaccctttccctttcggggcctcagcttgcccatcagtacaatgggtctccagtccctgagtcgggtatgttctctgagaaagccttttagggtttgctttggggaaaacccagagacagcactgagaaagtctccaggggatttgaactccctcctccatcactcccagcctgccccgtccttgctggtcaccagccccagagcccccttcagggcgcccccatcctcaggtcgatgatgactgctggcatttgtttctcccactgacgagagtccacgccccccagaggagccacgtctgagcttaaaaaaaaacaaaaactgcccagagaaaaggggctgccctggaaacacggtcgcccgggaggagagtcagacttatctgcctacagggggccagcctcagcatcccgcctccccgggatgcgcagcgtcaccctcacaggcaggatgggaaggtgagccccagcccacaccctgttgacgagccaaaggagacggcgttcctcctcgccacgggcgtggacctccactcaccgcccctggggacacccgctcctggtgggcccctgttggccactttccccgcctcctgcttccaggcggtgctggccacatgtgggacctgctgggcacctctgccagcacattcccaggacaggggtctctgctttggtcctggaccgccccacctcgcccccagagtgcccaaaccctgcatgcatggggctgccctcatctcgcctgggcactccgccctcacctccccctgg

SEQ ID NO: 62835 - DNA, 769 bp, Bovine  19866881073409
  misc_feature (1)..(1): n is a, c, g, or t
natctggacacaaccccaaaagacagactgttccgagaagcatctgagcaaactcgaccatggagaccaccaagcccaggaggtcatctctgagactgcttccagagacagaaggtttaagtgatggcacctgcttcccagaggccatagaaagtgaaagcgaaagtgaagtcgctcagtagtgtctgactctttgcgaccccacggacagcagcctgcactaggctcctccatccatgggattttctaggcaagagtactggagtgggttgccatttccttctccagggaatcttcccgacccagggatcgaacccaggtctcctgcattgtagacagacgttttactatctgagccaacatagaaggtgcaggtaaagtcaggccccgccccctggcactggccccgccccttagtccaggccctgcccctggcccaggctcctccccgcacttacctgggggctgccggtgccaaagcccagggtgggtgtggtgggcaccgacatagagtgcgggcccatgggggaactgatgaccgagaagggcgggcccatgccgttgatgggcgagctgagggtgctgatgggtgagtgcagctgtcccggagagccgagcgaggagccgatgctgggccccagggaggggtgcagcgagggggcggccatggagctgcgcgccgtgggggagctgagggaggaggagttcacctgcgtggagaagtctgcaagacaagaagccacaggaggctggtcaggagcccacaccg

SEQ ID NO: 62836 - DNA, 1226 bp, Bovine  19866881121057
  misc_feature (1)..(1): n is a, c, g, or t
ngaagtgcccgtttcacaaagccagcactgacggcggagggaagggcccccccaagagcaggcgggaactcggggacagctgcagcacagcgcagcacggagccaggtctgactcaagcctcggcccccgatccatcaacaaggtctcacgtcctgactccatcttttgaaaggagggacctgggaactgttggcttccagatggaacatgacgccctgcatggacactgtggacccaggcccaccaggaagccacagtgcactgcacgcccgcctggccttggccctgccaggactctgcacgacagtcgccagggacacttgctgagaaagcagggaggctgctcgatctctgccacggacccagggcatcagctccagggacgaggagttcacataatcatctgtccccacccgacgctgctcggatccagacagccccacttgtctcaggcatgatgcaacagctcccttctcagcacaccgcagtaagcacagtacctgcccatccaggcccggcccacgagctggtgcttgctcgtccagaaagggtgggagattcagggcaggaagcaaacgcccagggtcgctcaactggaaaagccagggcagggctggaccccgggtctggactcatccaggccagctttccctccatcctcctggggtcacgatgcctgacttcactctgaacagcttgagaaggcgggaggagccgtcccgcagccccagcccctgaagcgcctcctccggttgtaacacagcccggcctgcccctgcccacggggttctgcccaggggggacggggccagcctggaaagaggccactcaccttcccgaagtctcggacatcgaagaggtcaaaggggtcgaacagatcgctgttcctgagcccaaacttgtcatggcagactttcaggaaggtgcggatgttcttcaagcagaggaactggaggagagaagggagcgtcattcaagccacacagtctgcagggcagtaacaccaacagcagcaaaccctgcctcccggcgctgcccggctcagagcagcacgccgtgtgccccgtaaccctgtctggggagccgcaagtcccaactcaagacaaccacagttggaacaaaacagactggagttcagtcagcaggcacggagcacgcacacactgcctccccagcacagacacatccccgtcactctacacgtgacaaaggcccacgaaagcca

SEQ ID NO: 62837 - DNA, 913 bp, Bovine  19866881374365
  misc_feature (1)..(1): n is a, c, g, or t
ngcacaatgtagctccctttccctgccctcccctcggccgaggagcctctcagggggtcctagcttcctgggggtcacatgccggctcccagccccaccacggggaatgctgtgtgccccacggacagaggggtggagctatagggcggtgctggaagaagtctcggggcagcattggaaacagagccatcccgatacggaccagccgtgacaggtagtgagctccctgccaggagcggtaaccaagccgagattagaaggctctgtctcaggggtgacacgtcagagtcaaggagaccacaggatgacctggagacccacagcctgggtgccgagctctggccctggggaaggcgggcaggcctgcgtgtacacccaagccgcctcccccgcctcctccactctagggaaacctgatcctctggttgcttgaaagatgagaggaacttgggtttgatgttttgaagaagtggctttttatcagaaagtcctctgggagtctgggccgcaaccagtgaaattatatctgttgtttcaaggaggggagaaaacttgggctgatggttattgagatttatggcttcccctgagcctaattgcctcagaatctttttaacagttgtactaagtggtactcagaccggacaacggagcaggcggcagctcgcccccgccaccatctcccgtccctccctctcctgcctctctgctctcgttcccccctgccctccctccccgatcctgtctacactgggagctccctggatgcaccaccaggcaggtggccaggacctcacggctcatctcaggagagagcagatgtgagaagccgctggagttcaggcctctggatgagctttgctcctcctgctgctgtgtggatggccccggaggggcaaaggggctcggggga

SEQ ID NO: 62838 - DNA, 1537 bp, Bovine  19866881419335
  misc_feature (1)..(1): n is a, c, g, or t
nggggggtggccagtgtagtgcaagggaggagccctggcgcatgcgggctcgagcctcgggctgcctcggctgggctgggccccctaatacaggaggctttgcctcggagcctcggcattctcacctttgaaatgggatcgtgtcaaggagcacagttctgctgagcctcggagacagaagaggcccagtgcatggggattgccaccatgcgcggtgctccccgggtcaggctgaaggatgaaactgcacaacccaggaggcaaggaccacttcccccagctctgctggagacgcttagggaacaccgttgttggggagacggcagagaaagccctaggccgtggaaggcccgctgttggggtggagtgtggagtgctggttcttcacccagagcagccagggctggcccccacattccagggcatggaagggacgggttgctccagcgatgcattggttattgagcaccaactgtatactggcgagcaaaaccggctgtgtgggtcgcggggatgcagtttcgcggggacgccgcgttcctctaagtgccccggcggaagtagcggcagctggcttcctcacagcagggcgggggatctctgggtggtctcgttctgcctcctcccaccacctcttccccacgcttactcactcatcagctgggacggggcccccaaaggtgacccgtcaaatctttcagctcaagttcggaacgaagtctctgccacctctcagtcaggatgctccgagaggggatctgattggctcagctcatctctagttgggctggagatggaaatggcaacccactccagtattcttgcctaggaaatcccatggacaaagtctgagcctggtgggcaacagtccaaggagtcagacacgacttagccactgagcacatctctggttgggcaggtcctgatgggcggatgcctgcggacacttgattggctgcccgttgaccaatgagatgcgtcaggggtgtggtctgtcattcagctggatcctgggacagaggaccctctggtctctggggagctggtctgaccagcactcctggttcaagccccaaatatcagacctgtggggattatttttttacacagtaagcccttatgtgcctgggccccagagactgcttctgagcactgcacgggttccttactcttctcggagctggcccaagggacaggagcttccccgggcgcagctcagggttcctgggggtgctagggtcaaaactgacccttggaggcccagacggggaggctagtggctggaaggatctgcccccaggccccaggctcactttcctctgggtccccctagttgggcagggtctatggcatcgagtcccacgtgctgagccccggggaaaccaaggctttgtatccgctgatgaacgtggaggacctctacgggaccctgtacgtgccgcacgacggtaccatggaccccgccggcacctgcaccagcctcgcccgggctgccaccaccccggggggcgcaggtacgaccgtctcctggccccgg

SEQ ID NO: 62839 - DNA, 1441 bp, Bovine  19866881452606
  misc_feature (1)..(1): n is a, c, g, or t
nggcccgactgtccctcccaggaaatgggcaaataaactgcggtatgtatagacaaacagcactcagccaggaaagcagaggatctctagtgaagtcgatgcacgaggaacatcagacttaacgtgcagaagaggctgcgtctcaggagaagccgagcagcaaggtgccaccgacccagagctggaaagcaggcaggcagcactgggctctggggacaaagaggtgggggatggaaggacatgggggctgggggccgaacaaggctggtcctggggagatgaggatacggggctgggtccagacgacggcaaagtcttccctctcaatccgggtggtgggcgtaggaggccgatttcatttttattgtctcttaaataaaatatccccatgttataacctcccctctgtctgacatctgggataacacacacagagtggcctcccggggcctccatggccttcgcacacattatgcccacttaatcctctccatcaatacggaaccaccttccctgttgcccccatgaagcatggtcccttgggtggccgctgggggaccaggctccggggtcagtgacgacatttccctacacccctgggtggagccgagtggtcaaggtcaggccagtggaacatggggcccagaaaccccacacacaccccgcagtcccttcctgtgccaactgggtggacactgaggcccagaaaccacctggggaagagccggcatcagagctcgtgagcctgggtccctgtgaggctccctggcccggaaaaccagggcccccacccccacgatctttagaagttactgaacaagaacaggaagcgaactctcattgccctgagcccctgagatctggccttcgtgtgtgacagacgggtcagcagactctggcccaggagcctcgtctgtttcctgctttcatgtgggcctgagctgagaatggcttctccgcctgaggctggggtgactcctgccatgccagagcggggctggcctcccgtctccacacaactcctggttctgggattagctgcttagttcatggttctgtgggccagacagctcacccaggggtaataaccatgggcctgtgaagtcacaggattcctggggctgggcgggaccacagagtccttgctccattgccttgttggacacagggaaagactggcccagggtgagccgcgtgggccagtctcaaagcgacttcatgacgggaggtctggaagctgagccctggtgtcctctggaggcccggccacctctctccactctgggtctggggcgctggtccctgctctggatccaggaggttggctggagggtgggaggcctccagacctggtttgcaggtcaagcaggtcaagggccccgccctgctctgctggggctctgtgtctaccgagtcagacgggtgagcgaaagtcccaggt

SEQ ID NO: 62840 - DNA, 866 bp, Bovine  19866881505334
  misc_feature (1)..(1): n is a, c, g, or t
nctccctcagtgagtcgggcctgggcccagcagatgtggtctgcaggaagccaagtccaggctgccctcagcacaccctgcccagccaagtccaaggcagacacactgctcacctgggtgtccccagcccactcctcccagcagacacgcccacgctgatcaccctttcctcctccgtcacgcccacccccaacctcaacttccagcagagaaccagggcagggcgtcaagacatgggcccgtgagcccaggggcacacccatggccaccgcccactccccacgatgggcccccggggatgggaagaggcctcctcgcaggactacctggggagaaacgagctccccgccaccaggcgtgtgcaagccgcgcagctgagccagggtctcgcacacacgcacttggcttccccgaggccccaggaccgcgccaggaagccgggtggagactggagggcgggggcctatctaacccagagttgctaaaaagagccaacggggaagtaaaaataggaaataaaaataaaattgctccagccagccctggttgtttgtgtaggaaacaaggcatctcccggcccagcagggcgtccacgctgcgcccctcccggactaggaatgtctccccccacccagcctccagccaccccaagaggccagctctgcgccctgagcagggaaggcccaagaggggtcccgagacccaggttcggatctcagcgctgccgctgaccagccaggtgaccctgggcgaagggctgaggccctgtgggcctcggacacagacccccgccccgcccatggctccggcccaccacctccctctgccgggattctccccccccgggaccctcaccatcagcagag

SEQ ID NO: 62841 - DNA, 639 bp, Bovine  19866880421723
  misc_feature (1)..(1): n is a, c, g, or t
nattagatgctaactagatgcttggatgtgagtcttaactatggaactaaaagcttctaaatgtaatttatgaatgttttttcttggtgattaaaggaaagagatccaaaaccagaaagaaagagagagacagagaatagagaactaaacagctgtgaatttctccagaaagtactattcagtcctccctaattttccctgagcaacaatcagcaaacttctcattagaaggaattttaaaaggtttgctgatttgcaaaacatgacatgagtgatgtatatacactacttgtataattggttttgtgcatacatatggcacgtgctattttggaaatgtatcccctctgtggtccttatagctattgctcactctattccctgataattatttatagttacttgtcacagttttattattaggaaagtaatgaatcagcagttttatgcactctcctttaacaacctagtcttagaagtttccaaaccacagtgtatatatagtaatagaaagcaagcagattgcccaaagttatttatagatattaggcagaacatttttcaaagatcatctaagctttagtaagtcttctatttcagtgtccttaacaaattctactattactctcaaggtagttt

SEQ ID NO: 62842 - DNA, 1479 bp, Bovine  19866880436020
  misc_feature (1)..(1): n is a, c, g, or t
natagggtgagggtgtagtgggttttaattaaggaaagaatttgcttagcctaaggtctaacgtgattaatatcaaaggttaatacttatttcttctatatattcattaatgtgtataagggcagggaatgtggagacttagcagtaaacattagctcaacaaatagaaaacgcttcaccaatacaatttctaatcagcccactatacttatactaacagttttctaacttctctaaggaacatgtttgtagaaggtttaaagcatcccatgcctctcacggttgggaggctgtgagcaatcacatgtggccggacaagcctgtcagtcaggctagagaaccttaagaggagtttgtaagtttggaacactcctgtcatgcccaggaattaatgttaactggtgctctaagttaactccttctccaaaagaggtggtgggggacagccccctgtaaagtcagaggtgtaggtgagagcacaaagtagtaaagtaggcaggctctgattatgggggtagatgctcaagaatttccagggggactcctgaggctcgatcccgcttttgtgtatgtcgagcctccttcctcatgacctttgccatgggcagagcgcctcatgctggcccccgacaataatagatatttgagaggaataagtaatctattaataacttcaagtaaataacaggaaagggaagtgaaatgttagtcactcagttgtgaccggctgtttgcgaccccatggactgtggcccaccaggctcctctgtccatggaattctccaggccagaatactggagtgggttgccattcccttctccaggggactgaacctgggtctcctgcattacaggcagactctttacgatcagagccaccagaaaattcctaggaaacagaagagataaatatctataattaagcacaatttaatcactgtgctcatttagttctcttttcttcacatactatctgatgtccaggggagttaagagaactgtgtggttttgtgtagttaatgaatgactagaattcagtgtgataactccctgtctcagggttctttctaatgcagtaaccttggacatgcacagaaagccaaaacatcagggtatttatctttcagcctttaggattcatgtccaaatggaaaccttaactggttttgaggaaatataaataaattaaatctgaaggcatcacatcatagtaacttcaaaacctttataaaattaagtacattattatcatcattttgcaattagctttcaaacagaacacagagagagaagccttgggaaaaaacctatgcttcatccaaaatgtctgtgggggtagtctgcacattttttccatttcattgctaatgagtcattttcacctgatgcctgcttgccccactcccctctgaagaaccagctgtcagtgtccacagctgagtgagtttggtatcagacaggggcagcagggggggaaga

SEQ ID NO: 62843 - DNA, 2733 bp, Bovine  19866880504229
  misc_feature (1)..(1): n is a, c, g, or t
nacactacaaactaaaataatggttacttggtcacaagcactgtggtatgaggaacagtagacctgatgacctgagtagaccaagtagccaagatggctacttggtgactcacaggtagggagcatacagagtgtgggtatgctgtacaaagcgatgattcacatgccaagagggataaagtaggatgaggtgaaatttcatcatatgaatcagaacagtgcataattttaaatttatatatgttatgtgaagtcactcagtcatgtctgactctttgtgaccctgtggactatagcctaccaggctcctctgtccatgggattttccaggcaagagtactggagtgggttgctatttccttctccagcagatcttcctgacccagggatcaacctgggtctcccgcattgtaggcagacactttactgtctgagctaacagggaagccaaattttaagtttaatttttgtttatatttggaattttccatttaatatttttgtactatagttgaccacaggtaactaaaaacttggaaagcaaaactagacatgaaggggaactatggtctagcaaggaatgtaagatttaaatttggtaagcttctattatatctttgctggacctttgatgagtcaacctctcacatctctctgtaacacagaaatgagacactttttcaaaaacttgagtttaaaaatgtaatgtgatgtacttgatcattatttcatagatattatagaacaatagagaattacaattatgattttcatatatctctgcttatattttttcaaaaaattgaattctccattcctttacaggactttctcttaaagctcttcccctaatttcacatgcatactattcctatgcagacatacatagttaagatgataattacaagatggagttcatgcaactctctttaggttcagaaatgagtacatttttttcaattactttacttaaaatctacacctcttaagacagaatcagagaagtataaccactttaatactaggaacaaaaaatataaaggaatcaggactttggcccatcaaaaaatcaataaaaatcaataatatcctttaaattggcctcatcaacctcattaaagtgttctcatcctgacgttctagctgctttaaacatatgtttaattatagctccttttaacatatatatttagggattgacaggttagtaaaccagaacactgatagattagtaataaaagaacattatttttaatgcagtttgcagaaatgattctttattctccactcatctaaaactggattgtactatcttgagcaattctcttaacctgtaataggtcacttagtcttaagtaaaaggattgcattatcttgctttatagctatgaaacacatttttttttagtaagtatgtgtgaaaaacagtagtgaaaataatagaggtattaaaaactaacttagtgaaagaagaatacaaataaatttgcccaattccctcagatcttgttcctacttttgcttttaaacattctgcaactactttaacatgtgtatcactcccagagaatgattcactctaccacttagcatctgagtgattttgaacagtttgattttcaagttaaagtttcttcgtaaatggcataataatattaatataatatctgcttcatagggttgtaatggaccctcaattagataacatgagcaaaatattgctcatgataacatgagcaaaatattgcctagtagacagtaagtacttggtaagtgttcaactataggttttatcagtatcttcctcatcacttttgtaatgtcattatcctttttcctgaagctatttataatatctagacccaaagctttcctaatcatacatggaataagtacatttgtcctttgaaaccactgactttttacttgctttatgtatttcttaaacattttgaaaaatacttcatgtgtgattacagcttaaaaaataataccacaaaaatacctaagagattctatcaacaaaataataataccagtttgtatacaggttgtgaaatcacttacattaatttaagctctatatttatattatttctgtaattttaattgttctgtaagtttcacaaaagctactgaaataaatcacttgcttactggaagagttggtataaatgtattttcatatatatttttaatgttatacacccactgcactttttgaaactaccatttttctagcatttcattaaaataacatattaaaatctcatgaacattatgaaataactgaagttaagtaatgcaaagattttataatccagttgccactggtgatcaaatgaaacatcaccatgtatataatttgctctcctaaacaatgctgaactcaagtatactagctattcattcctaatagtttcatagacagcttttggcagatatatcaaaaatagctgcaggacacttctatttcaaaagaacactcatttctctaagaaactacacatggaaataagagaaagtctgtatttataaaaatttaaatgcctggcatttatataaactataaagagtgtagatgtccagatatgaaacaaacaaacctacgacatagatcacttgtccctcaacatccagattgcctatttttttcattttggatgttagaaaaaaactaaggaaatgactatgttttactattgagtcattaagttctgtatgactcattat

SEQ ID NO: 62844 - DNA, 1028 bp, Bovine  19866880504647
  misc_feature (1)..(1): n is a, c, g, or t
nctactttcttgaggctttttcatttcaagttagttaaaggaaaagttttataaaattagaaacacagtatataaataggataattaaatgtgctagcataaattgtataataaaatatacttaaatggcatttgacactaaggttacaaattgtaatcattttaaaaagatttaaaaattaccaaaaaatgaaacatctcataattatagtattaatatgtacattatgaatttttatgccacataagctttaaataaaaccacttttcagaagcttagctaaaacaggcttacctatttaacatatggaaatattatattgaaaaagaacattccatagttggtattaatcctgaagacaggatgacacatttatactatttgttttttgggaactttggttaaaagtaatattaagttgtatctgccagaaacagatgcacatatagcagcaccaaaatgctaactctaacataaatgaccatctccatatgttcctggagtttatttcttttggcactttatgttgcacataattataaactgtgtttaatgcttgagaaaactaatttgataatctggtcatgaagactcacagacctgttctattcttactaaaactttttgtgatttttaaatgtatctcattagtatataaacataagtataattgtattataaaatgtttattttataaaatatctactaagggtttcctgtagtagatgtttttatcagaagaagagatgtttttatcagatttttcatcaatttgatagggactaaaatataaagccttgtatcactataaacatgtaaattgaattaaaatgtgttttttaatgcatggcgaaggtgaaaaatcagaaagaaaaagcactgggaaccaaaaacaaaacaaaacagtacatacaaagtaagaacaaacagaagtcaaatttgaatgattaaacaagcttgggaattgtgcatgcatatactctaggactcaggatctaagaatgtgtgggaatggtaatcaagagta

SEQ ID NO: 62845 - DNA, 1840 bp, Bovine  19866880737599
  misc_feature (1)..(1): n is a, c, g, or t
ntttgaaaaagttttaattgtactctcttccagaagactctagttggggaattggggaacacggtttgattcaagctatttcctcccatgacacacagtttatgaattacagaaagctgaaccataatattttaagcacctcagttagttttcagctttgaaattacacttttaaagagttcagaaataccctttcagtctattgatgtgaggcaaatccctttgcttcaattaagagctatcggagggaatggtgataacagaagtccggctccgagcagcatataacaagatgattacgggcgctggcggccagccagactgccaggctgtttttcacgggtgttactttactgacagtacctccatgacatttgtaccttgacaccagaagtgctaacagctgcagcggcagtgttagaaaggcacgaaagacctttttcagcgttacttgctctcacagattctcagcgccctaggagaataaagtctataaaaactgacttcagccctgctgtctcctttgtgaagatatttgctgcagagtctgaaaaacagttttgttccatgacattggacttaggggagatacaagtttttcaaggtagaagatgtatgtggtaagtgtatgacaaaaagcagtggtaagtgtatgacaaaaagcagtaacaaggctagtctgggagttcatggttttgtgaaatagaatgtttcagcaacgaattctgcacttagttacttgctgtaggcaacccttttgaccccctcactgaggaagcaaaaatgactaaaggagaaatattctagttttcttgacattggatggtattcttaactaatagtgacagatgtaagagtatggcttctagtggttgctgctaatgcccgagcttcacgctgttgggaaatgaggaaggtctgaagacgtgtgaacatgtgtgagaaaggaattcagatgatgaaaggtgaacatgggtttagaaaagttttatttttgcagctctaccaatctctcttattgttttcatatatatatatatatatatatatatttttttttttggtacatcagtgtgccaataacatttggacacatttttcagaaccaaggtcctaaaaggcacatattacaatttactattatgaagtcactgcactgagaactcttttttgtatgttaatgttatttcttatcattttagtgttgcaaccattttggtcttagaaatgggaaaatttttttagctaaagattattaaatttccacagtttgaagtgcttttaggagacattgcacaactattaactcacactaaaatttttctataaatgtttcaatcattaatgctttgtagcatatgagacatttttataataagtctgtatttttaatttcatgaaaactgagcttgtctttgcacttttctgaaaactccattttgaagattcaggcataaaactttgtctttattactatttcatatacccaatgaaaagatctttaaatagtataaaatctacaaatataatatgctgaggtccagccccagttgatccagggagttcgaaagggagatggcattggcgaatacactggctttaattagatattaattagagatataaagagtaatagaatgaggatagctcagcaggaaaattcagtggagaaaggctgagtagcttggtttacgcgggaaaccaataaaacttcaagacaagaagtttgcaccacttacgtaggccacaggcgtccttccattctcccgaaggagaggagacactgaggcctccccggtccggatcttagaagcccaggcaaaattagtaagcttggcgg

SEQ ID NO: 62846 - DNA, 1843 bp, Bovine  19866880756889
  misc_feature (1)..(1): n is a, c, g, or t
ncgctcagtcgtgtccgactcttagcgaccccatgaactgcagcccacaaggctcctccgttcatgggatttgccaggcaagagtactggagtggggtgccactgccttctccgatccgaggtggttaggtttgtttattccttttgtaatacaatatggtttgaataatgtgatagaattcaaagttaagtcaccggttcaaaaaataaaatgagagcaatgacaatgataacagataatcttagtaaatgttagagcactgtacagagtactttgatctgggctcatttgatgctgtcagcttgcaatcctggcaaatggcattattagcattttcattttgtggataaggttgagtatcaataaaccttcaccttttattataatgaacagtagctccagccaatgctgattaattccaaatccacagatctttaaaatatattattatgagtttatgcattcagttacaaaatattaatttagagtcttaagtgttagacatatagcagtaactcaaatcttgttctagtgaaattcagaataagcaaattaatatatagtttcagtaaaagtgggtcttgagaagtaagttaaggcagggtagacaataaaaaagtaggaaattgggatgtttagggaaattccctgtgagaagataaaatttgaataaatgtttggcatatatacataaatttgtttggcatatgtatatatatatatatatatatatatatatacacacacacactaagattttgctttttttacatatgcttcatacctttaattattgtgatcatgaattataatacaatatttaaatttttaaaaaattttagtaagatttactaagtataataaaattcagaaagtgtctataatcatattaaatgtacattacttctcatatttgtggctatagatttttattaagttcctaacagtcatttattattaaaaaaatattgtaggaagtaattttcctgagaattaaaatctatggaggtgcctacacatccatttaatttttatattgtgccattctgagaaattcagttcagagctttagaattctcccctgtaactgatgagactcactctacaggtttctatcaaatttagaagtaatcaactccatgtagcaaaccaaggactaaataaagtacttcttaatctttagaggagtgtgtgtgctcagtatttaaggtttaactccaaaataatggaattgcataccttttcactttcctgccaggctttatcacataagtaaagctaaaatagatttaatcctaaaatatatccatttgtgtaacatatttaatggcaatgctaaatcttttgaactgcataccttttatcttaattggaataaataattgcttcacaatacactagaatttctttagatcttgaatttaacaggtgaagaaaatcttgttaccttctggtaatgaggtccaagaaactgatgtaactttaatagcttagagtataactctttgaggattctggagaaaataaaagtatatgtgtaaaatagaagttttaaacaaaatgttctagtctgtgagtctgagatagtctgtgagaattaggttaccatggatgactatggtaaagtcacatacttattttatggctaaatcaacgcaggttaacagagttgacagtctgttcccacttctatcaccaggtaaaggccttacttaattttctagcactttgtatctatcatttcttcccataatattcatctcaaccttaaaaaaaataagtaaaaatttatttttaaaaaagaaagaacaaataaatggataatttttgtacatttaaaaa

SEQ ID NO: 62847 - DNA, 1014 bp, Bovine  19866881089731
  misc_feature (1)..(1): n is a, c, g, or t
nggagattctgttatatgcccaacatcacatatataataaccagtgggagaataatgagaaagctgcctcctacagcaatgctttcaacatgatgggtaacatgaaggtgaggcaaaaggggaaatcccgttgctcaaagctgcactgacccccttctacataagtacatctagttactttccctggattactttcagatgcttttgatataagctgtattgcttttaaaaatgacctctgtacaggaaacagaaaagttctgtaaagcaattatccttcaataaaaaatgaattaatttaaaaaagacctctcaaataaaggtttttttttttttttttttctctctctgctttgaccccattctcctccattgggttaaatccattttattgggaaggtgacagtctgttctttctgccacaaggatgatacactattgaacagagaatgtctgtcattgataaggttatacaaatactcttcttcttcttactggcagtgtggtaaatagcacagaactttgtcactgtcagcgagtgctgcctaagaactttaaaagaaatatgaaaacaaaagtgttactgaaaacaggtgcctgataatattaagtctgactggcctatggcagttgagaaagagaaatggattatagctcctctgtgatcattttgaaattgtgcaagtgcacattgaattggtcccccaggaagtcatgatgataacagagcctacctcagtgcaggaaaccaagctgactcttatcagctgtgcactggtggtattagatgtgtaattaatcagaatacagtttaatttctccttgtgagcacggtggtgggctgcaggaagggtaactgtctcttaatttagagaattttatttgttattttaatcttaaagacaaataaaatgttaaaagttatctaaaattgtcagtaattcctggggtgatataaaattaaaccatcaactaaagaaagccagattcagcatccttagaaatagaataaat

SEQ ID NO: 62848 - DNA, 885 bp, Bovine  19866881147924
  misc_feature (1)..(1): n is a, c, g, or t
natactaatctttaattgtagaaattaactgttcatttggaaaaataaaggcattggttgttagtacctgtcacaatcctactctgattactattttcagaagggataaagaacatgctcactaattttagaagctagtatatatggagagctattagagtttttcgcttaaaggtttttttcaatatgacttttgaataattcactctagttatataggcagtaggcccaaacatcaatgttataaaactgtcagagagtttgctatacaggataaatctagccattggaaaattgtgtggtcctcatagctgcctatctgtttctttataaatgcaaggtttggagcctggaagataacacaattagttcccttcctccttaaattacatatactttccagttttgcctttttttttttttaaataatgtgaaacctctgtatttctccaagtcagggagaacacaggcctcagtgtgttgtagaaggatcatcttcttttacccgcttagaattttctgaacctaatcagcaaggagcctgattattggcccataaatgaatgacacgctccaggctaagggcaagctaattgccaagttgaaattctatgtgagcttatactgtgtgttcttttaaattttccagataacaatagatcaggtacagtggcttctgcttccatgtttgaggtgcttgactaaacaagaggtaatccctcaccttaggctactgcattatgcatcccagtttgttgctctgagtatttttgacagttttaacatttgttaaatgttaaatggggtgatcttggacttttttttgatccatgaatctgaatggcctggcttgtcctcatgctcatttttccttgaccaacaaag

SEQ ID NO: 62849 - DNA, 1048 bp, Bovine  19866881158234
  misc_feature (1)..(1): n is a, c, g, or t
nagaaggaattgaaagaaaaatctggctcctaatgatataatagaaaatagtcacaaacaaagcaggatatttatatgatcaatcaccccactctttttttatatatataattgtctatgccttttcattctctttaaacataaaacataatcattgccatcactactaccagcacaatgaaaaattcaattaataacttactgcctgaagggttcatgttgtcctaggttttttgctgacaagcaggtgtataagaggtgtataaccaagcatgccaagtgatcaggctatacacgtgtgttaggaatacactaccccgtgcacatgatgtagcagtaatgagacttctgggaaataacaggtagcctcaggcaacaaggaggtgggagaataccttcatgctatgtcgttaatgacctagaagatttcatgttatggtgtcttgggttttaaattaaatgtcaaatacaatttgccactggaaatgtgaagtgtggaactgtccttaagagactctgagaactctcttgtaattggtgactgcctaacactaagtaaaaatagttagaaatcattatttgatgaatcatcataccagtctgcagaaatgtgtggacttttagtttgaatcttagtaaattcttgggttagtatttaaaacatgcagcgttcagtgtagtattaaatacagtggaactggtaaactctcccctctgggatcatgccaccatttatgtcctgatctcacatttagcctataacatcagaaaatgtgtgaaagaaactgaagcagcacatattccacatgtagtaggtttcattttgcctgctgacaagggtctatgttaataataagactaataataggacttccaatccactttaatgtattagcattatttctttctgaactatctgtatattagtgctaattatgaggtatgtttaactctaaaattgtaggcttaaacacgaagatataatttttactgctggttttaattagaaacctaaagaaacacgtgcaattaaatatgcccataaaaa

SEQ ID NO: 62850 - DNA, 1050 bp, Bovine  19866881365768
  misc_feature (1)..(1): n is a, c, g, or t
ntttatgccatttttggcttataaagacttcatgggaatgctttgagatgacggaaaacctatagattcctatatgcacaggtacatagatgtaaaataaagatacatccaatatctgaatataactatgtgcatgtgtgtattaaattacataaaataacagttgtcaggatgtttcatagctctcaagcaataaaacataaaatttacataatacaatattttaatatttattcattattctaattttttcagcaacaagaatcatatactttatgcatttatttatttattcatcagcagcatattgaccttatattactgtctgtatgcttagaagagaattaatcataaaaattttttaatattatactgtataagctaagctaagtcacttcattcgtgtccaactctgtgtgacgccatagacagcagcccaccgggctctgccatccctgggactctccaggcaagaacactggagtgggttgccatttccttctccaatgcgtgaaagtgaaaagtgaaagtgaagttgctcagtcgtgtctgactcccagcgaccccatggactgcagcccaccaggctcctccatccatgggattctcctggcaagagtactggagtggggtgccattgccttctccagttatgtatgttcaaataaactggtatgctcataacttttataagcactagactcatttatacacatttataaaatgtcctgagtaaacagtgttataaaatactaaacttagaattagaacacatgactttaaatagtgggcaactgtacagatatcaattagtattacaaatttgaaacacatttatcttcaaagcaatttaatacaaattggaacaaatgattatgtagcagcataattatatctaccttgtgacctacaaaagattggaaatcacacttgagattaaaactggaggaaagcatagaaaatgctgacccaaagtgccatctctttagttcagttgcatggtactaaatgccaattgtgccctccactttcttagcggaaaacttcagg

SEQ ID NO: 62851 - DNA, 706 bp, Bovine  19866881598991
  misc_feature (1)..(1): n is a, c, g, or t
ntaaacagtaatgctaaggtttaaaccccagggttcctaatttcaattcctgcttattttcattaatctctgagattattcatgactttttcatttatgcatctagcaatcttttctattttatttttgtttttaatatcaataacagcttatagctcaggtggaaagaattcacctgcaatgtaggagactccagttagattcttgggttgggaagatccactggaggaggaatagggtacccactccagtatttttgggctttccttgtggctcagctggtaaagaatccacctgcaatgggggagacctgggcttgatccctggattgggaagatcccctggagaaaggaaaggctacccactatagtattctggcctagagaattccagggactgactagtccatgggggtcacaaacagtcagacacagctgagtgactttcactttcattttgaaatctttctttatataactgcctctattatgcttttcttcacacacatataatcgtattaattaataggtgtgaaattcactgtagacaacatattcccataataacccctgattcactttccattacaacatttcttcaaagaaatatgactgttttaatattctaaatacacaagtgctttatttcaaatccttcttccaaagaagtattttatttttgttttggtaattcagcatgctgaata

SEQ ID NO: 62852 - DNA, 1189 bp, Bovine  19866881862662
  misc_feature (1)..(1): n is a, c, g, or t
naacagataatgggtaaagaagatactgatacacacccataccgcaagctgacaaacactcttcagccttggataaggaaccctgccaagggtaacagtatggacgaacctggagggcattaagttcagtgaaataagccagatacagacagacagatactacacagctcacttatctgtgaaactgaagcagtgaaactcatagaacgaagcagaatggtggttgccagcagctggggggatggggagatgttggtcaaagggtatgaagtgtcagttatacaggctaagtcctggatgtctaaaggacagcatgacaatacacatatattgcactgtaaaaaaaaaaaaaagaaagaaagtaaaaagaaattattaatgaatgaaattagtaatttggggagactagaactttaggaacaagaatgtagtaacagacattaaactcccagtgagctctcagacactgaagacacatggctggactttgcttagtggcaaaaattggaaaaatctagggtggtagaaatgacatcaatgtgacacaacaaaacagatctcagcacagaccagcatggtagacatatccctgcctgtgttgggagctaaataattggatcaagtttctgtaatgtgattgtgctttcttagaatgagtaattgtcagagttgctgttgtggaaaagtaattaattatgtgaagtaattatagttttccctcaagtatacttaggtttgatttttttcctagaaattaaaaaagcaatgttgtttgtatattgataggtagtgtgctatttagggacagaattacagagtagaacacggcattgacagaatgtggaagcaagtctttgcaactcaagcagtgatagagtgacatgttaacataaacagtatctttgagtttgaagagatggcttaaaatgaatatcctatttggtagagggaaatgctttataaaaaactgtatgtctaaagaaaagaattggcataaaccaggcaaatatagtcatatcaattgcaggtttgcaattgcacagaaaatcatcatgaataaggtgcagaaatgcaataattttggaagtgtgttaaatgtgcatatttaagtgtcttgattaatttcaaccctagaattcagtaagttctaccatgatcattcagtattcatgtattcagcatgctgaat

SEQ ID NO: 62853 - DNA, 2447 bp, Bovine  19866880595784
  misc_feature (1)..(1): n is a, c, g, or t
ncacagcacacacacaccccttgactggccctcaggcagtgagcgttcagaggatagatgagcccctctggcccacttcagagtgcttgccatctgaggctcagtttatacgactgtacaatggggataatatagctccttccccagggggttgctggcagacatcaacaagagcaaacagcaaagcgcaggtgaagaattcagactgaaccggagggctactcaggagccctctcctcgccctgggtttgccctggccacgcctgttcagccgaagccccagaaagcttagggctccagctttctctctgcagcaacagctcagggaggcaggggccatctggggccaggacccaccctcgtgggtgggcaagaagagcaggccccgtggggcctgggctcctgggaaagcaaagccaggatccccaggtactctgccctgatggtgacaagtggagatcagatggcagggtgtggcccattaccgatgtgtgttcattcagcaaacccctcctgggcaccaactctttgccaggcctgtgccaggcactggggatgccaaaaccaacagggactccacccctgccctcagagggtctggtgagggagggtacatgtaaatggaggctttaatccagtggggtgtgtgatagggtgggtggagacccagaggagggcccagtcccagcctgcagtggcctggggacaagactccccagccccgtgggaaaccaaggcccagagaggggatgtcacctgccccaaatccctcaggaaggccacagtctgggtctctccagccctggtttggggctgtaccacctttacctaaaggactagcctctcctcactgtgtaaccaggggcatgtaccttaacctccctgagcacccgaagctggttccacaataacggaaagccatagtaagccagacaaggggcttgtttccatgctcatggatttcatttattaattttttttaactttttgatttcaaccatttttaaagtctttactgaaattgttataatattgtttctgttttgtgttttgtttttggccccgaggtatgtgggatcttggctcccctaccagggatggaacccgcagcccccacgttggaaggcgaggtctcaaccactggatcatcagggaagccccgtcctgctcactgattttaaatggtgaggatttgttgctgttcagttgctcagtcgtgtccgactctttgcaaccccacggattgcagaacacctgacttccctgtccttcaccatctcccagagtttcctcaaactcatgtccattggctcggtgatgtcatccaaccatctcatcctctgtcgtccccttctcctcctgccctcaatctttcccagcatcagggtcttttccaatgagtcggctctttgcatcaggtggccaaaggattggagcttcagcttcagcatccccttgctctatttcccctctgaaatagtcgtcagccctgtaacagtgaaggtgtgtgaaatgcagcacatttagccctggctaaagtgccatgcgaccttgggctgcggctgcccctctctgggtgttttctcatctgtgtagcaggagggagagggctctctaggttcactctctctccttcccgaactttgcagataacccccactgtatcctccctgaaacaacagcaagaactgttatcatgcctatttttttgtagatgaggaaactgggggtcagagaagggaagtcacttgcccagaccacacaacttctggtctgcatgaagtcacagccctccactccacctctcagaatgggcagtctcctgcacacaatcgagactccctgagggtcagagatctcgaggtccccgggccccagaaccccaggaggaggggcactagctcaaaaggggcttgaccccaccctgggagacactgggctgggtacagagtcagcaggaccctctttgaccgtgtcggccactcgtggtgcaaagcaattacacagcctaatagcgagaagctgccaaaaacacgtgtatttacaaaccagccgccacccagccaagctgcagcccaggatggttgcgaaatacagcctggcaggctggccacagaggtggttcccaggctggtactggagcccagactggcaccatctgagctacagaggccaagagccaagcagagccaccacgggcaggcaggtgacactcggagggccgtcccacagggcaggccaggcagagccattcccatcctctcaggatgcctggccccctagccttccggttctgaggcagtaggcagggcttgggtcacagggaaccctttggtccaccttggaggctctttctgcttccatctctccaaatatcaagtccagctgccctcatagggcgaagaggacaagcgaaaggtcaggacttaaaatgtccccaaacaaca

SEQ ID NO: 62854 - DNA, 1241 bp, Bovine  19866880603458
  misc_feature (1)..(1): n is a, c, g, or t
ngcgccctgacacttggccccctccccaagtgttgaaattgagattgcgcgggtatttgttttgttaatctcctgccgaggccagggggctgcaggctgggtttcttctggttcacgtggggctccggctgccaagtgtgcctctcccttaccgagcccggggctaggcggctgcgcacctgttccctacccctctggcaaggtggtggggccagggaagcatgtgtgccctcctgagagagggtcgcctggcctcacctgagacctgctccccctcagctccttgagggccccagatatgaacactcaccacctcacaacctcttggagctatggaggtctggcctgcatccctgggtgctgctgagacctcatgggagtgccagactccagatggggtctggtccaggtagagatgttccccacagctgggtttcggtctttgtgcctcagtttccctctctgtaaaatgggcatcatgtctcttgtccaccacagagcatagtttatgaggcttcagtgagttagataagaaaatccttagcccagtgttgggcacatagtgagtgctcattaactactcgctgtagcagtgttgtgtgtccgctctgctgtcataaaatgtcattttggatccacagagaaggagacaatgctcaccagcagtttccatcgaccacgactgtcccaggcccttttccatgaggaatcttgcttcaggcccgtgatacatttccacacaaagcttactggtcccattttgcagatgaagaaactgaggcttgggtgacttggcaggctaatgacagagctgaaggtagaacccaggcttttctgatgccaggtcaggagatttcttcgaaggctgaaccctgtgaggggctggaccaggccaggaggaggggttagatgatgatgatgacgatgacgatacttttgtgtgatggatgctgtgaagcgcattacatacggtattgccgtgggctttcccaaaaccctgccagggaggtttatcgtccctaagtgttcttgcctggagaatcccagggacgggggagccttgtgggctgccgtctatggagtcgcacagagtcagacatgactgaagtgacttaacagcattagcagcaacagacagatcaggaaaccaaggcacagaaagtgggggaagcagcatccattgaccctgagcctctggggcatcgtctgcctttggctgctccatgtcgccagcagagaag

SEQ ID NO: 62855 - DNA, 1957 bp, Bovine  19866880915923
  misc_feature (1)..(1): n is a, c, g, or t
ncccatagctgctgttctgttaagcatctctacccctctgcctctgggcttccctggtggctcagatggtaaagaatccgcctgcaatgcgggagatccaggtttgatccctggattgagaagatcccctggagaagggaatggtaacccagtccaggattcttgcctggagaatcccatggacgaggatcctggtgggctacagtccatggggttgcagagtcggacacgactgagtgactaacacacacacacacatacacacatccttctgcctctaatcagaatgaggcctggggctttgttcactgggcgaggcgcagccctcacagctctgggggaagagcaggaagatctgtttcctcgaggagcccatgactggctgtctttctctgtgccgtcccagctgggctttctataagcttgaaggaagttggggatcccgtgccctccagatctaggtcgcctctgtgctcagacaggagctgggagtgtttatagagttcctgggggaaccttgggggtccatagcttgcccccgagaggtactcttcctggcagtgacctgcctgggcagggaggaaaccaaagaggtgccttgggctggtcgtctgggcgggtctcacggcaactgtaattgctgggcaccagaacccgggctgggcccttttatggagacatttatagctagcccggctgggggaccattcaagtggttttctctcttttgtgtccctttaataaacgagaagaagagacataaaattaaagctgattctggagaaacttggctttgttgccaggctctggggaggtcaggggaaggttactctgctctctgacccagaggcctggatttcttaccacatgcttttaaaatgtacagactcagatgtcagggctagtcgggcctttgaggtcacccaaaccaactctcagcctgtgcagtgatccttgctggcgtgtttgcagccttccagggatggggagctcactaccttaaaagcaaacagcttgttgacaggcagctccacagagccttctgctgggggagctgaagaaacagacagacgcgggggaaagccccgtgctcgccagcatcagcatcagtccctgatcaagggctcttatctctgagagtttcctcttctgtcaaaagtcattcgttcattcattcaacaagtatttcatcttagcctgtgcttccccagaagcaaactcaagacaagggtttgaatgccagcagttgagaaatgatcccggggaaaacctcaaggagggggtcggggtgattgagacagagaaagtgctgtggattgcattgtgtccccgccaaaagcaatgttgaagtcttaagtccaggtacctgtgagcgtgaccatctttaggaatagggtctttgcagctgtaatgaagtgtagacgaagttgtactagattagtgatctaatgcaacctctgattcagtgattggtgtccttatgaggtgagagaaatgtgggcacgtggacacacaccgagggaagatagctctgtgaagacacagacacacacagggagagccaggcgctgacagaggcagggatcagttaggccgccacactccaaggatcggcagcagccaccagaagctaggagaggggcctggagccgactccccctctgagcccccaaggaggaaccagccctgctgacatcctgattttgatctctggcctcctgagctgtgagacgatataccgctgttgctttcagacacccagtttgtggtattttgctatgacggccttagaaactattaataatacaaataggaaggggaggaaataataaaaagcagcatgctgttcagcagaatgctgctgtggggaaactgaggcggggtcctctgcggagctcagggaagcagtaggtaacatgtacgtgaggaaccccagccagccaagggaagggggggg

SEQ ID NO: 62856 - DNA, 859 bp, Bovine  19866881211348
  misc_feature (1)..(1): n is a, c, g, or t
ntgagaggagccatcatagaatgacctcgctgtccccagggggatcacacatgggttcaggtggactgagtcccccgagggatcgaggtttggcagctgcctctccactcgcctcttcatccccaggctccgatcacagcaacggcatctggtcctggagaacgagcctcccgggctctctccctcctgccttctctccccacaggccctttcaactcctccccttcctgacactaacactcccatcccttcatctctatttacctaccccttcactcttctctgtggattccgatcctgagcgtgtagggtaggggggaccttcaaggcttggtctggggtctcactggggaatttaaaatgggcagagacacagtacggtcttctgccctagacagagtagcttccctcatgatgcctcctctgccgggccacgcaaagaacacatcttcttccctaggtggagctacgttgaaaagtctccatctattgccttagcctgggagacaccaggcttctggaagggactaacattgacacttctgggtgaccacgtgctttctgcccactctgcactgatttctctctgcagccctgtaaagggagagctgccgtccccactcacagagcagggaggtgacccactcaaggcatcctccagctagcgacaactcagctgcctgggctgcagacagaagggcctggcctcccctccagcccgcccagccccacccaggccctgctgggtgtggggagctgagatagagggagagatgccggccagggctcagccgatagggcccgaggtgaggtcagcgctgggaggccccatggaagaagtgagtagtcaggatgcatt

SEQ ID NO: 62857 - DNA, 1176 bp, Bovine  19866881291905
  misc_feature (1)..(1): n is a, c, g, or t
ncactgcatctctgaggggccggggtatttgctggttattggatgatatttcttcctgggtcctaagggagcctccattgtgtgaatgccaggaagtctgaaatcctgcattgctaaaaccattgacatcatctatgcccagcagctccctctcctgcaggtgctcgccgttctgctactgggcacgagtctttagtcagcgtctcctggcctcaccagggcgaccccaacatcattctcacaggcttgaggtttcgtctctggctgaaggcaggttacagccacaagccgtaaatggccacaacccaccagctgtccgagtcaaaatgatgggggaccatctctgactcttgcctgtccctcagcacccccttggccatcaagtcctgcagctccttccctcccaagcctctccctgcccactttctccaccacccctcatgaccactctggtcaaagccacgatgatcgcaagcctgggcactcttagccacctagtagcctgtccagcagcctatggtcctaggtgatctatttgctgttctgctgctagagtgacaattctaaaattagaattggatcttcctgcttaaaacccttccagtcactcattcattcagtcagccagttattcatctcttcaataaatattttggtctaccacatgccaaacattatttattatatggttaggaatacgtcaagacggacgaaacccctgccttcatagatttaccgtctagtgcctgtgtattgagaaatatacatggaaacgggtgaaagttgtcaagtagtggtaagcgctaggaataaaaataaaccagaaaaggagatttattgatggaggaaaacgccacgctctctagggtggtcaggaaggcccctctgaggattgtttgaatagaaacctgaacgcagtaggggcccagagcaacatgagatgtgtcctgggcaataacaggatacttcattccataaaaaacaatatcccatagcaaacagtatgatattttctgagcgcataaaacttagccaaagagaactggttggtcatctttgcaaaaacctagggagatgtttagaaaagctttcattagctatataaccttcagtaactgacttaccaggcttctctggtggctcagatggttaaaaaatcagcctgcaatgtgcaag

SEQ ID NO: 62858 - DNA, 1011 bp, Bovine  19866881332922
  misc_feature (1)..(1): n is a, c, g, or t
nccgcattgcaggcaaatctttaccttctgagccacgagggaagcccatatttaaatataagcccacgttttattgggcttcccaattggtgctagtggtaaagaacccacttgccaatgcaggagatgtaagagatgtgggtttgatccttgggtcaggaagatcccctgaaggagatctttattagtcattaacactttagtgtgaattagtatatagaccgccccccctaactcagggagttgggagaaagcccaagccaaactgtgtgggaaccggctcagaaggtgagggaaagggatcctcaaggagaaggcagggcttggggggaggtgtcagaactagaagaatcactccagttctcacaggtagaggaactgaggactagaagcagaaatgaaattgtccatagtggccatccgtttgtgccaaaggcagaattttctcccacaatcaggaagcacttgctctgttccattgtccacctaaggcgcccacccctattcaagctccccacctccattcacccaccgcctgctttataccttccttccaatgataccacagaatcagagcttatatttaatggagccttcccactttcccattccaaatagcttcttgacatcttttagcaagcatctaaaacttaacgtgtccaaaatcaaactcttcatcttctagacagacctcttctagtctccccatctcaaacagcatccgtgttcacccaggtgatcaagctgagagcatggatgcagtcttagatcggctttcctgggagcagagcctgaggcagggctccttgggcaagggtttcttggggaagagctctcaggaggaagggagcgaggggagcaggttagggcagatcagtcagggctggggtctcagctggagacagcattagccacatcccacagggagctctgtgtcctctgcattgcaggcagactctttaaccatctgagccaccagggaagcccgacgaacccacagggagctctgga

SEQ ID NO: 62859 - DNA, 1562 bp, Bovine  19866880431216
  misc_feature (1)..(1): n is a, c, g, or t
naacttgattatcttgaactttggaaacctttaaaccttacttgagaaataccttctgttactcatggttctccctatgtgtcaaagacttgtcttctaaatagcttcacttctttttgtacagcaatcagcagctccagatgtccttacacgatttgtaaagagctgaagacctctttagaaaactcaaaatagatatgtagacgttataatccataatatatgtataaacctttcctctactttttcaagatgttgattaaaaactttaccagaagtacttggatagttaagtggcttaattttttttcctgattggggtttaattttctaactgggcagtctcctttgttgtttcatgtggtgacatcattatctagtgtttttcttttctcattcctatgtaaatccgtgtctcaccacaccagaaaaacctgatcacaaatgctggttttctgaataaaacccatcaggggcctttcatatatgctggtaaagtccagtcttttcatgtggcttacagaagactccatgatttatccctcacattcatattccaggcctgtcaaacacaacagcttattcacacctctctgccttagctccagttgctctctctgcaacccttcccccaaggtcagcaggtgagcgtgtaatcctctttgaggactcagctgagctgtatctgaagttcctaaattcccctccctttctccctgaatcaatcactcccttctttgtgtctcccatgaaggaagtgtccgcactttcaaaagtaacgcatataacacttatatgtcgtccttgttaagttaggtgtgtgtctcattcttgaggcatttccctcctcctccagtataagctgaatgcaggtaggaactctgtttcctgtttgttgtatccacaacatctggcttcatagtagctgctgagtaactggaataagggaaaactctaagcccttgagaacagggactaccaccagtgcttagtgcagtttctggcacataaacacttaaatgttgagtgaattaatgaatttaaatggagtattgttatgtaagtttacacacccatttcttccgaagaattgtcacaggagaagtctctttaaaaatccaaaccaaatctaagtgctttcctgagtctttgaagcaagtaaattctttgactcttactttccttcaaatttcactcttgatttccttcataaatgttataggacaatgtgcttatttccatttcatgaaaaacattttttagaggtatgagtttttatttcaaaatctcctgtattccttagtcctcttctaagcaagtaaaataccttcaacttattgtactctttctcttaaatacatgtatatcttatacattgttaagaataacttatttagaatttatggagattgtattcaatatttgccttttccaggaggataagataatagagggtttttttggtatcatgtaggaacgtctttttgaaacatgttatttgtgacaatgggagtttttcatggttgccttttccgaaagaacaacccagacatgataggcaa

SEQ ID NO: 62860 - DNA, 708 bp, Bovine  19866880663556
  misc_feature (1)..(1): n is a, c, g, or t
ntgtgttattgcctttaagactggctctattactagttttgaacaattgatttacgatgtgccttaaagaagtttgctttatttttcttataaggagaatatattgatctcagatctgtatgtttgaggttttcatcaaatttggaacatttttagtgattatatcttcaaacatttcatctctccaatttctatctctaattatacatatgtaatagagttttaataactgtcctaatttacatatatactacttcttatatctataacagttctcagttgattttgaatgattgattttcctctttattatgaattgtgtttttctacataccttataattttttagttggatgccaatcattatgaatttctctttcttgggtgctgaatatttttgtattcctataaatattcccgagctttcttatggaatgcagttatgttattaggaaacagtttgatccttgtgaattttgcttttaagatttgttatgtggaatcagagcagtgttaaatcaagggccttttaatctttaccgttgaggcaaccctctcctaggtactctacctaatgccccatgaaccttaaggttttccatattggttggtggcagcaagcatttgttgctgccctgtgtaagcaccaaacacaatatctccaatacttttggttacttctttcctggctcgggaagtttcctcaaa

SEQ ID NO: 62861 - DNA, 1392 bp, Bovine  19866880969217
  misc_feature (1)..(1): n is a, c, g, or t
ntgtggactgtgtattgtttcctgtattatatgaagagtgtgtagagtttgaaggtattaaatatggggcttctaagtatgaggtgctttgggtgaggagtttgggttgtttatgaggacagtgtgctgtgtggagtgtgggtgtggtgttgtgggtgtggtgtattaaggggagagttaaaaagaatgatgaggtggtaagggtagcagggcattgtgctggttttgaaggagaataaacatttgagactttgatgcctaattagattctttgggtataggaagatgaggagtgtatatatcaaagtgaatttacaaactgaattcacaagttgaataaattaccaatccatgcttttggactcccttcctctacagatttgaattacttggttggtgttctttctccaggaataatttaaaggatgagctaagattatttcttagtgaacccaactgtagtgccactggcatatgattgttttagggagaccctttgaaagtagagctgtatgcttcacgaagcacttggagttagaataccctgtaaacaccacttttgccttttgatgtttgaagaaaatgttgtagtgagatgtttttaatcatttattttggcattaacttagaagcttcagtaacatataggcagacatttccttcctttaacgctgtcatcattgcacatggtctaacattagcttagtaggcagtattttttcttaatgatattttgtagggcttttcttctttctttgatttttaaagttacttattcttacaactttatattctgatgtccatttccagagtttgcttttaattatctaagatacctgctacattagggaaatgcatgtgtctgcatttcattatactgtaactttcaaactcagaaagaggttctgaaaagttgaccacaagcttttggtgctttgaggattaggattggcctgagattttctgcctaatttcactttcttttttcattctccaattcagtcttctacctaatgtggaatatgattgtgtgacaaaggactctatatatctagaaatggttttatccttttgtaaaattgttctgctctggtaggaacagctttagactacaacaaaaaggatagtttactcattaaaacttactctagtaacttgttgctgttttctctcatttgtgacaattattatgctcagatgtattggttttggtctggaaatttagaattcttgtattcagaggtaaagtaagattttctgacaagcttttcagattttattttgagcacatgaaaacattctagtaagtttttttcttcaaacaattggcaatgctggaacagttgtttacaaaggaaaaaagaagcttaggcatctgcatcaaacaattat

SEQ ID NO: 62862 - DNA, 5465 bp, Bovine  19866881100366
  misc_feature (1)..(1): n is a, c, g, or t
ncttttgtctagttctagcaagatactggagctttccttcggtagcatttctgctctgacagtacactaagtgcaaaagaggatcttttgactgtcttttcagtcgaaaatgagaatatgctttacctaaaacccataacttcattcagtatcagtcacaggaaacttggttgtatattaattgattaaaccaccctgtccctagcatatgcttaaaagtgtttgctaaatacagcaggctggaagatgggaaaagtctgtggtccttcccttacagaaactgcatttgtgtgtttgagttagtcagacactttaaggggccagaaggataagtgttgaaaagagcttctactcagctccatctgattgttgccttgtgaaaatgaggcccaatattgccagattttttaagtaagaagccagaaaccagatttatttgtgaagtctccccatttttaaatgtttgttaacttattctgaaaattttaaaacattaggttgtctaaataaaacatgcttgggccatatagcttctgactgaaactttctgccctgcccaagaattcaagcaacaaagtattttactgaaatagatgttgcatgatctctgaagtatataagttttattactgaaatatagcttttctcttaactgaaaaatctaaaacatacataaacaggctaagaataagcattctaagaaaaatgctattagtaaataaatgtactttgaagtatagaagattttttatctttcataaatcattcccagtggtttcagtttggcgtatagcagactagtgtctgagaaacttcacctgcgaaatttcttggctttggcacagaaagggctccctttccttcaggcctcgagatcaccattccttggtagtgggaattgatgttttttcctacaaatggactcaagattatctcactaaaaacacatgtttgattgtttttttcaattgcagaattacaaaggggctgtaagaagtaaggtagtgggattgtgtgaaacctgtgtttagccctcagaaatctcgaagcctgaggtccagatcctcttttgggtccttccagccctggaagctgagacctcgctgaagtcttaacagtgatttacatacaggtggttggttggtggttttttttccccaaagccaactttgattccatcagtgtatttctaaggaaaatgtaaactgttcatacattctcttaacatcacagtgaaaaacaagtacccgtatgtgtgacagggcaggcagggagctccacctgctccggccttgacagaagcccttggccgcactggtgaacatgctggcttcacttctgcacagacacctatgtcgtgctgtcccactggagcaccggtggaccccaaaggcagggcagggggaggggttctttttgaaatgtttccaggagctctgtccagctgattctgtcttccagcctgggactgctgcacaaaactacaaggacactgatgagaccatagatctgttgcccttttctagggaagacttggcttggagtgtggctgcctggattcgaaaatgtgtccttgactccatggaataattcttatagttttgcctggaagagaccagagaatcagacatgtgaagctgctccaggttgtgatttttcccttagtctgagctgtgggaacccactagccaaggaatgtttttaaaggctgatccctatctctgtttaaagaaagagttgggcttaaatttaatagggattacctgttatcttgccttctggaaccactcttggtcctttggggcccagtatgaaggaatgatttcaagatccatgggctagaaggcaggagacctgcaccttcacaccagccctgcagcttgcagtgtgaccctggataactcagtcattgagtctgggatttcaattcctctttggtaaattagggaagaagcctccctataccaggtgagaactgggttcccccgggacacgggcccagcctctgggctgcctacactgcctttgccagcaccctctcacactgctgcctggcacctctgcctccccagagctcatggggaacaaaggccagaccaaggcaaatcaagccttacttggcagtttccaagagtttgacagcctcttcatttctgccttgctccataaacagcagggccagctccagcagggcatttgggatcaagtagtggtcatatttaatcctcttttcactgtaggacagaagaaaacacggcttacaggctcttctcttgagacatcctttgggcacgtccgtcagactcctcctgagcgtctcccaaatggaaggatccaattcatggtctcatggggttttctgacctgaattccaacttggaaggttcccactatttagccctagaaagacttaagaaccacagcaaagccttccagtcctctgcacctgggccctgagtccctgacaacctatggttcacgtcatgtcctaggcccacctccacctcagtccccaaccccacacccccccactgctgccctttatttcatctgcaaccctttccctctaggacttcacctaagcagggaaggactgaccgctgtcacctgacctcaagtctttcctgtgtccaggcattagcacatgctctacctactccacgtaaaactcctctttccttgctttctctgcctgataaacttgccaactgaagtggcgttactggaaagcctttcctggcgtctagcattatgtttaggtccttcctcctggcacctgctggcctctctgctttcctctggcacagccctcaccataccagattaagttacctatagctgtctctctaatatctgtactccccaaggatagagagtctcagttacaaactccagggggcaccattcacaggaaacactgcagataggctcctgtcgctgggcattctggtggccctggaggacaaggtctgaatgatctgggcctagaagggtcctggcacaaaacagaagctagtacatgtgaagcgagtaggagcaggccagagtcaggcactgtgcatgcgtgcgtatgggaagagaaacccagaaaatgccaccctggagccccgggcccagcagtaggccatctggagtgacagcagccacagaggcacttacttggcagagatgatcctgaaattctcctcagcctcctggacacggcccagatatttcagacacaggcctttcagcagcttcaccaagcactcgtcatccactgagtactcattctctgagaataggggagtgagggaagacagctttgttcattttctcaacactcatggagcccctactctgctgggccctggggacacagagatggctcacacatggcccctgtccgcagggagcgcacatctggggaggaaagacagatactgagacgatgacaatgcggtgaaatcaggactgactgaaggaagctcggggcttgtggaagcccagcagaggccctgatgctccctgggggacaagggacagcttcttggaggagctgttactgaaactcagcctagaaaggcagaggacaattaccagggcagagaagtgaggaaggacattttaggtagagggaaacttcagctgtaaagacctgtggtcagacccagcctggccagttcaagggcctggggtagtcacctgggcccttttccagcatctcttcagccttgatgataatctcaaggatcccatctgtgagttccggctgcttcccaatcacagcgtagccattccaaatgtacatcatttcctaggggcaggggagcaaatcagtcctaggtttcctccccagtggggcctcaagcttctccgtctataaaatgtgtagctcagatgaggatcactaaaggcccttctagctctaatcttccatggtaagtctcagcccagcttttgaagctgtaaggcttgagggagtgatggagattcttatctcttacttacgattgagatctctccttacccctgtgagaatttaagatggacccgtattctcactcttttcatatagttttcaattacgtttctgttcctgggtcccagggcactagtctgcactctccccatctctctgtccaaattccccatcctttgagaaaaaggtcatgcccctactctaaggagttgtcttccttgctccagctaacggcctcctgtattggaagagtcatagttgacgtaagctcttcaggggcttaagaccaagttaccttctctcctatttcactaaggcagtgggcctgagttttcatctatgaaacatgatttctttctttgccttaactgccaggaagctcagaatactaaattttcattctagtaactctaatctagttagccgagattagcatttcctaaactatcagaccaagcaatggacatgaaagtatttgtatacataaagttctagaaagactttttatatttttttttatgttctaggcagggactttaagttttgacaagtacttattaaatcattacatggtctaaaagagttctgtggctaaataacagggataaactgcatcttcaagcttcttctcggagacctaccatgcagatgagcatataaaggctccaagaaggtctacagtatgtaaactttgttcaggccggtctttcccaaatgtatttaatcacagaaataatcttatgcacacatagcatcttgcaggttacagttttggaaattctcccctaaatatccggttagctgctttccctgcccctccttacaacatatgccccaatttgatgacagctttattgtatattttgaattgtaaaatagttcaaaatttatttaaagatattcaggatataagctcaaaataaattctacataaatactgaacttgttaatttctgtagtgtttaataagtttttatcagcagactttcatacctgctctatgaaatgggcaaggtagatatttacattaaggggaaggggaccttgtatgcaagtcacacaattagtgagcagcatagccaggtctctgaagcagcacccttcctacctttctggctgccttattatttgaataacaaggactctttaacaaactagaacttgctctgatgcctgctcagatcatgcatggaattagcatcataattgtgattcagaaagttatgatgggctccggaaccagactgcctgggttcagattctaactcatcagctatgggacttggacaagttatttcatctttctacttatatcttatctatattttagcttcctacgtatctattaggcctttttatccccttctgtaaaatggagatgccaccagcacctaagagggttcttgtgaagatcagataaggcaataggcaatgggtgtaacgagccttgaacacagcatgtgcccagtagcaatgccagcaattactggtatttcaaagttga

SEQ ID NO: 62863 - DNA, 897 bp, Bovine  19866881464417
  misc_feature (1)..(1): n is a, c, g, or t
ngagccccgggaagccctttaagacattggaagcataagatatattgtaaaggcactggaaagagaacattcccaagtgtttaaatacctaatgtgcctccttgttattttaaaacttggctgatttgtgtttttaaattgaatttttaactgcttgaggcaaataaactgagataacagtgcaacctggtttcatactcattattgatctgtttatgtcaccatcaccccctcacaacacactcagacgtaggcatactcaggtgagatcctacatggcagggacatctttcatctccctcagcgcatatctggaagaaagttattaataatatttatcttatgaatgactgaaaattctgaataactctgggacagttacaaagattaaacagatgctgaagttagtttctgcccctggttattaaataataatagttttggagtagattgagtcattcagccagtatttgttaagtacctattatgtgccctgctctatgctggaattgtcttgagtagaatttttggcctctatcaattaagcaaaactgacagttgggaaaaatacctgaaaactaggttaattttctcgttcctcttctgcctgcctgccagcaaaccctccaattccccaaccaccaagataaattatctaaattatcatagtctagcttctagacaggatagaatgctagaatagtaaaatgttagtttcagtcccagctctgcggggagataactgtgtgtcattgagttaaatctccaggcctcagttttcttagctttaatattcatccaacaaatatgtactgaccatttattatgtactaggatttattctaggtgctgaggatatacttatgaacaagatagatgacaattcttggcactcag

SEQ ID NO: 62864 - DNA, 2986 bp, Bovine  19866880431250
  misc_feature (1)..(1): n is a, c, g, or t
ntgacatgaatgtcctcataattgtattgatatcagatgactatgtttttttcctttgtttttagttgtttttttttttttttttttattgaagtatatttgtttgaagggctgtgtcagtttctgctatacagcaaagtgaatcagcaatgtgcacacatacctcccctctcttttggatttacttactgctcaggtcaccacaagagcactgagtagaggtccttgtgctctacagcatgttcttactagctgtctatcctattcacagtatcaacagtgtatatgtgtcaatcccagtctcccagttcatcccactgcccttccctccttggtgtccgtacctttgttctctgtgtctgtgtctctatttctgctttgaaagattatgtttaattttaagacactttactttagaagcagaagaatgagggtaggaaaagcaaaacacaacttcactgatgaagcattgtacccacttaacgctatgtagtatcttatctttcaatccactgtataaattattgacaattttatactttaaaaatataaacatatatttttgatagagaaaacctgggttggaaaatttgacttctgttaaactgttggacccgaaatgccattttctgagaagttaaggatgataagttagtcttgaaaatcataaggaaaccaacaaaatccaatcaatcagcacctgagagaaaaccatactgcatgcagttcactttaagtaattaacaggatagaaagtatacccgtgaatttccctgtgactggaaagggcaataaaatgcgtagtggcaaattctgtccttcactctatcgaaggtcccattgctctgtttttgctttcctgccttgtaaggcattagccaaagagttcctttgggttttttttcataagatgttacagaaaagctgaacaaacattgtggccaacctaatgtatctactctcaggtgagcagatcataagcatgttcaaattaggagatgaaaaattttttaatattttatttaagcactcactgtgaaaactgatttcttctttataaaaaagaggatctcttttttcagtctgttctttgctcttataaatcttacttggccaagtcactaatgaaaaagaaaattgggtaaggtccatctgaatattctgagtccttcacaaaaactaatctaaaaggaagtcatctttgcagggaagaaggtgaaagagaacaaagatgtgaaggcaaaatagagtatttttattaatgcaaaggagagagatggtgcagagatagttattgtgttttctgcatggaatggacaaaagtgttatggacgagaaaaagaagcagagagagaaattggaagaaaagaaaagggagaacagggaagttgtgaggcagatactgctgagggcaggaagaagggaagaaaaggcactggcaagagctgagaaatgattgagattcacagcacaacacgacggatcccgtctcctaccgcccagctaggcctggaagactagaaatggcagtccacgcgtgaattcatccctggctctgtatttcctccccttcacagcctgtcttgcaaaaaccatcagggagccctaaacatccctgcttcttttatgaaatctcctctatttataaggtgcaaaggtaacaagggaccggagtcaacgttcctttctagttagcacaaacatcctttcggcttgaatgaggagtcacttataagatggataatgaccatgtacatcagttgctcagtcgtgtccaactcattgggacactgtgcactgtaccctgctaggatcctctgtctgtggggatgctccaggtaagaatactgcagtgggaagatccaggagatcttcctgattcaggaattgaacccccatctcctgcatctcctgcgtctcctgcattgggagctggattctttaccactagcgccacctgggaagcgcctgtaggagaccatggaaagcaggaaaatagcgtgtgtctggccacttgcacacgtgctaggtcacttcagctgtgtctggctctttgcaaccctatggactgtagcctgccaggctcctcaggtatctccaagaaaaacaagctgtttgcaaagtgcattttgcaaaacaaaaccgtgaatggtttctggagcttcaagtgaatcccagtgtgagaggtgcctgcagttcaatcaatgagagtaaccgacctctgctccaggcctgatacagcaaagaacactttgtctttttaggatggaaaaaacaggaggccaacacctgttgcctttgagagatgggaccccaactgaccttgaaaagttttctaattttctctgtttcaaaattttctgtaatgagtctgtctgtgatgtgctttccctccccccatcccaaattagtgtttgctgaggcagaggtgacacaagagtgacaggaggctgttttagtgattctccatcaagggattcttctctgaccctggaccaaagcagccatgatcacctggaacttgcctgtgatgccctggagggtgagttcaaactgacacacagccggtctctgtatccatagcgtctgagagagtggctctgggatgcagcctgaaaacgtatatttctacaaagttatttggtgctgctgctgctgctgctgctatcaggacagctctttgagaatcactagcctatggcacacagaaggcaatggcaccctactccagtactcttgcctggaaaatcctatggacggtggaccctggtaggctgcagtccatagggtcgctaagagttggacacgactgagcgacttcactttcacttttcactttcatgcattggagaaggaaatggcaacccactccagtgttcttgcctggagaatcccagggatgggggagcctggtgggcttccatctatggggtcgcacagagtggacacgactaagcgacttagcagcagcagcaacagcagccta

SEQ ID NO: 62865 - DNA, 2976 bp, Bovine  19866880444832
  misc_feature (1)..(1): n is a, c, g, or t
natcagtcctcccaatgaatattcaggattgatttcctttaggattgactggttggatctccttgcagttcaagggactctcaagagtcttctccaacaccacagttcaaaggcatcgattctttggcactcagccttctttatggtccaaaactcccatctatatatgactactggaaaaaccacagcattgactatactgaactttgtcggtaaagtgatatctctgcttttgaatatgctgtctaggtttgtcatagcttttcttccaaagagcaagcgtcttttaatttcagcagagaacttaaagtctgtggctcactttacttatttctgaaacaggttaattagcagcatgtgctctacagggataatatacattaaatgtgatgatttatagaaactgcttagaagagtgttgggcatttaggaaccactcaaacctctgctcctcattcacctcagtctgcttaaatgaaatcttttttacctctatgcatgtccttagttaatgatgcagaaagaggtggcgcctcttttgcaggaaagcagaagtcactgctattgctgaaaagattattcagcaggttaatgacaccagcctccttcctgggacctaagctctggtgtcaggattggtgtctttgtccagaggtcatctgtctgtgctgatcttgcctgtgtctgacaagcactttaatggagaactagacctgagcgtatctgtaccccaaatccagcagttaatgctgatgctggtcttgtttaccttagtttgcattgtcatctctaccaaacaattagacacaaaggcagctgcatgtattatttgagctttctattccactggggacttcccaggtggcatgagtggtaaagaaccctcctgacaatggaggagatgcaggagacacaagtttgatccctgcactgggaagatcccctggaggaggagcggcaaccactccagtatgcttgcctggagaatccaatgaacagaggagcctggagggctacaatccatgggctcgcaaagagtcagacacgactgagcgactgagcgcactgcacactcagctgacagctctcctcaaaggtaaggaggtaaggagttgaagaggagcctaaatcatttatttcttcagaggacacaaggcaaacagtttattgtcaggtatatagggtgaaaaagtgactccttaaaccaagaaaagctaaaggagaaacttaccagatttttctaaagtttattttcaaatcattgttttgtgaaattacttttgcaggtattaataaatgatcatctcctgtattttccatctcatcctctttttccatggctacttgggagtaactgaagttacaataaacttagatatgctcactattagacagtcttctctgaaaggcacttgcaaaattatgctttgtttttgtgcctgttaaattgcagttttcactgaacattacctaatggtaatcctctacactctataaacttgtaacaatccttcataagctaacacctcattaaaccagtgtcttgattcagaagagtgcataattcaaaacaactgctattccctagccaaataaaatttctcatattatcaaacaaaatattgggaaatccaaactggctaattaaagcttttttttttttttggttccatgaattttgattttaatgaggttttacaaaactggccttgcatattcctaccatagagatccaactacttcacacataaatctctttaatctttaagacatatattcatgatttataaaacactatacaaattgtctcatgttctcttacacacatctatgtatacacacatatatagttacatagttgatacgtttttctgagttactaaatataaaattttaaacaaacatgttaatatcatgagtggcttagttcttaagaatcgaattaatcaagagtagacatttttatggcacatttcttacaaaaattccatattttaatctataatacccataatacatagctagaattttgcatataattgacttaaaatacttattggttgaatatgttaatgaatattggaatgacaatttattataattttactatatgcaaagtgcctaattctactgagaattcttatagtagatattttgtgatatagatgaatctatatcctttatctattctatatcctatatctatatcctatatctattcatcctatagatgaatctattcatcctatagatgaatctttatcctaaaaaaaatgttaaaaaaaaaaaccaggaaaattcctggtgatccagtggttaagactcctcccattccactgcagaggccatggtttcaatccttgatggaggaactaagatcccatatgtcttgggagcatggccccaaaatacatattataaaatttaaaaaataattaaaaatttaaaaatgtcaaaaaacatatgtaagacaaataaaaagcagatcatggcaaatgccataacagagacctgacagaatgcaagaagttagagaagacaaagtaactgtggctcaggaaatcttgaaggcccattagtaaaattgagaaatgttagtgaaggcaaaaagacaagacataaaagccagaatttgcattttttcaacacagatgggggaaaaaacagataggctaaaattgaatatttacaacaggtttatatgatgagaaagtacttttcttattgatgagctacaagtagcaattttctcgagttcctaattttatataaatataaaaaggtgaacttatgtatacttttgggcttcccttgtggctcagctggtaaagaatccgcctgcaatgtgggagacctgggtttgatccctgggttgggaagatcccctggagaagggaaaggctacccactccagtattttggcctggagaattccatgcactctatagcctatggggttgcaaagagtggacagga

SEQ ID NO: 62866 - DNA, 1288 bp, Bovine  19866880518870
  misc_feature (1)..(1): n is a, c, g, or t
ntcattaataatatttgcctaaaataagatagacccagtttccaaaggctagttcttgtcccgggaagaaaaaaagcatttgagttacccccttcttttttttttttaacagatattgtactgtgatggcaagtaaaagtgtgtgccttggggctatgctgtctgggggttgtctagactagagacggccctactattttatgattgtacaagataactgtctgaatcatcctttgtctcaatgtcaccctcccatttccagaaggcatcttctgtattttctgtcttctccaataaaaggataattttgcaggctcatttctgatttctcatgtgctcttctcagcattttgagtagacacccactgtcactttgaccaagaataggggtgaaattctggagtgataaagttctaaacaagttaatctcctctccctggatttcatagaattgcttagtgacacaattatattcagtttccaaaattagatataatcattttcttccttgtaaaggttaatagacacttaaaagcaacagcaagtgattggataggcttctaaatttgggattccaagatcaaataatgtggcttcatgctacacaaaaatattgaaatattttctattttgatgttacaccttccatgcatgagctgggtccgaaatttatttatttaaagaagacccctctcatgaactctagacttatacaataaactgcttttttgactacctcagaaaatcttgcatatgcaacatatgcatgcttatgttgctcagttgtgtctgactctttgtgaccctgtggactgtagcctctttccatgggactttccaggcaagaatactggagtgggttgccatttccctctctagtggaccttcccaacccaaggatcaaacttgactctcctgcattggcaggcagattctttaccactgcgccacctgggaagccccaaatatgctggctgccaagtaagtagaaatgaaacttagcaggtaccaataaaacccttaatacacttctagcctacttggcttccttcagttttcaccatctcaattaatggtttattcttcctctagtccttcagatcccaaactgaattccatctgtttgtttattcctaaatttctgtgcatcaataaggtactaagaatcttaacatttctccttctcaacctccctttcttcttgctcttctcagcttaaaatatgtgcactggatcattttgcagccctacccaccctgtgttttgttaactaatattttatctctaa

SEQ ID NO: 62867 - DNA, 886 bp, Bovine  19866880537399
  misc_feature (1)..(1): n is a, c, g, or t
ncccttatttttgtaaatatcaagccttaggctaacttgatgcttttctgcttgcttgtgtgttggattctttctcagagtgccatccagaagattttcacattttcaaataaaataatttatagaaaaactaagggggaatttgtttcaaaggactcaaaattgaaacaaacaaagcaaacatcaaaggaaatgttcctgccaggttgaactcttaagcaacttctaagaacttttcaatcacatcagagaacatatatgaaaatatatttttaaatgccacaatgccagttttgatgccaactaaccggaaataacccactgaaaggaaaatgcatttcattttctccctctcccctcatctctctgtatatacatacttcaatagatagatatatttttaaatctctgtgtatacgtatttgaaacatcactatcactgaaaggttttaaaacagcatttccatgaagtgagacataaagtctatcccaccttcctcctagacggcttttaagctttcggtttgcaggaggtaacctagaagctttcacatcaggcagtcttttatgtttagagaggcatgagctgtgattatattgattgatttcaagggcatattagagatgaagccaagtctctggagagaggttgccgtcaccttgaccttgggtcagcgttagaccactgacctttgaacctaagacctatctaccagattctgataccatccaggccacccgagcaagtcagcgggggactcaacgtcgatgtgcctctggccaaatcagaattgactggccggtaggaagcccacgagcagagggaaatgcaggttaaagtatgtcaataatgtttcagaagaacgatttctctcaagaattgtag

SEQ ID NO: 62868 - DNA, 1632 bp, Bovine  19866880561603
  misc_feature (1)..(1): n is a, c, g, or t
naaaccccccagcaggaatcacaggaggtggaccttcgtgactgctgccattggggtagtggtggtggatttgccttacagattcctaacaatgcatttccaccttcttttctgtaaggatcagcactggtggagataaagggattttcctttctgtccatcccattaacaggatctcatccagccttgacaatagatgtgctaattagagttaattgctctaatggacactagtctagcaggactcaacacatagttcattcaaatagaaaagtactttactgaaggctatgaatgcatgaatttcaactgtttacttcagagtaaagggaaaatatacatccaagtctcctaaattctaaaagctgttttctgtattttgaaagaatgtttaaaataaaatcgtttttggttgatcttctaatttcaccaaggggtaaagcaatttctcccaaagaaatggattcataagaaatcagcacgagggacttccctggtggtccagtggctaagcgtctgcattcccagtgcaggaggctgggattccatccgtggtgagggaactagatcccacatgctgcaaataagacctggtagagctaaataaattaaagaaaaagaaaacactaatttaaaaaaaaagaaaagaaagcagcctgagaccgactgtgatactggatgaaatatcaagtttcctctttttctaacagttcacattcagttctttccagcagttttcacattctttaatgtttcccatagaattatgcatgtgtatacatataccctcattctgttagagatttgtcaatccctaggctccaggtgtcttctgaatcttagagatagagctaaacaattcaagacacagatgatacagataaaggtgtaaatagagatatagatatgtatctatataccatctatatctatatctatataatagatccaatctggcagcttggataagacagtgccctgtgtgggtgctaagtcacttcagacatgtccagcttgtgcgactccacgaactgcagcctgccaggctcctctgtccatggaattctccagccaaaaattctagtagtgggttgcacttccttctccaggggatctaaggtggctccaaattaaggaaaataaatcagttattcccaatcaatttttttcaaaaagtaaaaatactgtaaagttttccctaagaccaaagtcattattttataatgttaaagactggatcaaaataaaacatagaaaaaatgttagaagagatgaacatggattgctcatcattttaatgataatacatcattttcaagggtgtggatgggatccctaatttcagagcattcacaattgattacaaacagttcaatttacacgtgttggaaaatgagatattgtggagaactagaagcacaggaagacagcccgaggcaatcgctgatcaagtcagatctatgtggtctgtgggttttgctggaaaatcttttaccaagtaccttcacacatagttttgggctttgggataaaaagattgttcaccaaagggaaggaaaggttatttactgccatcaggaacagaggctctaatagtaaagtatacgaaggttattatctatcacacattaa

SEQ ID NO: 62869 - DNA, 3412 bp, Bovine  19866880597394
  misc_feature (1)..(1): n is a, c, g, or t
naaggaaacatgaatataaaaattgcatggttgattggcctgtttctggtggggtaggccacccttaatagaaatcagtttttctcctctttctctaacttgctatatctctgaaataaatggaatttctgtccagacctctcctttcaactccacttttacaatatcattaagtgttaacttatgtgacatacactcaaaatctgaagtggtccagaagaagggaaatcaagttaggtcttatgtcatcagcaaagagcagtttagacatgtctcctgctcagggaaagaagagaccacttctagccagggcagtgaccatgacgaggtcagtcagcatcctctacgtatttcggattccaggaggaaacagaactggctgcagcagaggctgtaagttgaggggtaaaagaattaaaaaattagttaagaagccagattgtagagcattgtgttgttgttcagtcacagttatgtccaactctttgggaccccttggactacagcagccaggcttcactgtccttcactatctcctggagtttgctaaaactcatgtccactgaatcaatgatactattcaaccatcttaccctctgtcaccctgttctcctcctgccctcaatatttcccagcatcaggctgtttcccagtgagtcaactctatgcatcatctggcctaagtattggaccttcagctccagcatcagtccttcccatgaatattcagggttgatttcctttaagattgactggtttgatttctttgcggtcccagggactctcaagagtcttctcaagcaccacagtttgaaagcatcaattcttcagggctcagccttatttatggttcaactctcacatctgcacatgactactagaaaagccatagctttgactatatgcacccttttcagcaaagtgttgtctctgcttctaatatgctgtctaggtttatcatagcttgtgagaaccatccaaaacagttaagtataaatgaataggtgtcattgaagttacatcttcagattttttctgatctccatacaataggaacaatgttgtacttgatgaagtttatatatataaatatatatatttatatttatattgaaaacaagtcagctttctgtggtactgtgttcttcaggaagaccagataaaaatgaaacaaaagttaatgtgttgaccagctaccatttgcctctagcttgaaagtggaggttgctcagtcatgtcctgctctttgcgaccccatggactatacagtccatggaattctccaggccagaatactggagtgggtagcctatcccttctccagtggatcttcttgacccaggaatcaaacagaggtctcctgcattgcaggcagattctttaccaactgagctatcagggaagccctaaatacagacactggttcagatatagatttagatataaatgtagccgttcccttctcatgaaacttacatgtaagttattattctatcactttcacacacacatatacacacaataataaagctaagagagattacatatatcctcaagaatacacagctcagtagtaggaggtaaattgtggactcggatctactatatttttccaaactgttcttctcaaaagtctttgtccagagctttcttgtagaggagacgagagagtgaacaggagttaatataattgtgtccagctaacatcttcatgaaaccagtgttaggaagaatctggagctcagtcagtcagttcagtcactcatttgtgtctgactctttgcaatcccatggactgcagcacgccaggctttcttgtccattaccaaatcctgaagcttgctcaaactcatgtccatcatgtcggtgatagcatccaaccatctcttcctctgaattcccttctcctcctaccttcaatctttcccagtatcagggtccttttcaaatgagtcagttctttgcataaggtggccaaagtattagagcttcagcttcagcatcagtccttccaatgaatattcaggactgatttcctttaggactgactggtttgatgtccttgcagtccaagggactctcaagagtcttctccaacgccactgttcaaaagcgccaattctttgctctggagcttagagaagcaatattatctgctcagggtcctaaagctgagagagaaagaatcaacagaaaagagttaatcagccagatacgggtaaggtatatcagaggctaatttttgtcctttaaaaacatttttttttaatttggctgtcccaggtcttagttgtggcacacaggttctttgatcttcactgagacatgtgcctttgttgttgctgttgcagcatttgaactcttacctgtggcatatgggatctattaatagatccctgaccagtgatcgaaccctggccctctgcattagaagcatggagtctaagcccccagagaagtccttaatgcttatgctgttttatgttattctacagcatccaaaacgtatgaattgaagtttgagccaagcacaaatattggctaaagccctgggtagcattagtcttgatgatctcaaagaaagaaagtgaaagtgaagtagctcagttgggtctgactctcagcaaccccatggactgtagcctaccaggctcctccatccatgggattttccaggcaagaatattggagtgggttgtcatttctttctctaggagatcttcccgacccagggattgaacccagatctcctgcattgtaggcagacgctttaccgtctgagccaccagggaagatttgatgatctcagtcattcagcatttgcctactcagagactattctcagaaaatacccaatttaagtctcaggaaatccaatgagcacatcagaggagggtgatttgtgctcaatcatgtttgactctttgcaaccccatggactatagcccagcaggctcttctgtccatgggatacctcaggcaagaatactggaatgggtttccacttcctatgccaagggatcttccaaacccaaggatcggacctgtgtctcttacgtctcttgcactgacaggcaggttccttaccattaacgccacctggaaagccatggtgttttaccaggttgaaatcaccaaagaactcatagcattggaagaaaagaaatttgcatacgctacagtaatccacctgcagtgcaggagacctgcgttcgatcctgggttgggaagatgccttggagagggcatggcaacccaatctagtattcttacctgcagaatccccatggacaaaggagcctagcgggccacagtccacagggtcacaaagagctggacacaactgagtgactaatcacacacacatgcacagtaacctgcgtgctatatagtagggattcaataaatggca

SEQ ID NO: 62870 - DNA, 822 bp, Bovine  19866880606034
  misc_feature (1)..(1): n is a, c, g, or t
ncctagaaggagcttctggggacacagacagtgaaagtccaccaccataagaaggatctgactcaggttaagagccaagactaagaaaaagcatctcaagtatatttcacgatgcatctaccttcaatggagaagaaaatgagtaataataataaaatatttaaattactattttatatattttttctaaatttcttaaaataactctctagatctccaaatttcactctctccccatgatttcatgtttttttacacgttgtgggtgtgtgctaagtggcttcagtcatgtccaattctttgcaacccatggactgtagcccaccaggttcctctgtccaagggattctccaggcatgaatactggagtggtgtgccatgccctccttcaggggctcttcctgacccagggattgaacctgcatctcttatgtctcttgcaatggcaaggaggtcctttaccactagcatcacctgggaaggcctctctacacttcacctgcataattaaaggtttgacaaatgtacaaagtcttcagcttcttcaatatgacttgttttaaagttctagatgaaaaactcatgtcaatcttcattttatctacatcttgtttccacccattgtcatcacagtatgacaagcaaaactcttttattgcaacagcatttttttttttttttggtatagcaatatccttaatgttttgtttgcagtaaaaaggcttaaaatgctatttttcttctcttcacttaaaagcaatcagtctccctctcactgagctcctactcagacaactaatatccagaattataccatatcag

SEQ ID NO: 62871 - DNA, 2034 bp, Bovine  19866880699832
  misc_feature (1)..(1): n is a, c, g, or t
ntcattcaccttcatcatcctgatctaaaagctttattctcaacattttgtcataaaatgctgtgtacacagcctcaaagagtagctgaatatctctccagtatttgatttgacactaaaataccaatagcaatacacttagtttatgttgtacaaagaaaataatagagcaatgaaatcataaaatacaaaaatgattgaatatttttttctaatgagttgctgtgaattaaataacttgacagaggcaggaataattttttttgaggacagactattgattgttttttaaaaataatccgaatttatttggaaagctaagcatgcattcaatatattttatcttttacaagaccattacgaatgaattctatttattaacctggtatgtgatattcaaatatttctttagagattgcttttcatctctttggaaagagtgtgctgtgtaaatattcttttatatacccttcttactctagacataccagtatttgatatcagatttcatatttaaattatccaaaatacatttgaaactaaaaacaatgtggacaatacactaccagtattatgcgtgaaaaacaaaggagaaaaacataaaaatcaatgaagtaatggaaataatcccaaatgatatttaaagaatgatagaatttggaaaatagagtcagcactgacgcttagttggctaaggatctgaagcttggaaataagaaataaaaatgatcgaagccaagtcacaaagtatctaaaactaaatgaaacagtacaagcatgtgtaagtgacatttttttgatgggtgacatttcaagaaaagtagaaatgcacaccctttaaaaaaatgtgagataggaaaaaatgcttaagatttaattactcttgagaagtacagggtgcactcagtcaccctgacttgccctaagactgtacatgattttctccccccattgctcggttaagcataaattcatagatttcatggttaagagagcttgagatgagatgctgggtccctgcactcagtcctgccacttcttatcggaccatctgctgtcacctcaaaaagccaagactgtataatctcggtaaacatacaaaccattcctgcatttcatttcggttggaaggaggatcccattatgtgtattgattttgaagtgtcagtaccttcttttgatgaattctcagctactgactgcctttccacgaacacaatattaagtcttaaaagtgtttactccaaacttcttccacaaatgcttaataaggttcatggtcttagaagttaatccagtttacacgaaagtctgcctgtgtgttttgctcacctttttgatgcaagaggcgtttgttatcaatagacccacaggtgccgaaatgggcacagggttcacgatacgcagaagcaagaatcactggttgctgagaccagaggtgggagagcaaaagctcctagaactgtctcaaagactggattatactgaccatgggggacaggcgtgtgtccttacagctgggtctcagtgtgtatacatgttcgggcatgggggataggaatgcagaaagccaaaagagacgatggaatcatagctgcagaaaaggacatttatagaggctgtacctttcctcaaatctttacttatacattttattgtgcttcattctcagttttattagtgctttagcactctgtaggatctacatgcaatactatatccagattgaagaacaaacctcacttttaaggaaagataaaaccttggaagtttccagagaaaacacattatttaaaaggtaaaaagaatcccaaagatggctaggattccaaattctgacttttatcagaaactatggaggccaaagttaatgtaaagacactttaaaaagtgctgggggggaaaaaaaaatcaagacctcagatgatgcccatagcaacaaaaaataaaacagaattcttccagaataaaggtgaaataaaagcattttaaggtaaaagaaagccaaaagaattatgaccagcccaccatcaa

SEQ ID NO: 62872 - DNA, 660 bp, Bovine  19866880876694
  misc_feature (1)..(1): n is a, c, g, or t
ntgggacctttccgaatcaggggttgcctgcattggcaggcagaatcttcatcactgagccaccagaaaagccctggtagttattttgcttttccctggaggctcagtggtaaagaatcctccctgggtcaggaagattccctggaggaggaaatggcaacccactctagtattcttgcctgggaaaccccatggacaggggagcctggtgggctacagtccatagggtggcaaagagttggacatgactgagcacacacatctgggtctctgtaaatatttacaccataaataaggaaaggagagctgtccaggcagagagaagccatatgaggctgagtccgggaagaagctacaggtgtgattggatgtgcagagctgagtgctatagtggggggcagggcatgcagaagggccagatggtgaatcatatggaaattgtgaaaactgatgcgataacatctcctttgctttgaactctgttgaaaaagacaagattatgtttagacactgagacctgaatcaataaaagagcagagagatccgtccaaaggcgggagattgagctctttaaatgatgcgtatttcagaatatcttttcttcctaaggaagtcttggtgcagaaataaactgccctacttaggagcaaggagcatttt

SEQ ID NO: 62873 - DNA, 1284 bp, Bovine  19866880936504
  misc_feature (1)..(1): n is a, c, g, or t
nattatgctttggtaatgctgatggctcaggtctggacattacagaaggacagttcagccaccaccccagattacacatgcaagtgttcttgtctatttagctgctttttaacttgtctggagttagtctggaacacactgccaggattggcaaaggagcacagtcagcatataattgatttaattaataattcatgtattcattcattcaacaaacacttttacctagctcctagcaattcaggcatcatgctggggacttagtgtcaggcacaaagcccaagactagccacattctggctgatgggccagaacaagaagcagaaagagtagatcacaaagcgtgtatgatgtagcaaaattagataatctcatttatgcagtttcaaccctattttttaaatgggattttttcaattgaattacatttacttataaaaatatatacccacattatgctatcaggagcttcatcaaaaagatttgaagtggctttccccttaattacctctaccaatttctagcagaatatcagatgagcagagtaaaatatccattgcataccacccactacactgacctcaataaattgtttatttcagtgtctagattgaacaattgaaatgtctgcattattgagcagtggtcaggtaaaattcaaaagaagctcctcttctttttcaaatagattcttttgtttatttatttatttattttttgctgtcatttaaatttctaatattttagagagtagatattcagtaatggttataaacacttattttgcctaattcagctaaatgggttgtctctttttagtatatgctaaagttagctctatttttcataaagacagaagtacaatgtaatattccctccctgtctgtatctttggagagtatactgtatttacattttgcagtttaaactgggggtcacaaaaggaaaatgatttgctttgaacttcggtgaataaactgactgtgatgtccacagtgtatagctaaatcactattatgaattaattcaattttatttttatcattagtatcagcctgttgactaaacccttccctggtggctcagtggtcaagaatcctttggccaaggcaggagatgcaggtttaatccgtgggtcaggaagatcccctggaggaagaaatggcaacccactcaggtattcttgcctgggaaacgccatggacagaggagcctgacaggctacagtctgggcggtcacaagagagtggacatgcctgaagcaaccgagcacacatgcatgta

SEQ ID NO: 62874 - DNA, 986 bp, Bovine  19866881065863
  misc_feature (1)..(1): n is a, c, g, or t
nagtgtcctctgtattctttatctcttcttctattctattatttaatctatctatacatgagcaattccaaagtatacgttttccaaatctaacagcaaacatgctaatgagtattacaatgtatttgataactccaaccacctgttgaaaaaaatgtaaatctaagagctatttgggagattgggattgacagacacatacacacaattgatgctatgcataaaatagataacaaataagaacctactgtagagcacagggaactctactcagtgctttgtggtgacctaaatgggaaggaaatccaaaagagaggggatatatatacatatagctgggtcactttgctatacagcagaaattaatgcaacattgtaaagaaactatgtgttagaattgttactcagtcctgtctgactttttgccaccccatagtctgttcatggaattctctaggcaaggatattggagtgggttgctactccaataaaaaataagtaaaaacacaaaaaggaatttcagaaaactccttggatctggaagtttactttagttaaaaggatttaaccgtcagtttccagctattcagttgctaatgagtttctggagagagcagcattcagatcaaggagatggtggttgaagtcttctagaaaaccctgctgctcattgttgactagaatcaagatataattaatcatgcccttggtctctccctcagtgtctctgtcactcccagtgacttaaaggtaaggtcagctgagacggttttgaacttgaattgcttttgcttcggaaatatctacaggctaaaaaaatcttaatttgttttaaatgtcttaaaaagaaaatgcatttattcaaatgactccctctttatttctagtttttccttacttgtaatttttttcacgtaaagaaaaggggcgtttctttttttttattttattttttggcaccctatctagcaataaaaagttcttca

SEQ ID NO: 62875 - DNA, 1198 bp, Bovine  19866881310382
  misc_feature (1)..(1): n is a, c, g, or t
ntttttctcttttatttcctcctgtttccctgagacaggagggcaaggttgcttcttgaagatgtctgatggtgagggaaaagatgcccaaagagaccgtttagagtggatgaaaagggaggatggaaaggaaattatatacaaatattctgcctctttaaagatcaatgttttcagttttctagtcttttcatccactacaagagcttgacttctttctgtattccttccatgaggatgttaccactcctcttaagtgattaagtgcctaagattctaatgacttcccagatcttgtggagaatactggctaaacaataataagtagaaatacagtatgctacagtcatccctggaggtccagtggttaagactcagctcttctaatgcagggagcatgggttcaacccctggttgtgtaaataagaccccacattccacatggcccaaaacaaatagataaataaataaaataaagcttagaaaaagaaatacaagatgcttattgtatatatgttccgctatatcgtatgtgtatattgccaacactagcaaactctgataaataacttttgttggtgagaaaatgtcattaattcaaaagtattgagtttccatgtctgttttatactggacaaaactatccacagagggatatgcaaattggcaccaactgtattaagcatcctaatgcaatttcacctgctaattaatctcatctaaattgtgattttgatctaaatattaagttccagaggatctcataccagatcactcttgcaaactatccccctggttataatttaaaacatacgtatgaacaaatattgagtctctttgaattctttaaaatcgtattgttttgaaaataagcaattacaagctatttcctgcatgtcagttattatttatttgtataaaatgtttcatgtttccttggttttgccatgaaatcttattagcatgttcacattttacaaatttaaagtataaaaaatgagtcttagaattggaaagtaggagttgtaaaaatgggagaaaagatacagaatatatttttttaaaaggatagaagaactggagtaacatttattacatttgaaagtagtgaaagtagtgtcttttctcagctaacccctttccgtgccagcaacaccaagatccagagaataaaggaacacattcttaacagcagccc

SEQ ID NO: 62876 - DNA, 1535 bp, Bovine  19866881395709
  misc_feature (1)..(1): n is a, c, g, or t
ntaaggagagaggaacttctcgttgagtatcgcaagggcgatgttctatttcttactctccacattccaacccctagcgtctcactggggaggaagaaataatggaatacacagatgagtatagagtggaataagtaagggtagaatgatgtagaatgtttgcaggctaatattaatgtatgagaataatcttaagaaaataaagcccatctatggggaaaagcaagacaggaatgttatcgagaaataaaatcatgtgtagtatctaaaccaattcatgactttgacactcaaggaggattcttagcaacaaagccagagatgcaaatgccttcagaagatccagactctacacacagagtgagaaactctaaaaaacgctgagtgaaggtgatcatcaatttttagcaagtcagaagatttaggggcagtttagcatttgtaaaagagaggctgacaaaatgacctgcaggtcagatccggtccactgcgggtttttatattgtgtgtgaactaaggacatttttacagtttaaaatgctggaaaaaattaaaaagtgaataatagttcatgacatctgaaaattacgtgaaattcacatttcagtgtcaataaataaagacttaatggtacacaaccacaccctcgcatttatcttcatctcatctttcactgtaacaacagagttgagtagttacaacagagacctagcgcgagcctgcaaagcctaaaatattgcttacattcctggccctttatggaaaaatttggcagtccctgaaccacaagtttctttatttttattttattcttgctttaaaatagattgactttctactatctgtttccatggagtcaaatttgattgatgtggagttgtgttaaaaactgagtttctttctttcttttttagaaaaagaaatggtaactttgggtcggttattgatttctttgtttctgaaaacacttggaaaagacccagactcttagcttgtgtctaccactgagctagtctctctcccacagttgcacagactgcaagcatatgctgtcagtggaaacattttttttttttaatccatttcatgagtatagattgagcattgtcctaggcgttgggagtgtggcaggaaaaaggacagccaaagtccctattctcacagaaggtactttcttgcagtgggagacaaatcataaaaatgtaaacagatgagccagaaaagtagagatcctgataagctatatgtaagagattaacaggaacaattgggatgggatgggatggggagcttgtgaagacaggaaaggactcttcgagcaaataatctttgagttaaactgaaaggatgaaagaaatcaaccacacacatggcccatggaagagggtgccaagcaaaagggttggaaaacgctgggtctacaggccacttggcccctgctggccaagaggatgtggtggtgtctgaggaagtgactcattgagcaggggaggatggaagaaggaaaaagaagtgggagaaagggggtaatcaag

SEQ ID NO: 62877 - DNA, 1706 bp, Bovine  19866881430221
  misc_feature (1)..(1): n is a, c, g, or t
ntacagtccatgaggttgcaaagagtcagacatgactgagcagcaaacacacacacatctccccatacaaacatacacacaccacacttattaaatatggaccaacttctgtctttcttaataattctcagattagactcctcctctgatcctctctatacagagtaaggcccagaagatgtcaattatgatgtgatcactcttaactgactgagggatgtctagcaaggaggcaagctgtgaacaagaagacaatgcattggatccacaaggcgagagacaagttaaatcaggagccagaggaaagacaccagcaaacagaaatcccatccatcatagggtgcttgagaccccggggtgtgcagggagaaagtgaagcatgaacactgagttccactggcctgaaatggatgttgtccaatatgtccgttggttccagaggactctattcctaaagccaagtctgggaatgcctagggtcaggtcttcctgacatcacttggtgttacctatctacttcttcctctggcttagggacaagagagctgccctggagcaccacgtgatttatcactctaggatgtgtgtatataatgtctgtcattcaacatatattcctgtgtccatgggattctccgggcaagcatactgcagcgggttaccattcccttctccaggggatcttcccaacacatgggttgaacctgggtctcctgcattgcagacagattctttactgtctgagccaccaggaaagcccatacacacatacacacacattttattaatatgttagtcaataaaagaatagttgctcttattatgaaggatctctaatcttttctatcaggctttaaattgactcaggaaatattacactggaaaaaaatatattatgttggtcttcagatcagatcagaccagatcagtcgctcagtcgtgtccgactctttgcgaccccatgaatcgcagcacgccaggcctccctgtccatcaccaactcctggagttcactgagactcacgtccatcgaatcagtgatgccatccagccatcttatcctctgtcatccccttctcctcctgcccccaatccctcccagcatcagagtcttttccaatgagtcaactcttcacatgaggtggccaaagtactggagcttcagctttagcatcattccttccaaagaaatcccagggctgatctccttcagaatggactggttggatctccttgcagtccaagggactctcaagagtcttctccaacaccacagttcaaaagcatcaattcttcggcactcagccttcttcccagtccaactctcacatccatacatgaccacaggaaaaaccatagccttgactagacgaacctttgttggcaaattcccgtaaaataatgaaatgtagaatataagtattttgataatggatatgatttctaactaattcaagtgcatgcatctgatattgaattgtcatatctcaaggaccatctgtgactgtttgtgtttacacaaagccgattactcaggacagaacccaccatttgcagtcaatttggcctcaagcactctgataaagcagtaaagaggagtgatgaaggagcctcagaagatgcatggagatttagaagcttctgttcagcagctaagggctcatgctggggtttgttccttttacctccagaagtgatttgaagta

SEQ ID NO: 62878 - DNA, 1513 bp, Bovine  19866880055503
  misc_feature (1)..(1): n is a, c, g, or t
ntagatagcatattcaaaagcagagacattactttgccacaaaggtccgtctagtcaaggctatagtttttcctgtggtcgtgtatggatgtgagagttggactgtgaagaaggctgagtgctgaagaattgatgcttttgaactgtggtgttggagaagactcttgagagtcccttggactgcaaggagatccaaccagtccattctgaaggagatcagccctgggtgttctttggaaggaatgatgctaaagctgaaactccagtactttggccacctcatgtgaagagttgactcattggaaaagactctgatgctgggagggattgggggcaggaggagaaggggatgacagaggatgagatggctggatggcatcactgactcgatggacgcgagtctcagtgaactctgggagttgatgatggacagggaggcctggcgtgctgagattcatggggtcacagagagtcggacacgactgagcgactgaactgaactgaactgataacactatggagaaagcaatggcaccccactccagtactcttgcctggaaaatcccatggatggaggagcctggtgggctgcagtccatggggtctctaggagtcagacacgactgagcaaattcactttcacttttcactttcatgcacggggagaaggaaatggcaacccactccagtgttcttgcctggagaatcccagggatggggggagcctggtgggctgctgtctatggggtcgcacagagtcggacatgactgagcgacttagcagcagcagcagaaacaggatttacagtgacccacacttaagcaacaagcaccacctactaattactgaatattaaagccagggctcataatctactgtcatccctttagaatgtgtcaaatccccaattcttctatggaggctgagaccataagcctggagtgggtccttcactcagcattttcaatgaggcaaaggtaaaatacgtaggtctttccatgggaggtttcttatgtgttgaggctggtcacagggaaatccctgttccaactaaatatcaaacaaataataattaaactagagccagaattccagtgcagaaggaacagagaaattgtacatgaatctgggctgtcatctgaggaaagcctaccttttgtcttacaagttatgggttttgttactattttttaaattatttatgtatttatctggctgcgtcgggtgtcagttacggcacttgagatcttcactgcggcatgtgcgagctttccttctggggcacaggctcttttgatgcgaggcacaggcacttccaggcggtgcgcgggcttctctagttgcagtgctcaggctcagtaattgcagcaggcagacttagtagctccacagcatggtgggatcttagttccctgaccagggatcaaacctgcatctcctccattggaaggcagattcttaaccactggaccaccaggggaagttagaccagaatccttggttcctgaggat

SEQ ID NO: 62879 - DNA, 1306 bp, Bovine  19866880396437
  misc_feature (1)..(1): n is a, c, g, or t
ntctgtggaatggcaggatagatattttgtctttgataagtttccatagaggagaaaggtgcttgcctaaggaacaagcctttgaataacctctagttgctagactctcttttatgaagatgctattcataaaggacatcactgttgctttgcaaaactgccagagtgtaagtggtggatttctgcattgtatggtgttatagacttatctcttacattagtgattgagaagttcttcatctggaggcagaatatacttggcatgatgaatttgggcaaagatggcctattgtaattggtatgttcttagtgtttgttatgcttaaagcctagacatttttaagaaatacagcttaggttaaaaatataattcttgtagcaacacagttgtaatcttttttaaattgatatttttcgttaagaccttttccagttaggctataataatattgatactgttttgtttatattgtagattagcataggagtagggcactttgattctttgaaatctagaagggtgttttgatagcttctgaaaagactcacgtaatgtgtgacagtagggaaatgctgataaaaatttagtatgtcacctaacatactaacacctaacagtattcctcctgttcattttgaaactattctgaattgcactgattaaattggtctgagattttaagaggaatttttcaaaactcttaaaagatatgctgtataagggaataaaatcaggtgcaaatttacagaatcacttcattttaatgatggttgaaaaaatgtgacattgtttttcagatgattgctgaatgttttgtatttttaagttgcatctttcagttctcagtgttattctctttttccgtggtgctgtcttgtaattgcctccttgttaccaccccctccctcttcgtctgccatctgttggcttggctttttatttcactatagggaaggcaggaaagagttcttgtacacaagataaaactagtcctgtttggagcttagtgagctggagcatctatacaatatgtcttctgatgataaattccagaagtaccataagcccacgggaatagtagcaatggctctgcaatactgtctacaacttaaataaaaattaaaaaaaattataattagactattattttcatggaaaaccataaactggctggatattattaacaggcttgtaaataagaattaattacatagggagagtttagcatattgagtattcgtgaaattcttgtcaaatgatttcatactttataaacttgatttgttcatggtaaacttaaattca

SEQ ID NO: 62880 - DNA, 1166 bp, Bovine  19866880405509
  misc_feature (1)..(1): n is a, c, g, or t
ntttgcagtctatgttcattttcagaaatttcaaaaagtaatttgttcagggcagcagttattagttttttgagtctgatttcttggcatgaatttgagaataggctttggtgtgaatcagatttaagaaattttgagttaatgtaacatagcataatttgtattaaaagttctttgacaactaaagcagcagcacttccccagtgtagatccttgacaaaaaggttttgaggtcaagcaaactgatatactatgtgtactttttcctttcttgatacgtaatatagtacgtgttaacacgtaaaagacctacagtaaggaacctgtttaatattaactcaacattttccaaatttatttgataactgaggcttccccttgttcccccatagcatcttgaagaactaatggaacaaattttccagaggaatcagattttgggaaatatgaattgggtttgaaaagagaataaataaaaatagctaatgatgatgagtgtgtgttacttcactacagtgatgtggggaaatttttgatagataataagatggaaggtatatatgtatatatgtgggtgattcatgttgctatatggcagaaacaatactgtaaagcaattatcctccaattaaaaataaataaataaaaatttaaaaaataatacattttttccagtgagaataaaagaaagaggcaaatgttgtttatcttagcccgtaagcattatacttttagagaagccatgttaggaaaggacttcagtcatatataacattacatgctaggcactgttttcagtcctttatatataatttgtaatttgttaatctttacaacaaacttatccagtaggtatactgttgttatcccagttttacagataaggaaattgaggcacagagagattaagcaaatagttcgaaggttacactgcagagttgttgatacagcagaaccagaatctaaacctaggcacctggctccagagtccttgtgcatagccactgctccatactgcaagatggtggcagatgggagatcatgaaatacaaattagattgagaggggatataaactctgcttgaaaggaccatacatattttctttaactttcaggcaatcagtgtctgagagaagaatgtggagagctgactgtgtcccagtga

SEQ ID NO: 62881 - DNA, 1162 bp, Bovine  19866880413144
  misc_feature (1)..(1): n is a, c, g, or t
naaagaagttggagagcctcagccgccagcccggcctgtgggatctctgaagccgccggctcaccagagacaccatgtaccggcttctgtcagccgtgatggccagagccgcgaccaccgggggctgcgcctggggctgtgggtggcgtgcggctcatcagcgcggcgggctgccgccactcggccccgggtgggtcgggggcctcggactggggctggggctggcacttggggttaagctggccggcgggctgaggggcgcatcccccgcgccacctgccgcggcccccgaccctgaggcgctgcctcaggccgagccgctgcaggcacaggaacagcccctcgccccgtggtctccgcagaccccggcgccgccgcaagccaggcacttcgccagagccatcgacagcagccgcgacctcctgcacaggatcaaggatgaggtgggcgcaccggacatcgtagttggagtctctgtagatggaaaagaagtctggtcagaaggtttaggttatgctgacgttgagaaccgtgtaccatgcaagccagagacagttatgagaattgccagtatcagcaaaagcctcaccatggttgctattgccaaactgtgggaagcagggaaactggatcttgatattccagtacaacattatgttcctgaattcccagaaaaagaatatgaaggtgaaaaggtgtctgtcacaacaagattattgatttcccatttaagaggaattcgtcattatgaaaaggacatgaaaaaggtgaaagaagagaaagcttataaagccttaaagatgatgaaagggatgatggaatctgaccaagaaaaagagttaaaagaaaaaggaggcaaaagtaacgaaaagaatgactttgctaaagctaaggtagagcaagataatgaaaccaaaggccgaaattcaaaaccttgcaagaaaaagaatgattttgaataaggtgaattatatttgaaagaaaaatttgaaaattcaattgaatctctaagattatttaaaaatgacccttgttcttcaacctggtagtcagttttttgtattcaacttttggctataccctactggcagccatagtagaaagagcttcaggatataaatatttggactatatgcagaaaatattccatgacttggatatg

SEQ ID NO: 62882 - DNA, 2032 bp, Bovine  19866880414174
  misc_feature (1)..(1): n is a, c, g, or t
ntatgtatcacgtctgaagcagaatttttgattctttatgcaacagcagccccccacccccaccctcgccaccacattgccccatctcagccagtgatactggagttgcccttgattcctttcccacatcttaaacactgcagtatcagtaaatccacaaagctccacctccaaaacatctgatttcagctacttctcatcacatcccctggacaatcataatcatagtccaagttgcccttatttttggcttagactcttgcaatgtgcctaagcatgcatcccatttctactcctttccccaccataatcctcctttccccaccataatccattctccatacagtaactgaataatctcttaaaagagtgaattggatcatgtcactccctttattaaaccccttaatggtttccctttagtatttaggatgaaatctaatctccttatcatagcctgtaaggtctgggtcccttctccccttctctttccctagctcttacccctggttcattctgctgctgcagcactagccttctgtctgttcctcctgccacaagctcagctcagcctttccctttgctgttgtgtctgcctggactgctttccctcagggttttgcttgggcagatcctcctcactagtcacatctcagctcaattacaaataaaaacttaaatctgctctccattccacagtcacagagtatctgttgagctcttaaataccctgcacttttgctctttatcatatctccctattttacatacatcaaagaacttaccactacctgaaatttgtagatttcagtgtttattattccaccccacacccttactaaaattcaaagtctatatgaacagggtcattatctgagctgttctttggagcaggctcagtatttggggatcttctggcacataataatggagaaggcaatggcaccccattccagtactcttgcctggaaaatcccatggagggaggagccttgtaggctgcagtccatggggtcgctaagagtaggacacaactgagcaacttcacttaacttttcacttttgtgcattggaggaggaaatgtcaacccactccagtgttcttgcctggagaatcccggggacaggggagcctggtgggctgaagtctatggggtcgcacagagtcaaacacgactgaagcgacttagcagcagcaagaaaaacattcagcatttccctagatagaaagttaatccacagtaatttagaaaattaaattcttccattcttccaattggaaggttcagagggaaggtgtccgaccctcagcaaccccatggactgcagcccaccaggctcctctgtccatggaattttccaggtaggagtactggagtggggtgccattaccttctctgatggttatcactgttaggaaaaagttaaatttctgcaaaaggtaacttcctttatctaaaaatatggccactgcttaaaaaaacaatgacacagataaagggcatggaaactaattaactattattaaaaatcaataacacctagttctgattttgattattttatttagtttcctcctgataagtggacacaatttttaagatcagtatctggagagagagaaggaattcaaaatgtttaaaagacatttaaattaagatagtattttaatgtacaatataacttcttgcttatgaaatacatttaacctcaacattcaaattgaaagatatctagatggcatgtgtatgacagtaaaaaagccattatcagaaatattcagaagagtatttgaataaaaaataatttaataaaaattaaaaatttattttgaataaaaattattgttgaataataaatgaacaatgttcaattatttctgcttttattagtgtttttgctgttaataaaacacaggaaattttaaacaggggtacacttacctgtccctaggaagagcagtccatgctagactatgtgatgttccagcagagatctgttgaatagctatgccatctaagccacttacttt

SEQ ID NO: 62883 - DNA, 1154 bp, Bovine  19866880431405
  misc_feature (1)..(1): n is a, c, g, or t
naaaaaaagggataaaggaggcctcagtggttattatgaggatgaaacaagagctggagatccccacactcaggctacccccagcaggcgccagggccccaagatgatgatggtgaaggcccagaggtgctgaaacttctaggcagagtctgtgagcaggcagacagcatctcaccttgcctaaacccctccagggactgctgaaggcctcagttgctgcccctgggcccctggttggaccagcacttagccccgaaataaaatcccatttcatccccctgtaggaaaagccaggcttgcaaagccaccagcttcagtggaatgggagggcccactattagcctatgatacgcaggcttcctctgggtgattttctagtttacccaccattgctctgaacagtggagagaggctttttaaaggaaattaatttttcagccactactgaaaacaatgttgaaagcaagctcaggcttccagggagttaaatgtttgtttaaaatgaagccacttaaaccccatggatttgctttcatcatctctgataagccccagttcccagaggtcccatttgccctgggttggtggtttagtctggggaacaacaggatcctggtttctagcactcctctgaccaagcacaggtctgacctctccacacctcagcgttcttacctgtgtattgggatagcaagaaaatcttgctttgcagagttcttttaagaatcatgggactgtgtttgtaaagcaaacaaaggttattgtaagttcagttggaatgtcagtaacgtgcattcccttgaggctccttttcccacaaaagctcttttataatgagggttcagttccctttgatgcctagtaaacccccatgtaccaagactagtgatcacagcactgaagctgtgctgacagctgtgtccagcattgtttctagggctcgttaggccccgccccctgcaggggagctttgggtccctaagcccaggcccatctgagatgcttccagaaggcaggcactgactctccagcctgccttctaacagtcactgttcacagcaaaggcagtgggcagaacacagtgccctgcttaagtcttttctcagacttgcagataccagggggcactgtgtacttaattaactcaccaactc

SEQ ID NO: 62884 - DNA, 2465 bp, Bovine  19866880481120
  misc_feature (1)..(1): n is a, c, g, or t
ntggccttgggcactgtcactcatgcccttaggaggtgggttaagagcactctggctgccaaaggagccaggtatgtgaggagctactgagtgtgggtttactgagatctcccttcactgaccttgactcccttgagcctttgaagagaagcacaagccagggactccaggcacatggagcagaatcctcattaagactaggtgtctcccacagatggaggagagagagatacgcgagtaggacccttttctgagatcaaacactgaacttcttacaggcattcttggcatcaaggcccatctttagccttgccaggtgattcgtggcactagcaccaccaaggtccagagtttctccttttagaaaatggacataacccatgtctgagcacaagcagctcatggtctaacgtcgcagggcccgttagacaagaaagcatcttcagaactgccttttgtctcatctccctgaagcttgcacaggcaccgagaatctatactgaacgagacataatagtttggtttcttcctgagctgcagaagctcagttattccctctaaatctgtaaccataactccccatatggacatttaacatcttgacttgttctgtatctacatgaagatggctgggggccccgggaagggggcaagaggcccacactcttcaaatctccaacttcactttctcactgaagactcttgagctacccccaacctgagactcttgagtggtcaggagaggggtcgctccatagaagttccactttataacattctcttttcctattctaaataaagcgggtagtagtcaagggttacacggaaatgcttcaattcttaaataaaataaaactcttcctagagataagggactctgccaacatagatcaggtagaattttgcttgtgattcaaggataacagtcagttctgttcttttgcactaagtctctacaagtcacagaggacagggtgacaggaacattctccccacccccacctcccagttaggagactcaggttcaaggtcataccttgtttcctcctggctgtatgatgtgggaaaataatgtcccttctttggccttggttccctcagctataaagtgacaggctggactaggtgagctaacatcctttccgtgctaacatgttctcagtggatactaacaactgcccatcctgactttacgtttcagggacagtgtgtgagggcagttacagaggatcagaagaaaccgtgcaggaacttgacatccagaagtaacccccacgtgtacaatgaacatggggataattagccatcttcttagaccggctcaggtctaagctggcgcctgtagagcaggaagtgcaatcaggctggtggcagagcgcttcagtagaccttcccaggcaggctgggggagcttgaggggccttgaagcagacgggctccagcttaggacattggagatcacagcccaaatgcagctttgccaccacctgtcctgcagagctcacctggagctattgctcccagaagtggggctgggctcattccttggagtgagaatccatggctgtccaaggcaaacctgttcatttggaggctgattatagaaacttggctagaattctcccctccctctcaagtcccaaagactcgggcagctaatggggctgttttcccaagaagcaaggctgagtcagccccaaagaatgaagaaccaaccctcatcctcccaggggcacctgccattcacaagagcctcctcacaccaatgtggagcaggtcaaagactgtaacgtgccctttgggttgatggggtaagcttgtctgtcagcaggaaccttgagtaatttggactcaaattgtctgcacgctctttcactgggacatgtctataattaggggctggtttaattcagggtcttctctgaaagttaacagaaactatgcagttggacaatgaaaactctggagttttctgccaggagaaaagtaatgtgaagaaaatcctttaataaacaaagtacatgaactttgagaggggggatctagggtttaaccaaactggaacgactgggactgaatcacgtaactgggccctgctttttccttaaccatgctggaaaaggaacacagaacttggtttctgtccttaagaggtacagagtctctgacagccctcaggtagggtttcttggtcttggtatgtcaatactgactttcggaactggataatcttgttgtggcggctgtcctatgcactgtatgatgttgcgcagcatccttgacctctacccattagataccagcagcatatccacctgtgacagccaaaatgtctctagacattgtcaagtgtctctggggaggaggggccaagttgcccctgattgagaaccactgccccaggcatttgtacaatgactttcccaggcccaagactttcccccactcggatcacagaattctag

SEQ ID NO: 62885 - DNA, 1009 bp, Bovine  19866880611077
  misc_feature (1)..(1): n is a, c, g, or t
ncactggacagatcagaaaacatccaatatttaactaaaagataacttccaaaggaaccctataggttcaatatctaatcagctcaatgcccatgcttacgtgttttttactgcgtcatgaaaaacaacagtaatatttatgagtaccctcagaatcccataaaagtcaatatggaacaatgataaaggcattaccactttcaagtctttgaaaactgataatctggacagagtatatagttctttactaaccatactgtagcctctaaatgtactagatgttttcatggttgctataataaatttcagtgataaagtaagaagtgtattaaagatgacattaagattagcaatgttttggctaatattcaaatatatatcagaagttaacagtcatggataaactaacataaaaataaacatttccctcaaccagttttagattttaaccagataatttggtctaaaaaaggaaaagtgtcattatacaacatcacagattttttaacaatacaaaaactggaaaaataacttaaatggtatggtgtaataatggccaataagatatataactcaaatatgctactgataaactatatttcctagttgaaagaatattcaatttaagactcccctatagacaagagatctaaattactaaaaaaaatcagaattcttggcagtcaacacccaggattacatgataaaagaaaaacagccaatcaactgtataaaatgaagattcaaatgcaaggtactctcattatctatgtaatctacttaatcatatttctctgaaactatgtcaaatttctaaacctaagattgattgcaattggaaacatactacctacagagcctggaaaattttccatttatcttctgatacttagagaaccatgtgttgcttgctattaagaaccttcatctctccaatttttgagagtttgtcaggtcttgttttgacacatgaccttccagattttggctgtagagcactaggagacaa

SEQ ID NO: 62886 - DNA, 1199 bp, Bovine  19866880683550
  misc_feature (1)..(1): n is a, c, g, or t
ncttttccagcattagtggttgggacatagacttggattactgtgatttgaatggtttgccttggaaacaaacctagatcattctgtcatttttgagattgcacccaagtactgcatcttggactcttgttgactattccatttattctaagggattcttgcccacagtaatagatataatagtcatctgaattaaatttgaccattcctgtccattttagtgaatgaatctgaatctgttgtagagggagctgggagagagttactgagagtggtacaaaattataggtctttactgccctattcccaaccccaagagagcccgctggcatactcacccagagccatggtgcaccaccacagcagcgaggtcgtacaggcagttctctgggccactgttctcgggctacagatcaggggagaaggtatcccaggactgagttaggagcagtggtcaatgacatcagcatctccctacctcaaatgacctccaccctctctctgtgaagatttaattttactaacaaatataattacgttacctctagtaaatagcatttcatgtactaggcctcgcaggggaaattctacatatgtatcaactttgtttcttaaatatgctgtccaatgaaatcttttcaaatgtaagcatagcacctggatgagagataaagacaaaaattgtaaacaagcagctaatttacctttcaatcaaaattaactacttgatggtactaatatctcttagataatattttaggcagtccatcagtttttcttttgattttgatattggtttcttccatgaatacctttttatgatactgtgatttataataatgtgtttagttttgtctcctttcctgacacaagatcctaaaagccttgaaatttcctcagtgaagagagcacacagagttatcttttgttatgttagtgaggtatgggggcttgttgccaagagaaccaatcaagaaattgagttaaaactttcagtcctacctccctgacccacaaaagggagagggattggaggctgaacgatcagcagtggccagtgatttaatcagttgtgtctgtgtaatgaagcccaaaggacgaggtttggagcgcttccaggttggggaaccagagctcttccacgtgccaccatgcaaggccccaaattccatgaggacagaaactccttgttcaggact

SEQ ID NO: 62887 - DNA, 795 bp, Bovine  19866880725880
  misc_feature (1)..(1): n is a, c, g, or t
ntgcaactatagaaaagcccaggcagcaacaaaaactcagtgcagtcaaaaaaaaagattgtagctaaggtttatttcagccctagttactgactagtatattacattgataacaatctttttttttttttttttggttttcctcttttaagaactcattcttttctcaaaaggaaaatatacactttgtttttagttagttacaccacttaatgctgttacttagttttttttgtttttttgtttttttctttatagctttcatttacctccaaatgaatggaaaatgtgatacatgtcaaaacttggaaaaatttaaaggatcagttttgctacatttttggtgcaacatcattggaatgtagttgtaattttttccagtggtaattccagtgatttggcagtatggttttcccatagcattaatatgtagaatctgagattttttatcttcatctttcgaataaccacagtattcccttcaccgttaaatgaagcacacctgaccctgagttgtcaaagtacaaagaaattcctgggttgggactctagtggatgctgttataaaagtacaccatcagaaacagtggatagagcagaggaaatgcaactggtttcattgaggagcagtttggtttggttttgggggtgatcattagttaataatgggaaaaaagaactcttagaggcattctaaacttttctaactacaaggaattctggttcgtaggttttagaaaagagattttatgaagggaaaacatctgttcatgaaagcctttaaaatccacattt

SEQ ID NO: 62888 - DNA, 1372 bp, Bovine  19866880726343
  misc_feature (1)..(1): n is a, c, g, or t
nagcaaaacatttgtgtttgccatctgctactcaagagtagttctgtagaaaaaagaatgcaaatcacttggttctttaattactttggagttaggctatactatagctgggactgtgggacagccaaagtcattgcttcaagaatactgttgtttacttagccaccaactcaaaggactctttttcaagcaaatggcatgaaaagaaattgaagcctaaaattatctttgtccttttaagtagagtcaaagaccattgtgaagtgatgtgtgaggctttttaaagttggcattaaggagacactatccagagcactggacactgaggtcagtatagaaacatcagttctcttagtcctgacaccaaaggaatatatgactcaatacttaaaaaaaaaaaaattcaaggatcttgaactcaatatcaaaaaaggtaatttactcttagtcacccaggagctaatgaccttgactttggactcagtgccacttgcttctccctctcccgttctcattagcttcttgaattgtgataattgtctgctcagtagtatctccactggcctatggatgtacaccattagttttgtttaatcaagagtaacttcaaacaacagagtttaaccaaactggaaaccctggagcttccaggttacttgtagatttccatgactgatcctttttctaatccttctcacagtaaaatttcattcactgtggtttttagcatatagaatgtgaaaaactggcaaatgaaagggaccttatttggccactgacttgctatgagatcctaaactcataggacctctgatttctaaggctattttctgctttaaattgctataaaatcagtgtgtttaagagatcatttattctaatgtttccaaagttcatacctcagaatactcagtgaatcagcagatgttagtaggtgaaactggaagagagagtttcatggtcaaactcgtttgagaaatgctatcaagtgtttggaaggtacagcctgtcggaacctttctaggctgatgcggcctctgactgcaccactgggtgtggcgggcagcttgccctgctgtgctgctccaggccactttttgaagaagtgtcttatgggacccatgggcttccctggtggctcagcagtcaagaatctgcctgtaatgcaggagatatgggtttgattcctgggtcagaaaggtcctctggagaaggaaatggctaccctttccagtattcttgcctgggcaatcccacggacagaggagcctgggaggctacagtccatagggttgcaaagagttggacacaactgagcaactaaacaacaacttacgagatctgtatgttttgcagaatataacttgggaaa

SEQ ID NO: 62889 - DNA, 1886 bp, Bovine  19866880738726
  misc_feature (1)..(1): n is a, c, g, or t
ntcagctttgatgatttttgattgatttttctcctccttctgaattgtatttttctgcatttttgcatgcctggtactttttgttgggatgccaaacattgtgagttttactttgttggatgttgaatacttttgtatccatgtaaatattcttgagctttgttctggaatgcagttaagttacttggaaacagtattgtagaggagcaaaactctccacccaaaatgtctctttggcatgtgaactgttttgaagaaaaacaatcaaggcccaaaagactcaggaagaaattttgacccctccctgagctccctaaaaacttttagataaagggtctgtttctggattacagctatcaccagagatctctgcaaagatatgggctaggatggtggggaaaactctaggcagggcctaaagatcagtgttgcattgtttctgcatggcttttccaaacagttactttttcatcttcatgtcagttgcctacttcccctctgcagtctcaaaccactgctcccaacatcctcttttgtctttagctgaagatggtatttaaggagagggcttaggctatttttgtgaattactcagttttcctgggtctctcccatatatccatgttactaaactttcatttaatttttctcctcttaatctgtctcatgtgaatttaattcttagacaagccagaagaacctagaagagtggaggaaaatttcttcctctccaacagcttgttaatttcaggtcttatatttcaattttattaggccaggtcagagttgatttaatttagagttcatttttcccccaaggcaagaccgtccttggtgctctaatcagtgcctcctgaattgtgagattttctactctggctgtggggagcaggcattgttcttggcactatgagtgccgaaccctgttccctcaaatcctgttgggtgggttctttccttggtttcagcagaagtcttcccatgcctgggctggtcaatgctcagatgaatactcaggaaggaccctctgcagatcttcagaatcctccctgtgtgcagctctctcctctgctactctgccctatgaactgtaggtgccatggctgccctgcacccatttctgctcactcaacacagggagactcccaggctctgcttgggttccctgccatgtgtcacagatggaaagctttctccaggcaatgagttaagtaattgtagggctcacctcatgtgttcccattgtttccaatatttgtccatctttttcattgttttgaatgggaggataaattcaacctttgttataccatcatgaatagaaacagaagttctttaactgatgctagaagtccctctgcactgatgggaatgacagaagaccttcccacatggtggtccatggctataaatcctcaaagcaagtctatctgcttggggactcaagtacaaacccacctgacttgggcagtttttatagacaaatgttatagcatcttcaaactgacaatcaaacattgtgtctagaacaacagaaaagttgacatttaaaagacagacctactcctataagaccacactggtctttatctttccccaagaaaatagtgaggtgtaacctggaattgacattactcccaaaagccatcagtggtgaatccctaatagtataatatcccacacttgtagtatcttaatagtttagcccacaggttacttccttctgtaggccatctcttttcatcctattcttttggcagtggtcaaaaagaaccgtggatcttttactttgatattcgagaagccccaatcagacttattctctagagcctgctactcagtgtgaggtccatggagcagcagcagcacctacaagcttacaaata

SEQ ID NO: 62890 - DNA, 1844 bp, Bovine  19866880748006
  misc_feature (1)..(1): n is a, c, g, or t
nctttgaatagagagcgacttgagggtaagacacacagtgaggagggggccaggagtcagagtgacagcacagagaagcagagaggatgagctggaggtctcagaggcccagatcacaccgagaatcacagcgatcacccagctgcagcatgcacggccggccggccacatacccggactcagtcctgtgcagggagggtctggcacttcggaggggagaggaaaagattggaagttaaccgaggcaaaccatggcagatttgacccgtgtgttgactgacgcactccctttggttggttggaggtacggggctaatgcagcccgtctggggatgctccctcttggctcaggtgaagggaattgcccacccagggaactcacaccatgaaccctccccccatgctcctttatcatcgcagtctctgtactttggtaagacttcagcttttcgtccaatgtggccagcttgaaaggtgaggaaaggtaagaatcagagtctatctgggtaggctcttatctgcttccctggcacccgcctctcgtcctcagcaaagaactttctaggtgctggctggctcgggctggcagagcttggttagaacctgttaccagacttccacatctatccccatccagtgttattgtggttttgttctgttttcactttggttccactggacaaactggagaaatccatccaccataccagtctcccttccctggtatgtggaaccagaggactgtgtccacttccatgagttattgttggggatgaatggggtgagttagaggtcttcagtggggctgaaatagtgcctagcaatctaaggagaaagcttatagtcagcctgctaaggacctctcagggagggccatgggtgaatccattctcgcgggtaatacagaggagcctggtcacgaagcctccgggttaccccagctgcttgcaggctctcagaactgctcctcctcccagtcataccctccatctacagaaagtctgcttacacagacctgcttatccactggttttctgatctcagtagaaacttctagcttatatgtgtgtttggtgtggggggtgggtattccaagctggagttgtgcagatggtagccacccagccagacactccagagagcctgtgcccacggagcctactgaggtgacagagactcaaccaagtatgagatgccagcagagggccagggtccacctccccctggggcacttgataccccgaggaaccagacctaagactagagagcgaggttttactcaccccttctcctgccatctggccccttcaagtctggctgattctcctggagctatcagccccatcttctttccctactctcttctttgcctactatcttcttccacaatctcatactgagtctgtaacctcattggtccaagcctgggctctaggagcccttggtctggcttcctgggtggccccaggctgttgtaaggatgactggagcaggtatggttaggagccatccacaaagaacagggtggcctgttctcttggctcttgccagccaccactggcagcccacagcctcttgggtggcaaagaacgtggctcccctggcctgattccctgccctgaacacaaggaccagtctgtggcttggggagaccctcaggacatgagtctccccctggggagggcgtcaagtgtttgtacagaatatgctctgttctctgcatggcctgtggcctctgcacactgtaatttggtgttttgttttgtttaaggtacctaaaggtaaccaaggcctccaggatcttaaaaacaaccaccaccgaaaagaaccccaactggtcgtgg

SEQ ID NO: 62891 - DNA, 778 bp, Bovine  19866880753843
  misc_feature (1)..(1): n is a, c, g, or t
ncaaaatatcatgtggcatggtttctttttcatcaggatgttttggtcgtgaattgtacagcagaatggactgctgccaatcatgttttagcaacctgtaggacagcactgaaaccaacaaggtattctgggattaaacatggctccctgcatgagagcatttctggagcggctacccatgatgcttcaggagcagtatgcatatgaaaaggtaactgattacagtcactcttgcagatatacagatgactggtgctttggaatttgaactgtagctttgaatttatcccttaaaagtatgagatctgagtaaaataagtggggctatttgggcagaagcaaatgaaaaaaagtcatgcctacaattgttcagtaatcctaaacctgcttttactttattttagtgggagtaaaatttttaaataaccctcagatttgtatagtgcttctgtcattctttttcagattatttgttcattcaaaacctctttaaaccccctgtacttcagagtacatcatcttcccttttctaacccaaatatctatttctgtgtggctttgctatcccaaagttgggaggtggagtggatatgggcatcagagtaaatatcctgtccacttatcaggtgaatatttgtggaaagtttagtggaagagctaaggttgaactaaataagtagggtcattaaatactagaatgggaaatatggagtttggactttgtgcccaggtcatgatcctgtgtaacctgtcttccagccctcagtagtcacagcat

SEQ ID NO: 62892 - DNA, 1214 bp, Bovine  19866880761026
  misc_feature (1)..(1): n is a, c, g, or t
nttaagaaaaaactccgtaaaatatagccttttaagatgttatgctctgtggttatagagggcatcttcttttacttttcttaacaaaacatcctccaaagagaggaccagcatttcagttgcttgagtctatgacttatattaagcatgataataaggattttaccagctgaaactggattttatatatttaaactctcaaatccctgctaaacccaaatgctccctgcctcttttataagactggagcctgctaaagacatatgtaatgtgtacatatgtaattactatagaacatgtcacctaccacaacagcccatactttaatactttgaaaaggattgtatcctttttattcaaaactctgtttgaataagcagaattgtaaatacacctagaaattgctagacttgttctaggaactttgagctgtatacaggagggtgtttgttcctcctgctggacttttctgtgtgtgcacttgaggctccagaagacctcacatgcagttaaccagcctctctcggtccagcaagataccagtggaagacgcagctcctgagccagccagaacaggtagttgtaccctgtggcgagcagcatgtcgatctcggggttctgaaccttccccagtgaggcatgtggcactggggttcttccatatctgtgtgatcccttctgtgtgcagtactgccccacctctgcttgccctgactcacaccagagccctgcctggagagcaggcggctctgccatgtctgtaccgcgtgcaacccctcctaccagctcaggagcccttactgcattctcatcctgtggctctcgtggcccactgccatcaaccagcctgtcttgttcttcctgtccgaccttctgtgggaactccctgtctcattcgacttcagaaaccatttctttgtttaatcaatctgcaaatgaatctctgcccctccctgcagcatctttgatgcccattcttggcaccattccaggggctctgcagggatgcaggttttggcttctgtcactgggtgctagttcttcagtcccccgatcagttctcctggtgccttttgtgacttccccttgtggcgggctacagtctatagggtggcaaagaatcagacacgactgaagcgacttggcatgcatgcatgcttgcgctgcagttatcaaatgctctgacttctgcctccactgggacctaagcctta

SEQ ID NO: 62893 - DNA, 1251 bp, Bovine  19866880941519
  misc_feature (1)..(1): n is a, c, g, or t
ncctagaagcctctgcctgacagcacaacatgtggtcaagatgacaagcctctggctaaccccagattacacgcataatgtgcttattatacgtataagtgtattgttgatgttttgaacaggcgacttcagcatcatttcagtgtatcactatcattaaggagggtttttaaaagtaagatcctttgtacttggggagagggggaagtaaatcaacactgtgctgcaagcagacctttttagctttcaaatgatgtcactgaagttcaactgaaattcactcaggaaagaggcagccccagtgcatgggtgctagggtttgagcagatctgaaaggcttgaagatgccttcctcgccacttgccccagacccagcattgccatcattagctgccctttttggtcatggtcccagaggaagagaagggacagcaggagttaggtttattagctcacttaacgttggagtcacaggggtagctttaaaaattagtgatgcctagacttaccacctaaaggttctgttataattggccttgggtgcatcctgggagctgggaatttttaaaagttctccacgttattctaatgtacagccatgattgagaatcactctctcctctcctcttgccccagtgctcaacccttactcccttccacctcccatgccagccctggttagtccaggaagccctgtggctcagcagacacccagaaacaaactacggggtgatattgttatcccattttacagatgaagaaactgagacccaaagaggccaagtgactttgcccaaggccacacagttaatggcagattggacctctctggcttcaaagtgattcccatttcttcaagctgccttgttaacttgggaacattaactcatgaagttattaatacaccaaaggatttcgtttatagtaataacagcccctcacatctttatggggggtgttagggtttgcaaagcacttccattttagtttatgatattaaagatgactcctgcattttaaggataagataactgaggccccaaatcattaacttgctcgtggacacacaggtagaggaaccagagtttgagtccaaatccttttcttctatttccaaagaatggactacattggaaaatggtaggagtggggtgaattttgggggtacagggaaggttggaaagtttcagagcaggacaagctctcaagttcaccaaagatgggaacccaggaggcagcaaaagagggtag

SEQ ID NO: 62894 - DNA, 1104 bp, Bovine  19866880947569
  misc_feature (1)..(1): n is a, c, g, or t
naatttttctttcaaatataattcaccttgttcaaaatcattctttttcttgcaaggttttgaatttcggcctttggtttcattatcttgctctaccttagctttcgcaaagtcattcttttcgttacttttgcctcctttttcttttaactctttttcttggtcagattccatcatctctttcatcatctttaaggctttataagctttctcttctttcacctttttcatgtccttttcataatgacgaattccacttaaatgggaaatcaataatcttgttgtgacagacacctaacagtaaaaacatgaaaattcaactacggtattaaactgcataataaaaagtcagtagccttgtaataatgttccagcaatattttccattttaaactgctgctatcatgtacgcatctttagcctcaaattttagaaaaatatccaatcagttattaccaggagaaaataaaactttaatccattaacaaaatttaaaaacaaatcaaagaatcttatgaaagcttttaaaacacttagacatcattagaaaaaggaactatgagcttcagtaccttttcaccttcatattctttttctgggaattcaggaacataatgttgtactggaatatcaagatccagtttccctgcttcccacagtttggcaatagcaaccatagtgaggcttttgctgatactggcaattctcataactgtctctggcttgcatggtacacggttctcaacgtcagcataacctaaacctttgggagaaaaaagcaaaaagtcataataggtctcatggtcaaaggagtcttcaaaaactgaaaataatactatcttaaaacattccatgtgcttatcaaaagaaaaagctattccgcttgcataactaatcaaaactgaacatataagggatgagtcttagcaatactgacaactgtaggcctaacaatttaaccttataacaagactgaaattgtaccttgtgcaaaacagtaatgttatgattcagttactaatgcttagcttatctaaacaatttgtttattccatattttaaataaattacattcttaaggaaaacatcatgttctcagattat

SEQ ID NO: 62895 - DNA, 1597 bp, Bovine  19866880952688
  misc_feature (1)..(1): n is a, c, g, or t
nggtggctcgtagtaaagaatcccctgcccgtgcaggagatacaggagacatgggttccatacctgagtcgggaacatcccctgaaggaagagatcacaacccactccagtattcttgcctggacaattctatggatagaagagcctggcgggctacacccatggggttgcaaagagttggatatgactgagcaactgagcacacatgcaatagtagcagtaatcaggcatgtgcttcattaacattaaacattaatttacatagaaatgtgcatatgtactaaaatcttttaaagggcatctccaacagagttctctgtgacttggagaaagaatatctctagaaaaagcactgcagggggcctctggcttatttcttaagttaacttttactgactctaaagtcaatagacaaaattgagtttttgaagtaaaagcatttaagtaacataagatcataatgaattcttgaatagctctaagttctcttccttcagatctaagtgtgaagagcacaacattggggatgggagggcttggttcctgttcagttctattacatcctgcctctgttgccttgtatcagctactagacctctttgtgattcagtttccctagttgtataagtggtgatgataatatctgcctcataggctctgtgtgaaaagagaaaatgaacgatccatgtaaagcacttataggagtgactagaacatagtccttagtgactggaattgctcctatcacccttctgttccttatcatcattttatgttgctgctgctgctgctgctaagtcgcttcagtcatgtccgactctgtgcgaccccatagatggcaccccaccaggctcccgccgtccctgggattctccaggcaagaagactggagtgggttgccatttccttctccagtgcatgaaagtgaaaagtgaaagtgaagtcgctcagttgtgtccgactctcagcgaccccatggactacagcctaccaggctcttccgtccatgggattttccaggcaagagtactggagtggggtgccattgccttctcctcgttttatgttactgctcccaaatttctaggttatggctacaatttagatttaaaattaaagatattcttttttatttctctagtactattgtggtattttttttattctatgaaactactttgtagcagcttcaacaaagagggaacttttaccacccagtgactcttgttgcatttctgctctgttgcaggctttgtggtgacccagctggtgacttcctgtggttctgatgggcactcaatggccctgactgaaagtggtgaggtctttagctggggagacggtgattatggcaaactcggccatgggaacagcgacaggcagcgacggcccaggcagatcgaggccttacagggagaagaagtggtgcaggtcaggcaggatatggagaagtttatctttgaatgtaaacatactgggtttagttctcaagattgggtaatgaaaaaacagtagtaaaaacatattaccccatcataaaagatccagtgtttttggtggttcacagtcatttttgagtgtctcaggggtttaaatg

SEQ ID NO: 62896 - DNA, 828 bp, Bovine  19866880958829
  misc_feature (1)..(1): n is a, c, g, or t
naatcaataatataaatgtcagccccagactaagttaaatagaagttctttaccaccaccaccaaaaaattagaatatttttcaacatttatctatccattatcccagggaaacattctgtcacaaaaaaaaaaaaaaattgctgcctagaaatttcagcatgatcttcacaaactctgaccaaaacaaagatctattatctaaaaaggaaaacctgagcatggtcagtaagaacaaagatttaaagaagtgaaatcaacaagtgtcctatcttacaattggttaaattaaacctgcaggaacatgacagttaatcaccagcctgctttgcctggtgatgagatagttcaagaacagtccatgaaattacgagtcttcaggacaggtcaaggataaattggcaagcagatttctaaaggctgccttaaacccagctagaacaaggaaaaaatatcaggagagaacatctactcaaaatggaaaacagcctgctgatagagttattcaatcctacagcagagtacaaagtcttcagataaaatccattcggttataatatcttttcaaagacgcaaactggttcatattcaaaataaactctcatttccctcctcaaaagggtcttagaaaatttaattagctagtggtgattaacggtgaagcatttagctaacacaaataccaagacaactacaaacttcacttttcaatgcacaggttttgtttcaacaaaagttttcaaaatttgaagttgccttcttaagcttacctgtatattatatatctgtaaaaaccaaacatatacctgtttttcagtatgtcttaaga

SEQ ID NO: 62897 - DNA, 874 bp, Bovine  19866881015091
  misc_feature (1)..(1): n is a, c, g, or t
ntggggtcttccaaaatatgatgattgtgccttcgttaaactgtgtaacaaatgcattatattttgagtgtctgtgatttactttttttagattagtaacatttgatcagttcatataaaaagaaataactctaaagttgtgtggttataatcttagaataagtgtaagaagcaaaaggacttccctggtggtctagtgattaagactccatgcttccaatgcaggagactcaggtttaatccctgtttgaggaattaagatcccacatactgtgtgatgtggccaaaaaaattttaaaaaaatttttaaagagtaagaagcaagatactttctgcttagaataaataagtgcacagcagaagtgatcccctcttaccttcagtgttatctctgctcctgctgctaagttgcttcagtcgtgtccgactctgtgcgaccccatagacagcagcccaccaggctcccccgtccctgggattctccaggcaagaacactggagtgggttgtcatttccttctccaatgcatgaaagtgaaaagtgaaagtaaagttgctcagtcgtgtctgactctttagtgaccccatggactgcagcctaccaggcttcttcggtccatggaattttccaggcaagagtactggagtggggtgccattgccttctccgagtgttatctctattttaacgtaaatatcctgctagctttaattggtaccagttctcatcctatgaggtcaggtagaaagggtgtatcacctttaccataatcactaattcattaaaggttaacagtgaaaaaatgtaaacagtatttatttacatggtgagacaatggaagattttatttatttattttggttctctggatttta

SEQ ID NO: 62898 - DNA, 1619 bp, Bovine  19866881062009
  misc_feature (1)..(1): n is a, c, g, or t
nacaggtcacttaaaccttataattcactgcttgctgctaacctaatttcttttaggttcaaaaaatctatttcaggctgatttgcaatgcatatttgatccttttaaataagctgataattttaaaatggtaatttaactaaatacaacagaaaactgaacaaagctagtatggggagataaacctacaaacctctaccatttcatccagtcaagtatcattaagtcatttgtaaagtgtgtcctctaatggaaacttaaaaggtaaaagtaacagttgatttgttaaatgtgttgttacctttctaaccaaccaaataataagagtaaaatggaaaacactataactgtaaaactcgaattagtctttagtcacaagattttctttcactgccttttttatacattactactaaaaattatgacaaaattttagcttgattatttcaataaaatgattttcaaagttttacaggggagaaaactggtatataccacttcaaattatcatcaccagtaaaggaatacaatgaattcatgtgacttctgagagacctgacgattaaatgtaacgtgcgatcctagattagatcctgcaccagaaagaaaaatgtttttccttgtgttataaaggacattattggggcaactgataaaatctgaatactgtgtgtagatttgatacaagcattatgttgatgttaatttcctgaatgcccttagttttagaaaatacatatttaagtatttatgggtaccacttaagtataaggggtagcatattaccaactgatttccaaatggctgagaaaaaaataacagagacagacagataaagcaaatgtagtaaaataactaacgtggggaatctggttgaagagtatatgaaaattctttgtaccagtttgtgtaacttttctataagtgtaagataatttctaaatttaaaaaataattaaaaataataaaaggtaaataaaagattaactaaaatataagggatgatggaagatcaaattatagatagccatgatgggtaaaattttagtttaattattcatgtgcttaaattattattgctaacttttatctaaggaacttggactacttcatgtatatatatatatatatatatatatatatatatacaaatatatatgaaaaataaaatacattttattttacttacattttaggtggaaaaagagacatgaagaaaagctcccaaaatgtggcaggttgattatggaatggagacaagcaaagcgtgactttaaattgataacatagtatgaagatgcaatatagctagacataccagaaggtaatcatttaccttgctctattgaaaatcactggctcattttcctcctgcacagttgtcagcatatccaagtcatggaatattttctgcatatagtccaaatatttatatcctgaagctctttctactatggctgccagtagggtatagccaaaagttgaatacaaaaactgactaccttgagacatcattgcaaagggggaaaaaaaaaaaagtgcttcattattattcaaaaacatgcaaaatatttttctactgaaaactggcatatttttaaaactagaatattttacta

SEQ ID NO: 62899 - DNA, 3052 bp, Bovine  19866881081854
  misc_feature (1)..(1): n is a, c, g, or t
natttgggcagaaggtctgtaaagcttgttataatcttaaactccacaggaatgttgtaaaaaccagacgtgggaaactgatctagatcagagcacaggctttcaacatctggattttaaacaactgttctgttaatagagacatagacattttcctggaaaaaatatttacacatcagtggacaaagctttagttaggaagcttaattagcaaataacgaagtttccagccagacagtccttggcaaatagtcttaagatgtacttacaaaaagaggggtcagtgaaaaacgtgatttttttacgaaaaatttcaaattcctcttggactgcatgtttgtttcaccagggaaaccgcacattaattaagaacagttgaacgttttctgtcaggaaatctctttattctcaagcagggttttatttttatttattttatttataattctttcagctgtaagcagtatatcttggctctatacgttttatttatctttaactttttactttgttttgagctgtagccagttaacaatgttgtgatagattaaggtgaagagcaaaggactcagccatatggatacacgtatccattctcccccaaaccacactgctatatttaaaatgaataaccagaacctactgtgtttggagaaggcgatggcaccccactccagtactcttgcctggaaaatcccatggatggaggagcctggtgggttgcagtccatggggtcgtgaaaagccggacacgactgagcgacttcactttcatgcattggaggaggaaatgacaacccactccaatgttcttgcctggagaatcccagggacgggggagcctggtaggctgccgtctatggggtcacacagagttggacacgactgaagcgacttagcagcagcagcagcaactgtgtatagcacatggaatcgtgctcagtgttatgtggcagcctgtacattttattattattattgccatgtgatatgtggggattttattccccaaccaagaatctaacctgctctccctgcattggaagctcagagtcctaaccactggatgaccaaggaagtcccttttttctttcctgcttttaaatcatttttgatcctgttcacttataacttttttcccctccaattttcagagctttcttctggttggtgtctctgctgttttcttccctcatttggttcacgacagcaacccttattggtaacaaagatgaaccaagagagaaatatctgctgatttttggagtgttaatctcagtccttatccaagaaatgttccgggttgcatattataaacttttaaagtaagtgtttggtttacctttttccccagtgttttttgaattattatttagtaatttgaaacattagtatgttgttgtatttgaaggtccgtgtcttcctacatagttccaagccaggggatggtacacttccagcctgaaaatattgagtattttgagttgtgggccctcattccttccttcactcattcaaaaaatatgtcttgagagtttgcttaatgccatgcactactctgggtactggggatacctcatgattaaaagacagtctcatggtggtggtaccttatagtggaaagagacaacaaatgaataaataagaaaatatatcatatattacaagataagtgccatagagaaaaataaggtagagcaagtcattgaaacaataagtacaaaaactgttccaaatcagaatttatatgtgcttctctttgacatcacctaaaatagataattcttatggcagttatgcttgccataattttgactgtattggggaaacaggtgttcattttgtgataatgtcatatgatttcatgtctgtaatagaaaaatacatttaaaaaaaaaaagtgggcgtgagttccctttctaggccaggaagcaggtcatctgtaggatccatgaggagctcacgtgaaaccactatttgaaagcagagcttgaacttggagcagtagtttccttccggcagtcatgagtttggctttgattacgtagtaatgcttagttagtaggctgataaatgtgctgttttttcatttctgcaaatgagttcattaaagcactttatgactttcaagggtgcaaccaagacagaaaggacctcaatagcatctcttgtaataggcttctgatcctttgttcctgccaaaatgccaaggcttctgtattttttacttgatgcttttaataacagatactgaaattttaataatgaagcaatttaaaccacgagtagaaaaccaggaagccattgcttagaagcaaaagtagtatcttagaaaaggtttaaaaatgaaagttccattagttcctggaaatattaaagagcaacagataaaaatcaaagataacatttcaggttccatgggaattacagtatccttaagagatggacattcagctatggttgaatatttctggcatgcagcagttaactgccattccaaaatttaatttttactgtagaatatgttaaggtaataaaaatctcccctctgtctcacctctaccatgcacaggcaaaagcagtctctcgcatggttgtcatcttatctctttcaagactgtgcattcctcattttctcacctggcccttagaagacacggatgtgacttccaaatcttttcctgtctctgttcttttatgtcagtggacacacccctttctggcagtgcccggggtttacctgtgcccaggacccagcacagtgccccgctgtggtcagagtgattcagaaagcagggcccttcccaccgttgacagggcacttttctcttaagccagcttctgattgtactggactttcttactctaacgtcatcgtcattggctcacattggttttgcgttttctgatttcagtagattttcatagataggtcctggctttagtaataaccctttaggtcttgagattctataacctcagttacctgaattggctgagtatctgctgttctttactgttgtgtttcttcagatttcctcctaaagcaaag

SEQ ID NO: 62900 - DNA, 1457 bp, Bovine  19866881088606
  misc_feature (1)..(1): n is a, c, g, or t
ntttattttcatttcccaggggaaggactattaccctggtagttagcaagaagcctgagccctggagggtttctttgttaagtctgttcctcctcactgctagtttgtcaattagattgtaataattagtttttaatagtgtcattcttttccccagtgtaaacactgcatttagttctgtaattcgggcgataattacttgctatctttcaagtttccctatcaggttgcagggtttttacttactctagacgtgggtattcagagtcaatgtcctcaagggtttcctatcaggaagatcatagtctagattaccagcctcaaagacctacctggaggtatagtcagacaccaatttttccaacgtgggacattccagtggattaaataaattcttccctgctagaagaggggaggggaccagggcaagaggggtaggggagtaagggggtacaaattattaggtataagacaagttacaaagatattgtacaacaaggggactatagcctatattttataataattttaaatgaagtataacctttaaaaatggtgaatcactatattgtatacctgtaacatataatattgtacaataactatacatcaaaccagtcaatactaaaggaaatcaaccctgaatattcactggaaggactgaggctgaagctccaatactttggccacctgagttgacaaagagacaactcaatggaaaagaccctgattctgggaaagactgaaggcaggaggagaagggggtgacagaggataagatagttggatggcatcatcaattcagtggacatgagttttagcaaactctgggagatagtgaaggacagggaagcagggctacagtccacggggtcacaaagagttggacacgactgtgactaaacaataacaaatacatcaattttttaaaagtaccaaagggaagagagcccgagattttaaactgaactttaaaaaaaataagaaaaaaaaaaactaatttcctttgcttctaaaacacaaaaaattaaaaaaaaaaaaaaattccctactagaatgcaagcatgggtggccccaagacccagagtatctcctgctcatagtaggtgttcaatatacagatgctaaattgtggagagtcacgaggtcttcttgcagaatggatgtgcaccgggttgagatacgaacaatgtacagaataaagtggagtccctgccatgggactgctctggcccccctctccccacattacttcaaaagcaaaccgtctttaatccattttgagtttatttttgtgtatggtgttagaaaagtgttctagtttcattcttttacaagtggttgaccagttttcccagcaccacttgttaaagagattggcattgaaacatgtataatatcatgtatgaaacgagtttgccagtccaggttcaatgcacgatactggatgcctgggg

SEQ ID NO: 62901 - DNA, 2252 bp, Bovine  19866881098249
  misc_feature (1)..(1): n is a, c, g, or t
nctataactcttgccctgggataatcaacccttagtatcttgagctggaaacaggatgtcctgagatgtaagagggcagaaccatcacaccaaccccctaatggcctagtgaagcatcatggctgtcctggtaaagtgtatccttcagggagaatctcagcagtggtgatcatacacccctagcagagctcttccattcacaactgtcaagccaggctcagcctactgaattctgtctctgttcaacttgccccgtctctgttgcaggtgggctcctccaatccagcatatgacaagatcttcgatcaccttaaagatgtaaagtacaaaggtgaggattgtttactcaccttattgcttactcaccctctgctggagaacagcgtatttgctcttgggtgacctgaaaaagaatgcaggcaggggacaggtactgtctgtgaccaggtcctggaaccaggtagctcagaatggggctagttcattttcctaggctgttataggctcagctgtacctctgccttggggaggaaggtgacctcataccccaacatgtctctccaggccaagaagtgttcattccgggtttcagcatagaagagctgctgccagagaggcctgaagagtactaccgctatagggggtccctgactacacctccctgctaccccactgtgctctggacggtgttccggaaccctgtgcaaatttcccaggagcaggtaactgtcgtgctcttccttgtcgtagaccacgtggtacctcgaaccctgcaccgcctgtatcataatcgacgacctgactacctcactcaagagtttcattggcagctattcaaaacctctccagataccacaggggcctggaagtactttggaaatcacaagctgggcttcaaaagtggagctgtcaagtcaagaggggagaatgagtctatctccgcagttttttaaatatgagttgttaggctgtgtttcctaaccccagtggagagtttcacctcccaggcaggaaagcgcatggctccttacctggggtggaatagacaggatcaggttagatgatttaacaaacccagggggtggggagtgcagcgataaggaagtgagggtctctgccttcaagaagctcatgggagtgtgtgcctggtgagtcactctgactctttgtgacctcgtggactgtagcccaaccaggctcctctgtccacggaattcgccagacaagaatactggagtgggctgccatttcctcctccaggggatctccctgacacagggctcaaacccacgtcgcttatgtctccttcactggcaggcgggttctttaccactggcaccacctgggaaaccctcaagaagcttaggtagtgcaaaactggggaatggaatccatagcaatcatctctaactctctcatttcttaggtgatgaaagtgagggttagagagtcaaggagacattggggtcaccagcaaaggcccaaggtggagctgagttccaagtcactgctcgtgtctctgctccacagctcaaattcatcaggaagaagcatcgttgcccaggaggcggatctgcctgctggctcacccacccatgagcccagcacagctctcattgctgctcctccctttttactatggagtacctgagtaacctcgataaatgacagcaaataggcaaacaggaataaagacatgatgaatcaagagatgaaatgattggggaggcattaatgttctaacccagaaactgccttggaaacagttatgtaatctatgtgtgtgcatgaaaataccatgaaactagtggatgacctgtgaggttcttgcctgcctgtttctgttccttttgatgggaccatcagactaagccccaggcccctctaactagactgggctctgaatgaggctcaggagaggaatgcagtctctttgggaggtgggggagccccttgacatcccaggtttcgctccctgcagggcagattgcacgtgcaatcaggagctaacagtacacaccctcccgctggcccggggaagtgggaagacacatgggccagcactcagacacctgcaggggaggggcagctttctcccaccaccttctcaggggtctcccgccaggcctcagaggtgagatctggcagtccttgccttgaggtcaggcaagggggcatcactctgccttcagggggtgtttctgctctttgcctacagctgagaagttggagacagacctgtactgcacgca

SEQ ID NO: 62902 - DNA, 1285 bp, Bovine  19866881135738
  misc_feature (1)..(1): n is a, c, g, or t
nataagaatcattgtgtccttttcaactttcctttgtaaggggttctctatttttttcctcgagtcaaaggtgatgccagattatcactacagtatcttggctattctgatccccaatcagaatttcccctcccctgggtgaaagtgacattttctagcacaaaaaaatttccaagcaaaatggagttaagagtagaatgagtcacagctgaacatgaactgaaacagcaaacgtgctggtgaaatccctcccttaaaaactatctgtaaaaatgataaataaacacggtggccaatgcaacaacctgggtatcgagctgttgctgttttttgctgggaactagctcagcatgccctgcaccaaggatgactccatgccaactcagaaggcaggaccacaatgcaccatccaaggaagacaggactccacatgatgtggaacaatcaactagggtatttcatcttcagatctgatatataagagatgctatctcagttgctatgtggtgagactaaggaaaatgtgggtgcctggcaaaaaatccaccaaagctataagtggatttaaccggaagttaattttgaactctgccatactcacttttacttttaacaagctatatttaaaggaagtatttgctaaacacagtatcaagatccttcatataaataaaatttcaaactaagaatctctccaaagccttacacattctgtcctgtcaaatggccctcatcattaaagtatgacagggttaaataatcctgtccccaggagatactgggagtgaatgcaacctggagtggagcagtcataatacacagtaatctcccaagctcccagcacgtaaaggggcaagaatccactcaacttggctgaagtttcaggaacatctgtgaagcatttccccctaatcctagtgatttctctacttgtgatctagcaacaatattctatcatttgttcccctgtcagaaaagttaggccagaaaagccaaaagagattttaatgtaaaacacttaagccaatgagggtggagctgatcattcacttttatcctggccttttcggataagacacacgtctcaaacaaagtacagaaccctccccaaactattcctgctttaatcttctgatgttgcaagaactccaaagggtcactgtgcagtggttatctttcagcaaaaaatgaagaagttccttgggacgagttaagtactggctcttcaaagctaatcagaaccacatcaagcagcactgtttagcacactgcttatgatgttaag

SEQ ID NO: 62903 - DNA, 914 bp, Bovine  19866881154468
  misc_feature (1)..(1): n is a, c, g, or t
nttgagaacccctgctggatatcgctacaatttgcaaatggcccctgtgagtactccagccagtcctgctcagccagagaccagaacttgaaaacagaggcggggaagttacacctttctgtggatgaccctgcagctgtcacctgacggcacacatggggatgagatgaagggaagggaggcttgtaacgtgtgtgcattacccctccccaggcatcgtcctttccgtggccctggcctgtggtctcggcatctgtattgtcctggcggtatccatttggcttttaagaaggagaaagaggtgagctggtttgggtttgaaatgggagtgggtggctctgtgtccatgagaattgatctgtctgggaaggcagggtgcataatgaggagctgtgccacccgaaccagcttatccttggagtgccatctccaaaacaccactgatcgaggccttggcgtgagaggctgatgctggcggatcgcggtgctcagggctggaggtgtgtctgccagcgtggaccttggacaagcttcttgattttggtgcctgaacacaagcaccaaggctgcttctttctaagatcttttcatctggtttttcttctctaaacccaaaaagaaaattgaggaaaattttgatttctcattcacactaatgccctttgctcatgttcttattgcctaaaataacctaacttatttttcctggtatgaaaaaacataaaaggttgccagaaaccctatgggaatcagagatctgagcagcatggtaatgagaccttcatcaaaatgcaggtctagtatcatcaggtgttgaaagagaacagttgaaaaatgcacagtttccattttggttagcggttattggggggcatttgctcccaagaccaatggcacttagagaggtttccaag

SEQ ID NO: 62904 - DNA, 1299 bp, Bovine  19866881163284
  misc_feature (1)..(1): n is a, c, g, or t
naataggtgaggaaagagttaagtgtttgaatgttggaatggcaaatgactgtcacaatgctacctgtcaggcctgttgataccttattaaccttggcttccaggtcagaatcacctggggaacatttaaaattaccagtgtggggacttccctagtggtccagtggataagactgctctcccaatgcagggggtccaggttcgattcctggtcagggaactagatcccatgttgcataccacaactaagatccagcacagccaaaataaataaatattaaaataaaaataaacatgggtgtacctgtggctgattcttgttgatgtatgacagaaaaccacaaaattctgtaaagcaattgtccttcagttaaaaaatttaaaataaaataaaaaataaaactactagtgtgcagatcccacccttgaacagttaagtcagaatctcaaaatttggggaaaagagcaggtctaaccattatttttattaagttcttcaggtaattctaaagtgcggccaggtctaaaagcccctttcgctatttacatttattaacgtgtatgtaaaatacttgctaactgtataaaataaatctacagactttcctttttctgccttcagatagatggtttttgttttgttcattcttctttagccagttgcagattctaaagaaataaatggaaggaggtggaagaaaacagaaagaggtctcatggccttctttgagaaggggcatgaggggtgggtaggaagctttgtttattgcatttcaggaagtagaaaatatggcatggtctcaatctatcttaaattacgtaactttgaggggatgtgatccatttgtgtcaaaataaagaggcatataatactttgcatttaacatgtgtgggaattctttgcagagtaattagcattcctttctttagcctgtattcaggggacacataccgttcacaccctctctgtgttcacattttccagtgcgttggagagctttttttcaatagaaatctttgtccttttcccaataagacttgaattatatttgaagacattgagcatgtctttctttctttttctggcaggcattgattttaaaatcagaacgatagaactagatggaaagaaaattaagcttcagatatggtaagtaaaaaaaaaaaatatatatatatatatatatatagcatttctactttagtcaggtactaaagcaggaatgagaaggtgaattgtggtaaattagaggtatccttgggagctaaaacatcttttctttatcagaaccaaggggg

SEQ ID NO: 62905 - DNA, 1024 bp, Bovine  19866881281667
  misc_feature (1)..(1): n is a, c, g, or t
natgactcggcagtgggatgggtcagccagacaagctggtgggatcttaatctgtgtgcacagaagggtgatgtctagaaaaggggcatgtgtgtccgcctgtggcaccctgggagccctgcccctggagtagcatcacccagtaaaagacttggagacaaagtcagcaagttcaggaaaggaagggaagcgggccaccacagatgagctgcagcgtggctggagtggctctgcctccctgtgctgtcggcagagctgcggtgggtgtgcagagcatgaaggccaccccccaccccacccgccatgctctggtcttgtctgcacaccagccaagtggaagagtgccagaccacccaccaccaggagtcatctgccaggtgggccgccccactcacctcggcggcgaagtgctccccgccgacagtgtgctccgagccgtgggggtcgttcttgtccccccagtgcaggtgcagctgcgaggcattgtagcgggccccgaggccccggacctgcatgtccttgggcagtttcaccttcactgcagggagaggaggggcagtcttcagagccctggccagctgggtgctgcctgagagcaggttggcaacaactgctaagggcccagacaggggcagggggatgcagcgatgggggaaccagagaggtgcggctcggaaacctgggctctttctctgagaacgtcccctcttccactaaagcaattccagtggcggcagcaccttcgtggttccccttggaaaatgatggcaggaactaatctagccaacagatggatgtttgtttacatatccatgtattacacacttggccatgaagatggaacctacagtaaaatatctgccaagctgagaattatataacaacaacagcaataataattgctatttatgaagcttctttctattctggatcttaacatacagaatctctagtctttacagtagctatcagtatgcccattttccagatgaaacctcaagagtttaaaattcttatccagagt

SEQ ID NO: 62906 - DNA, 955 bp, Bovine  19866881349377
  misc_feature (1)..(1): n is a, c, g, or t
ntttcagattgtctcctggcttcccccacccagtcccataggaagcaatcaaatacatacacagcagaaccagggcaggaggagacagagtttaattatgaatccaagtcttttgtggaaaggaaactaattatatcgaaatctcagcattgcttctccacatggggccaatggtttgttatacttgtacatttgttgttggtctcagctagactgtagagtgctaggaactgctgctttaattgtgagcttccttcctttgacaaattaaatttaaactttacgttagcctctcctttcctttttttccagagtgaaattggctctgctctgggttttgtttgtaaagctgtgtttggcagttttcctcagattcacagtgacattgtagaccagtctaacacctgatttgtttgctgactctgggtctctagaacgctgttgttgagccaaaaagcggaaaggtccaagcagcaaagctagttatacaaagtccatttgctaaaatgctgcacttgcctcattggggagggagcccctggatccaaacttagcatttgcattcttgctttaaagcagggctgggggcctcctagaggtgggccatcagcatctgagaggaagaagtggcaacgtggcagtggcattctttatgtgacttggggcaagtcagcagccagcctcccaggcttccttttttctccataagcaaacagggaatgttgtgctagattcactctatagtcccttccaaaactctgatcctaagtggtgacgacgagctcactcaccacttttattcacaaaatggtaaaaacagatgtgaaaactgaagatgacattgtataggtaaaaaagaacttgggacttttgagacagagactcaaattcaaatccagactctgctaattcctggtgagagctttgagtgaattatttaaccattttccttatt

SEQ ID NO: 62907 - DNA, 1641 bp, Bovine  19866881359422
  misc_feature (1)..(1): n is a, c, g, or t
ntgttttgtctaagcggtttaactgcccaattgtatgcccatcctccctgtgacccttctgctgcaggccctctggagctggctaacgccctggcagcctgctgcctctcctcgaggctgtcctcgcagcacaggcagtgggctgctcagcagctcgtgcgcactcttgccgcacatgaccgcgacaaccagactgctccacagacgcttgctgatatgggaggagatctcagaaaatgctcctttatcaagttggaggcgcatcagaacagagtgtgtattttaagccccaagtgtgttgatcaccttatgtaagataaaatagtttctgctgttctccaggagcttaaagtttagatcatggggtgtgtatatgtgtgtctctctttctctgtttctctctctctcttacgcacgtacatgtgtgtgctaaattatcagtatttgctagttaccgactctcctttctctacatgtgtatgttgcatgctgtataatcggatacaaatgggaacatcagatggggaatgagaagaaaaccaaaggaataacctcacgaaagataagagcttatatatgcaagaggagaagaagttgaccctactgttttaatctaacccacttaggcccctgagcagtgacaagggaactttaggaaatgaagactgacctctactttcccaatttaaaaatcattttttagtcttataatttgttttatagaacatattgaatacttctattttgttggattaaaaaacattttttaattaaacaaacatgtttaattaagattgtaacaagtctaagataattcaaatgagtttgggcatagtattttaaaggtatatctcatataggtgtatatttacaagccaattagaaagaattagaccatgcatactgttttataacatggatacttttacaatttcatggtagatttaattttcatttgatagaactctttcaaattacagaatcatttgagttaaaacttgctcacatattgctggactttttatctttactaggtaatgacttgtgtttggtgtaataaaaaaggactgttggctacaagtggcaatgatggcaccatccgggtttggaatgtcaccaagaagcagtattcactgcaacagacctgtgtgttcaacagattgtgagtaatggcgttagttcccttgggtaacatttaaaaataggagaatcctaaacatgcttcatcttggttgtgttagtataatcaaattgtcactaaagttttttacaattttttatttcagaacagtttccaatgtgttgttttggttttttgcaagatagtatttaattaattaattaatttttggctgcactgggtcttcattgctgggcatgggctttctctagttgtggtgagtagcgggtacactctagttgcagtgcacgagcttctcattgggtgacttctctcgttgcggagcacaggctctaggcacaggggcttcagtagttgcgttgcacaaacttagttgcctctcagcatgtagaatcttcccagaccagggatcgaatccctgtcccctgcattggcagatggtctctcaaccactggaccaccaagtcctgctagaaagtaacttagaagataaaaatatt

SEQ ID NO: 62908 - DNA, 1450 bp, Bovine  19866881367329
  misc_feature (1)..(1): n is a, c, g, or t
ntagctgggcctaagactgagggcctggcgggtggcagcttcttcctcggaaacccctgtgctgtttgccttcacctgctcccagcagctcttcctgccaacccttccagagtcctgacaccttttccctgctcacttagcacttgacaatggccttgctccccagctcctcgcaccactgcctggcagctccccagcactgaccattgtatgactgacctagggtttgtgttagaaggtcagcctttgggcctcgtgtgtgggccgagctcaagaaattcatctctgagttagagagaacatcagtgatgtgaactgatgggtcagcggtggtggaaagagcagggacagacctggagtcacgttgtggctcagctcctagctgtctgatcataacttcctagaatttctgttttctccactgttcatggagattataaaacacacccacacaggctcgaattcacagggttactgtgaagagtaaacactgacacatactactaagcccctggctgtgtgctgacacatggcagattctcaaaaagtgctcacttccttcctttcctccttccagctatgtctcttccaagtccaaaaggctacgagcctttgaaacacacattcccatgttaaactataacttgggaaggttaccaaactgctagaaagtggatcttcccagaggaacaaggatctcaggtgacagagacaacctctgtgtccccacagatcaggagagggtgctgaaggtgacagagctcacacatcacacctgagcacagagatgaaggcagggtcactccacagagaattaacaagtaagcgaaagctggggagacctgggaatgaccgtgaggaaagagagaaagagagggcagtgacccgagagtggaggagactgcacaccactgagagcaaagggctcagccagggactctctgtgcccctacagcctcacacagactcccaagaagacagggaagaaggggggaggcacttgcttaagtttccttttcagacccaggaaatggggagatttgagagattcctaactgaactgaatggcagggtcagggttgggtgagccagagtcaactcactgttctcccacagggcagtggttctgagagccgtccctggacaagggtggcctcagcatcacctgggtttgccagaaatgctgatcagcagcgcccgcctcacacacttcaatatatttgctgctatttagttgctaggtcacctccaactctgcaacctcatggactgtagcccaccagactcctctgtccatgggatttcccaggcaagaacactggagtggataaccatttccttctccaggggatctttccaactcagggatcaaacccacatctgcttcagcaggtgaggtctttaccactgatgggaagcccacatcaatatacagacccagccgtctgta

SEQ ID NO: 62909 - DNA, 1598 bp, Bovine  19866881471853
  misc_feature (1)..(1): n is a, c, g, or t
ncacaaatggcagtggtgctgccctggaaaacggaacgggaggcgccctcagtgatgccgagagaaggccaactgtttcagacatcaaagggcaaaggcctgtatttgaaactctagcatcaagccaggttggaatcaatccttttcagtccaatgaatatttcaaattctctttctactctctgtataagtgtctggatatttttagaaggctgtttctgatcctaggactgttctaaatggaaacttaataggaaatcagctttaataagtactatggagtacatgatgtaaaaaccaggaaggtccttaaaagaaataagtttaagacttcatgcctttattattgttgttatttagtgactaagtcgtgtctgactcttttgtgaacccatggactgtagactaccaggatcctctatccatgggattctccaggcaagaatattggagtgggttgccatttccttcttcagggattgttcctgacccaggaatcaaacccgaacgtcctgtattagcaggtgtattctttaccactgagccacttgggaagccctcacaccttcagaagactactaaagctactacaaagaggaaaaaatataactaaggaacaaaacttaccagaacttcagacccacagaatctgcagtggggacctttaccagaaggaagcaaggatctctgagaccctatgcaaaagggtaacaaggtacgcgaggaggccttgagaacaaatgctcactaaggcactggagcatggtggtaatcctgatggaaggcaggcactgacagactcgccgaggcattagtcacatcgagagtcgtcagtaccagtggcaaacactttgtgaaatattccaaatacaagacatacgtttagaaaagttcataagggggtaacactaatgttaagagttgtaatcagtgactagacctcaaccaattcttgtatttgaataaattttaattacttacatttacttttagtaacttgctgttcagtgatgagttttccaaaagttttcttttcctatgcctgtcagctgtgaaagctgagctattaaaacacaaacagacagacaatcaaaaagacattcctacatacacaccacccgcaggacagacagcaaaggtggccatgctaagctttgagggtacagccctggttgactgagtagccaggccagggagggacccatgaggctgctgtggcccaccagtacttcaagtaccaaggagttccacttcccctggaaatgcccactgctcctccagcagggtgggactagaatctgccacctctgggcacttcccagagaagctggccaggtagatgtggtctctgagacggtccctctcctccaccactctgtctaccgatggtgaatctccaaacaagagaatacacacaccacagaaaaaagggaaaccctggtccgacatgattattctgacatttaacatcaactctcaaatactctatttctttcttaattttggtaaaggtatcctcttttgttcgtatgttgtaacagatgatcacataatctgagactgtagaatgataaatacattagaggtacacaggcata

SEQ ID NO: 62910 - DNA, 1500 bp, Bovine  19866881489931
  misc_feature (1)..(1): n is a, c, g, or t
nctggtgatccaactaaactgcactctggaggaacagtgggactaagggaaagggagtgagagcaaatccatttaaaccaatagcccatgctacagttggtaatggaggtttcaactaataaaaaatattgttatggggccaacaaagagtaactgaccctgtccacaatcattaggaaatgagttattccaaatcaatgaatgctccagataaactgatgctcacttctttagtttttactttccacaattaggatgaaaattcaaaatgtattaatacttcatacttaacctactttgaaaaaatatacatgccacacagaaattaacatcctgtgggaaaatattagaacccaggtctttttcccttgacttttaaaactagggctattgctatcatactatcttgaacttttggtgggaaatttaagttaacatgtacgtaaatacagagaaacatacgaaggttaagttttagtaacagatgttaagtagaaggtatatacaaaaatacatgtgaaataaagaggttctcaaaacaactaccttcatacacactgtcctgcttgccaataagatctggagcttgtcctttgtacctgcaccaaacacaaagaacattgtgttttcatataaaacaattattactccaaagcgcaaattatgtcattaggacattttaaaggtcattaataaagcaacacaaaataaaaaagtaagtttcatgttatggaaagtgaaagtgttagttgctcagtcatgtccgactctttacaacctcatagactgtagcccaccaggctcctctgtccatgggattctccaggcaagaatactggagtgggttgccatttcctcctccaggagatcttcccaactgagggatcgaaactgggtctcctgtgtctcctgcattggcaggtgggttctttaccactaggcgccacctgggaagtcccttcatgttacgggctaatgtaataaaaaccactggtatgtaggtgtttacaaaatcagtgactattttatcaaataactgtggaggtttctgagtgaccaacataaatctttttttccccccaatttatttattaatgagcaaaaaccttattcattagctattaattgctatttaggaatataaagaagtaatattttcatggaagctcatttaatctaaatagtctatttttttaatcaagaaaaaagatcttaatcaagatgtcaaaaatatggtgaaaaaaaaacaaaggaaaaagaggaacataagcctcctgaaggttaaagcaaaggtcccactcacaatttgttaacaaatttaagattaatatagtcaaactccagtgaaggacctgagaccataccactgttcccagactatagactgccacctctggcaggaacttgaattcttccacttccctcatccctgtatctaaattcagcaatcacaggactttataaaggaaaaaagtaaaggaaatgaagtcgctcagtcgt

SEQ ID NO: 62911 - DNA, 840 bp, Bovine  19866881491531
  misc_feature (1)..(1): n is a, c, g, or t
naacctgagcagcagccgtcactctccttaaagcaaccacccggtcatgaggatttgctaaggcagctgcctgttcacccaatgttattctcccagaggaactcttttctacagagccatggcaacctgaaaaacataagattttgctcagttttcaagaaggtaagggaaaaaatagccaaactactgaaaaattttccctaggtagctaggttctaggcttctaggaaataaagcaaatcaatgtattttgctcatccataaaactgttatatagaagatggtttgagagaaacagatatttctaagtcaataatttattataggaaaaatatgattcttaaattttttggttttatttttgctcatgtatcacttccactgatattaacatatagaaaaaatatagttttaaaaatatgctttgagtacatattcacccaaattaaaaaatactacaaaatagtttttgtttccaggtttctcttaacacaaagttaaaaaaaaaaaactttgcattttataaattctttttatcatttgaatattttataaaaacaaaagaatcagaagttagtattacattataccttcaaaacattaaacacctggctaaagatagttgatgggatagaaaatattgaactcattattattaacctctgccttattatttacttttctaataagcaaattaatacagactctataaaatccatgccaatcagcattccaagtttacctatttgcatcagagtctcttccatactggttgggttgctgttaccattgctactgatgctcctaatggatcactgtcagggaactgaactggttctg

SEQ ID NO: 62912 - DNA, 1213 bp, Bovine  19866881554366
  misc_feature (1)..(1): n is a, c, g, or t
ngggtaaatgaccctatacacagattccaagggcaagagtccacaccctttgtaatactatcattgtacacacaaaatgcccagattctatctttctagtgacttgtagctagtgattgtgcaataacttaaaaactacagcatctccaactttttttttttttgaaagtacacttttatcagaatattttatttcaagagttaacacttttttcaaaaagtaaaaatatagttacttccctgagtataaagaactcatcctccaataaaagacaattacaaaagtaagcaattagaggtacataattctctgcattcagttatactctattacaaatttattctttaaaattgcatgtattttgggacttcaatgtttcaaaacaaaacaaaaaccaacaaacaaaaacaaaaccataacagcttgttttgcacctgtgatgttaaggtacgtctgatctgtctttatcaaattccagagcaatctttaaaacagtgctgttgaggccaacagactgcatgttacatatgatagaaacaactattcctcttggggggaccttgatatttagcgcttctgcgtccagttcttcaggaaggaccagcaggacactactggcacccactgcgcctccagtgtgtgaggcataatgccgctgcttcctgcaagaaccgtatgtctgcttcttttccaccacgccccaggccattgcatatttaccctctttatcccaagacatctctgtgttagggactggtgtccaaatcatcagcattgtttccggtttaagatatccaggtaaaagattttcatttgcgttcttaaacagcccgacttggtaaccatatagcatcgcattcccaaatttcagaaggtcacccactgtagacagaaatccaccaccagcccatttataggagttatccacgtaaggtgtgttgacaaggcgtttctttttattgtaaacataaaatctaaaatgaaataagaatagtcattaaaaatgtgatagtctagtattgactccatacatgaagatgaatagaaaaatgtatacatgagacagactgtatttcattgtagtgaatatattttctcagaaagtaaccactacttttcagtatgattcaaataaaatgaaacacaagctactgagtaaagtatagaaagctgattgttttttctattgcaagccttgcccatgctgagtgt

SEQ ID NO: 62913 - DNA, 774 bp, Bovine  19866881578818
  misc_feature (1)..(1): n is a, c, g, or t
nagtgtctgcttccttttacatagtagctttgaaaaatactttttattctgagggagtacaatctttcttgtgtgaattttttttttttaaatgattgaaattctgttttgtggagggttgcaggaaagtgagcatcctgaaaaagtttagacctggagggaagcagtaaagggggggtgaatctcatgtatgatgttgggctttgcatttactatggagtagatgtggtaaaaagaggctctgagctgtgtcttcagttgacatggaggaggggaaatcccatgcctcttttttagccccaagagctctgacaggaagtggtagccaagaggcttcaaacagcacaaaaaatacgttacctgcaacctaatgctttggagttgaagttaagttaggaaaataaggtgaatgttaacatcattctagtgaaatgttccacacacattgaccacaaacataggcttgaagtgtctgcatctctagcagaaatatccatgcccccaaccttcacccccgtttccaggtggtctgaagttgctgaaggaagcattggtggtccacctcctcccagtcacaattatttcttgaggcatctcagcatggaagtttccagggcttctctgactgggtttggaaagatttgccacatgattgctgacaaaatttgataaggtctacgtcacagtaaaaatctatttcttaatacctggggtttgtgtgtgtgtgttgtgtgtttcaggagttatatatatataaatatctctttcttccca

SEQ ID NO: 62914 - DNA, 1794 bp, Bovine  19866881647694
  misc_feature (1)..(1): n is a, c, g, or t
ncgattgcaggggatggggcttgatccttggtcagggaactaagatcccacgtgtttgtggcagtgtccccctgcccctgcaaaaggtaaaagttagaatttttcctatttctgagggataattgaaacaaatgtagtctgtttgaagagtagggaactagattacaagtacaacaacagaaaaaagatgcaatagcatcagtgaaggagaaccaggtttgtatcttattattttccgtcaggctgacccttatgagaaagttgtccttccctcttcccaactttatactgaaatataaaatttccaagaatgaattataaattgttttaatttcaatgtttgttaaaaataaaattaattgcaggatggatataggaaatcagttggagccaagtgtgtttatcagttgcgaggacacatcacccctgtacggaccgttgcctttagttctgatgggttggccctggtgtctggtggattaggtggccttatgaacatttggtctttaagggtaagagtatagatgttattttcatcttcagaaatgtttatatattaatttacatacattaaaagttaacccaaccaatcttaggagtattttgtgtaataatatcttgaatattgaagaaacccttttcagaattctctgccctttaatttttcttagtgatgtatttttaaagttcttctaaaaaggtcctagagaattggatagtaatatgcagtttgacattgccgaatttagctaaatgtaggttttagaataagtttttgtgaatgtgaagtatacatttaaaatgtaagtaatggctaaccagttaaggagtgtgtattgatcaatacatttcattttaagatggctctgtcttgcaaactgttgtgattggctctggagctattcagaccacagtatggattccagatgttggggtggctgcttgctcaaatagatcaaaggtaattttataattaaatcaaatcataagttgttaacctctaaggtatctttgaaatcgtagtccaaggatcccactttaagaggagaaaactgatatccagagggatttttacttgcccaagataatgcaactatctagtggcagaaggaaaactagaacctagtactcttctatacactgtactttggggaaaatgcttaattattgaatgactttccactggaagttataaagagaactttttactttctgccatgatttttgaaataggactaaattatcttaaaataattttccctaaaaagaaggaccacctcataaacctttcactcaagtattcagaatagatcttggctttcaaatttaatgttctagtaaaaaatactagccctcttctgtgaaataattttgtgatgacattatctcttacagtccatggggttgcaaagagtcggacatgactaagtgacttcactttcacttcatatcttacaatattgcttttcatacccctaatgagtagtgccaatatcctgctttggtttacattttatgtggttaagtaatattaaaatagagctataaacctgcatgaacagtcctactagatgtaaaatatagaatcggaccataggtagtagtggcctgcatagaataaaccatagagccatagggcagtgctgcttctcctgtagatgtgtgtcagtcagcagagtactgcttcctctagtatccctttgatcatgtcagactgttgaaatatcctggatgattttcctataagtcctagaaatagcaaataattaatgtctctttaagaagaatcagcta

SEQ ID NO: 62915 - DNA, 1107 bp, Bovine  19866881696949
  misc_feature (1)..(1): n is a, c, g, or t
nctgtttctttatgaccccctggcctgtggcacaagacctaaaagggggtttctgcggtctgggccaaggctgagagacacggagggaagacagagccgccagagccctgttggacctgggcaccctgtgcatgaatgaaggccagatgtatgggacaggcaagtgtgtggatctggcatctggcagataatttcccttttcttttttaggaaatcaaaagctactccagaaaagattgagtttaggggaatgcaacagggtgaggtaattttaaatcttcacaatcagctcatctaagagcaggaagtagggccagctctgggaagatttaactctgcaaatggccccagtcccacctggcctcccactgccctgctggcgctcaaccctcacccagaggccagtgagacatttcctgtggacaaaggagcatggcaggtgatgggccacagggtcgcaaagagtcggagatgactgaagcaacttggcacacacacacgcacacacgcaaggtatcatctctcagcccagagactacagccccagacacagggttcgctcctgggatttctctatctgttgatccgagattctcagctgggagaaaaaacaggcctaaaactcaccaacaaattctggtgtcccaaaaatgttcttaaattcaactccgtcttctatttcatgagccaggccaaagtcaatcagcttgatgtgtggaatgggaatattcttgtccaacaacataatgttttctggctgggaaacaaaaaaaaaaagaagaagaaaagaggataaaagaaaagatggtaattaaagccctattttatgtttttgctttgggtttaagggggggtttagtgttcttttttaggaccaaaacagcacaaaccctttcttactcttgtgtccctcagtcctctcccgtgaacccaagaacagccacaacgctgagggcaaggcctgggttttaccaaagctgctgctgacagcagaaccaggactgtggctttaatccttctgtttctgatggggagatccctgccatgtagtgcccttttgtctccccatctgtcaaatggggccagggaggatacttgcagcatttc

SEQ ID NO: 62916 - DNA, 840 bp, Bovine  19866881712394
  misc_feature (1)..(1): n is a, c, g, or t
ntttttttttttagattaagaactgggaacacaaactttattcaaaaagtaaagacattactaaaacatatacttcagctatatatttatgacttgctaatggatggaggggaagagaaagaggaaactagtaggaaaaaggttgaaaacagaaactattgatgagaggtcaccaactgtgtttccgatttttgaaatgtgaattaaccattgtttatagttcttcaactgttccaataccaaagcctattaaggtctccttaaaatgggaccctcttagcagaccaccaagggacaatttttctttggggtgcagcaacagtgaaccaaacaatgtcgggatgacgtcaactggagcacgagatgaaaagttctataagcccgtgccagatgaaattccctacactatcccagtcctcagtttaggtctttttgtatgtacctacctactttccttccacagagattctgtggctcatttcttctgatatggccttcatctccttccaaaataaggttatcagcaaatgaaaaggctagtggaaaaggcaaatgaaatctaagatccggagtcaggaaaaccagtgagattgacattaaaatgcagagcactgaaatatttataggtgcatttgtgaaatattaatgcagcatctggcaaacacagggacagggaaccttcagactctttgaagactgccttttaactgagcacagctctcagaaatgtcactagaaatgttccatctgcctcagggcacgctgtggtctcttgaagtatcaattggtcagtgaagccttcttcagaatgcacccagcacactcaattccctgggccag

SEQ ID NO: 62917 - DNA, 2347 bp, Bovine  19866880705310
  misc_feature (1)..(1): n is a, c, g, or t
natattgattatgtatctttataaggtaaccacttctcaggttactttattgagtaatggtaagcctgttctccactttagtaccatcaacaagaaatcaagccttgggcttttcccctctatttctacattaataatttttttttaattgtaccatagaaagcttggcctattattttgcatttgacagatggatttccctattcactattaaattcacttctaaaggtttaagtcttttttttctttattattttgactttttaataattcctatgtttctatcctctcttatgttattaccactttgggtaacatatatacattttagcatagaagtactacgtgaaaaagtttcaaaaatctttataattacaagcaaatgatattaagaaaatcaagaaatggagctgttcgcttcctttcattttaatattaaaactgtccttagaagatgtttttaatgtcaaggctaataaattaaaatttgagatatttttttacatgtagactcatatctgcttctgtgtgcctttggaaggatacacttaaaaaatgttcttgtatatttcatgcattcctatgttatcaggatcattgtcctcagttaaatggtggaattatttacccagaaatgctgttatttaagataacattatactttaatcaaactctacctattttatactttcctacaatacatagatgttgttcatattgtatttctataggaaaagaaaactcgcaatgactaatgtaaatattttatattactttagaaataataaaaatccttggtacatacatagtattaaagaatatagacaaattaatatgtgttcaatactccttagtacttgccttttaaaactaattcttaaaaagtcaccttagaacattagttcttaaatcaatctgaattttgatgcatgagaatgtgcttttttatcttattgtatttttagttgcagaataattagataatattaaagctgagaagaatcactaacattacatagcccagtcttctaaattgcaaataagacaattgaagttcaaaaatcagaacagccttctcaaagtcataagaaattgatgatatcatccaagtcaaatattgttttatatatatttcaatgatttttcctttctttttttttttaactgtttaaagctttttttgtgtatacaaatgaattttataatagtgtaaacaccttgaaagcagaatacatatatgattcattttctggtaatgaaagcacataactggttaaatcaaattttgtgtctgatctaaatgttgtatctgtgttaatatagatttaatgtgaaatttttttctccacaaagggtatttgggtccctgaaggagaaacagtgaagattcctgtggctattaagattcttaatgaaacaactggtcccaaagccaatgtggaatttatggatgtaagtacagacaccaggcgatcacatttttatccattattgactacttttaaaattaaaaaaaaaaagactccaacttcaaactgtcttctcttgtaatggcataatgttataactaaagacttgaacaaggatcaaaaaacttttgcttaaaagaccagagaataaatattacagcttattcctgcaatgtgatctttgtggcaactactcagctctctccttttggtaaattatcagccataaacaattaaaaaaaatagtgcaggaatgagtatgactgtgttccagtaaaactttatttacacgagcaagctgaaggccaggtttggcctgcagaccaaatcctgctctcaagggccgtgtgtttaagcactgtgccaaactgcatttgagagtagtgatgatgatttgaaaaattaaccagactgttttgttttattgttgttatcatctgtttagttgaaaacatcaatcaagattagtttcgatagttgccattaaatttaaattaggaacctagtaactcagataattgctcattgaaacttagttttttcaattcaactctgaagacaagacctcataggtaaaatgctccaactatagaatagctcactggtagctcagctggtaaagaatctgtctgcaatatgggagatcctggttccattcctgggtcagaaagatctgctggagaagagatagtctacccactctagtactcttgggcttccctggtggctcagacagtaaagaatccgcctgtaatgaaagaggcttaggttcgattcctcagttgggaagatcccctggagaaggaaacagctacccactccagtattctttccatgagaatccccatggacagaggagcctggcaggcccagtctga

SEQ ID NO: 62918 - DNA, 1872 bp, Bovine  19866880787621
  misc_feature (1)..(1): n is a, c, g, or t
nttcatggaatagaaagaactttatagggatatcaaaaagtaattaaaaagtggccccgacaagctgtaaatgttaattctgaggatgtaaaagtgtcctcttctaaaataaaaatcacacagattagcatataaattgctttaagcatgcatttataaatcttataaattttgaataatattagcttgtaaacaatataaactataagacagtttaattcataaatttatctgccttaatcttgaatttatatttgagagataaaatacgagtgcccccactcagaagactcaactcagtgaggcaacaacatacacagtaaattttggaaggatactgttatcttttttaaagatattcaatatgttctcctttacgttgtccaactaagtctcacttgtaaaataaactatatcagaaaggcataatacatttattctaggacagaacaatcctagttaatcaatagccacccagtaagagaatgactttcaggaaatcacagcacctttcttaaccctaaaatagtaacatctgatcttatcttgtgtgcatgccaagtcgcttcagtcatgtctgactctttgtgactgcagccttccaggttcctctgtccatggggattctccaggcaagaatactggagagagttgccatgccctcctccaggagatcttccccacctggggactgaacccgcatctcacatctcctgcattggcaagtgggttctttaccacaagcgatggtaaagacttgatgtatgtgagtcagactaggaggaaagggaggatcagaaagtgaaagggagagctgccagactcacaaagcagtcggtgtccttcgggtcccgaacagcccccagcacattctcggtgacagcaatcactcacgtagggtccatagcatctgccatcacactgttccgcacacacggtccttgtcactgcagaagacagagatagtgcctcatcaaagtcagcttccaaggtgatttggagtagctgagaaaagctgagccctggagtaagtaacaatttgctcaaccatcactgactcagctcagcaaacatttactgcttgaagttggcaattgatcaaaattactatacaaaatccttcaaaattaatacatgaatttgtttttagattcattctttttcaagcaaagacagtgctttacaaaaatcacacaattaggaagaaagaatcaaatttagaaaaactgaatgagaggcattctggcaggttgctaaaaatggagtcagcagcaaagtctatttacaatgtgcaccgtgagggcctacagcagaaagtgtctccagaaaggggtgcttgatttttgctagccaatgcaaagaatgaaaacataaactcttacatgattcacattataccttatatcattcctatcagatagacagatgatgggtgataaatggataggtaacagacaaataggtaggtaggtagatagataaacagacagacaaagataggtagataacgcctctgtagtagcacaaacatttctattcctgagatttaagtgaaatttctaccaaaatttctcaaaaagagggacttaacaaggagtagagcaacatccttgaagaaacaggaaggagggcagaagacacattcatagtaaacacaacaaaaacttccgttagtttttcttataacattcttcagtcttagttgacagcatcatgctgtcaaggtttactttagtaaatcaagctatatacactggacaacaaaatcatagcattaagggacacatttctgcttatcatacttattccaaagagatattttaaaagtatatagagaaatgaattatacaacatatgtgtaacacatcattt

SEQ ID NO: 62919 - DNA, 926 bp, Bovine  19866880803050
  misc_feature (1)..(1): n is a, c, g, or t
ngctttggaaggcaagctaatgtgaactcaagctatattttacatatcatcataaattagatgtatggttattaataagcactaatttattctgtttcctcaaaacattttcttaatcaattgttgttttagcaagtactttatcacaaacatgacaattccctgatgatagtctacgagatgcataatcagaacgagactcactgatgatatattattcactaagatgacactttccaggaagaatctattaaaaaccaatctagaaaattcagtaagctttaatttatggctataaaacttcatgtgtcctcataattgctttactaatatattttatacagtgtttcgcacagattacttggcaacaaagggacataagccagagagatcaaacaagtttaccttccagacagtatacaaaacaataacttacaccaagtccttggtctggcattcttgaacattctctactaaatgccaaagtggaatcagtggaccattccataaaaataatgaaatgagaattctgaagctcactcagcactttgcttatcgtgataagggaaccatgaaaaaaaattcagtgaaaaacttctaagtgaaagttaagagctattgttcatttttattgttagtactagtttggaattgctaacacaacccctgttcagtatctttcagatcaagcttatatctcatgtctggtgagaggtaagggaaagagtctcagttcaaggtctgctgagcatcttctgtacatttccctctccttcctttttctccctactcatttctataatacatactttgtttcactataaaattaggacagacaaattaagtttttgtgacattaagagaagtaataaattactgtgtttctatatcatgagaggtataatctatggtttgcttgagcagaa

SEQ ID NO: 62920 - DNA, 727 bp, Bovine  19866880861710
  misc_feature (1)..(1): n is a, c, g, or t
nttagcactcaatgatcttccctctatgctgcctagattatttctgtttattgatcaaatttcgacaaactgtgtccatgaaacacactgtgtccattaaataaatgttgaataattttagtgctaggctgtttttggttacaaacttggaggtttgaataagaaaaatgctcaggttaatgcagaggtgatttaggttgaacgtgaagaagaatttattgactattagagtgataaaaacactgtaaggagactctgaatgggcttcctgagtctttgtcagtatttaagggaaatctcttttgaatgcttcagacctccacttaattaaagacagcagacttgatgaaatgctctctagaggtaccttctagttggattgtaatccaatatttattgtattggaattcaatatttattcctatgaatggtgaaattgtgcccccgccaccaagctgaacactctgggttgtgtaacatgcttctcagttcagttcagttgtgaccctatgacagcagcacgcaaggcctccctgtccatcaacaactccgaatttagtcaaactcatgtcatttgagtccgtgatgccatccaatcatctcatcctctgtcatccccttatcctcctgccttcaatctttctcagcataatggtcttttcaaatgagtcagttctttacatcaggtggccaaagtaaaaagcttcaattatcagactagactttt

SEQ ID NO: 62921 - DNA, 735 bp, Bovine  19866881078745
  misc_feature (1)..(1): n is a, c, g, or t
nctgagaagagaatctggttaatgtagatatggatttttttctttaataatattggtttcttttgcatgtaaatgaaatggtttcaggcaaagtataaagtcgtcttgctattatttcaatattgcttgaattgacttaggttcaattttttttctttgtttatgttttatctggtggctctaaatctctattcagaatatctgtggactcataacatcttgtaagcaattgcttcaggaaaaaaaactgggtttccccataattagaaatgtgttttatttaggaattgggcatttatatacgttaaaaaagtaggtatattgttaaacattgttattagattctccaaagtgtgtaattgtgattttggtcacaataaacctccccttagaacattaaaaaaaaaaaaaaaaatcctttctatgctaaaaacattgattaaagtgtggtgcaatgaccaaaaaatctttataaggagggtttgtttgtcttttctctgacttttctgtagagtattctaaaggagaaacagcttcaccctatcattttttaatctttgggttacttccaagatactatgggcccaggatttagaaaaaactgaatatctgtagttttttcaagttaaatgttaatgaagaaatctgctttcttcatgttctacttattgatcttctagtacagatttggaagttcataaattatgaaaacattttagtacttttgaaatttgt

SEQ ID NO: 62922 - DNA, 1650 bp, Bovine  19866881453537
  misc_feature (1)..(1): n is a, c, g, or t
ncaggggagcagcttattttttctagtttcccttgaagcaaagtgtctttgtgactatttcagtatcctcaaactatgtgcttatgtgtaaaccagtgaggtggcattagctcttccaagctgaatttgaatttgaatggcagaatattactttaccttttgagaatacgccacttcacagagtgacttaagctgatttcttgacctgcagggaattgcagcagcatctgcaaattgatgtcctcttggcagaaaatgatgtggtttgctttacttcttcggtattccctattagccagcctttaatctggcagaaaatctctttacggaatctcatactttcctgccaaatctaaagcacccaagatgattctccacaagtgtgcgtgtgcttgtacgtgtgtgtgtgcatgtgtgtgggcattcacaatggtgaagaggatttttggacagaaggaggatagagcatgtgaacctgctctcaattctaaatttattcaccttctagaggaaaaaaagaaaaggaaaagtccttattaaaataggtttgctgtcttttaaagaaatagttgctgagattcgttagatgcagtgacactatttcttttatagttcagtgcttttctcctttctgtaatgtctttgttattcaactgttatcaatatcaaaggtattctaattattattcattttaacaatgcatcctttgaaaagttaaaaaaaatgtgtacccatctttgaattgtcctacatcggttacattaggtaatatgctaacctatgatagaattactttcacaaaatgtacttgcatttttattaatatgcgtatcactaaattccttttttttcatcatcactgcttttgcttatattttgttgaaggagtaatacaaggtagcatttatcaaagagagatccttactttaagttgattgtcacaacaaagaaacataaagtctctgtgaaagacttttatcaagtggaatctcaaaggtataattgcttgttttttcttatatctttagtttccagcaaaatttggaagaatttctgcactgtacacaatgtatatgtgataccagcttcatgaaggtgtcgatagaagttattaaaaaatgttaaacagaaacattttagtgggtataaattcaattccataaagcattcttgcagaaatgatttctcttaaaatcaacatatataaagatcaacagaattttacatgagagtatcacatattgactagattgcctcagggataaacatgtatgtgtgtaccttttgattagcaacatgcacttgattgagtttttggccagtaaagttgcttacccttgggtgcagtttggatggcacgggtggcactctcgatcttgatcagcatacttgaaaatgaaactgtttgccccctgtaagccatctggacatttttccacacagttcgggccatccttgaaatgggagcactttgtacagttgtcaggtccctaaaaagtgtgaggggaaaaaaaacaaaatgaagaaagaaaaatgggtgccttttcttctggaatgtattcatctagtttagctactgagacctcagtggatggcgaaatgtcctctaggaagagcattttcagaagtacaaaaggggatgctgctag

SEQ ID NO: 62923 - DNA, 828 bp, Bovine  19866881522927
  misc_feature (1)..(1): n is a, c, g, or t
naaaaatattaatgcatatagaaaattatatatgaaacctgattctaatattactaaaaaccttaaatggaatttttaaaagatgccctataaaaataaatatcctagttcatgtctcaaaacaaaattaaattgacatttttcatgaatataagtgatagtaaagaaactaatctttgccctataaatttaggttacaaatcctcttttaaaatttctatcttggtaattttacatatgcataccatttctatgttttaaattcctgttaatcgcttgaaaatatagagagggatcactaatggaggagagatacaaattgcaagaataaaaattcactggactgtgacttcctagtggtcaggagctgtgtcttatttatttctgaacttagctataactggatctgatacacagtaggtgttcagtatagcaaagttgaagaatgaatgaaatgggaaatgttgcttaaataaaagtcctctagtcaaggcaagaagagacaatgttataacctttttctctaggaatattagtgagactcccctgataatagctaaatggatcacaaatttttaaaatatctaaagaacttattagagttaatacatttaatgtattatacctttagagtagtaaaagtgcttttaaggtattacatagataattttattttcaggcaatcattaaacaatattcagaattagaattttccttctgaaaaatgtgatttgaaagactattttcattaacttggtttctgcattatctagctgacataatattggcatatattaacaaaagaagctgttttccaaagtagagacg

SEQ ID NO: 62924 - DNA, 1718 bp, Bovine  19866880390054
  misc_feature (1)..(1): n is a, c, g, or t
ngtgtgctttcataaattattcatacattatattttatttaccttgaattttagaagtttctactatttggggaaatgtgtcagaatttgtggaacggcagctatccttacacaaggtaagatttatactttaattttaacataggacatcaaagaatgtttcctccttagtctccaattgttttgctgggagaaagatagcagattttagagccatccagtgtaacctgcagtcttgtgattttatgatgctcacacgtaggacttgtggttggtagatttaacagacacggatttcacccttaggtaacgatgtgaaagttgtgctgttccagtgataggaagtgtattgctgatcagtccaggtgtgtacagaggaagtagatgaattctgttcatctgtgatctggtagttcctggcgtggctatagaaggatatgatgcttcttgtcttgcctccttgcagggaatggattctaactgaaatgtatgaaggcagtcagggactgaactctacttgccaaaaatgagaacctttgtccagggctggcctatttctcccccatcaagtcttgagtttggatgccacagaactgaacagagatgttgggagtttggagggtgctgggatattgtgaaacgtttatatcctactcagagggcccaatatgagaacctttgatctgaattcatccatgaaatctatttgtttgatctgataatttgaattagtcatcagaatttaaaattgggagtttgtacaaatttttttttccttgaaaaatcagctgattaacaaaatcagtttttgttcagtacatgtgacgcttggctgaagctgacaagggtctctcccctttagatggggcatgcactcctgggccatcaaattctctggctctgtaccttcacttccttgcatcctttcttggctcctatagcattagactttgtaacctttgatgtatgatgtttccaggaagacagagctctagagtgagagccaaaatcttttgcttctgcgcattaaccaagatcaccacactagggcacgtatctttgatgttttgggtcgtctgattttaagtgagggacaataaacctaccataaagaatgagagggacttccttggtgttccagtggttaatcctccatgctcccaatgccaggagcttgggtttgatccctatttagggttctagatcccacatgccataactaaaagatcccatacaccgcagcgaagatcaagacactgtgtgccacaactgagatctggtgcagacaagtaaataaataaacgtttttttttttttttaaaagagagaatgaggaagcagaaaatctctcccctgatggcaagggattaaaatttaaaatgccacacaatttcagtcagttcagttcagtcgctcagtcgtgtctgactctctgccccaccacggaccacagcacgccaggcttccctgtccatcaccaactctcggagcttgctcaaactcatgcccattgagttggtgacgtggccaaagtattagagtttcagcctcagcatcagtccttccaatgaacagtcaggactgatttcctttaggatggactggttggatctccttgcagtccaagggactcttaagggtcttttccaacatcacagttcaaaagcatcaattctttggcactcagctttctttatagtccaactctcacatccata

SEQ ID NO: 62925 - DNA, 1004 bp, Bovine  19866880442268
  misc_feature (1)..(1): n is a, c, g, or t
naattctatgaagatgtcaggagcccagaaagccacatcacgtataaaatgatgaagtcttttctctaaaactgaaaagtgaaaaacaacttcctgtacttttctttggggaactgagatgtatcagttgcccattttatttacactttggtccatttttaaagcagtgaatatttctaaaggtcataattacagttaaaatcaaaattctgagtattcagctattcatttacttgcatggcccgagagacaaaaatgaaagtacacttcatatttcaagtgtcaggagcataacagtggtcccctagggtgcttaccatttagacatttaccaattgatctaggatacccatatgaaatagttcatttacagattttctgaggaaaattcagaggtttgcatagcgctgactatatatctttccctttgagggtgctggatgatagccagtccacaattcaagtccactcttctttaccctgacacgatttataatgcatatcaaacattttagaaacccatttgagggtggtagtttgttttgtagaaatagtccatcagtagggaggtccagggcttccctggtagtccagtggttaggaatctgcctcacaatgcaggggacacaagttcgatccttggctggggaggatcccacaggctgcggagctattgggcccgtgtgccacaaccactgagcttgcgctctcgagccctggaccagaactactgaagcccgtgtgcctgagccggtgctctgcaacgagaagacactgcagcgagaagcccaacacaccgccacgagagagcagcccccagccaagaaaagccagcaaccaagaccaatgcagccaaaaataaacagaaagagaaaaaaggatttaaaaaaatagagaggtccatctcccatcagcgatatcaaatctaaacttctgagtccccttccaaggccatcattacttccctgttactggtaccacaaggcaaggacactctgactgta

SEQ ID NO: 62926 - DNA, 828 bp, Bovine  19866880452912
  misc_feature (1)..(1): n is a, c, g, or t
nccccccaaaacttcatgagctatgcaggtgctggattgagtggtgctaatgggtagaagtcagggtaatagcagaattaagagtataaaatataaagtgatcagctggtaagaatgatagaaagatagctgggaaaggtactgtgtctcttgagggaacatgatgaaataagaaaggcacaggggagggatatgcattatctcttattaggagttgccaagagtgtaactgagatgaatacttagaaagagatgactaacacattcttgatttgcagttgaagttactgtattttggaagcattcagtatattaccacatgcatatctctttcacataagtcatttattaaatgcctgaattcttactaagggtaaattcttgcttgaggtagacggatacaaaattcaataaagcatggtttcttccctcaaaataggaaagaaatctacaaatccagtgaacaaatacataaacaattataaaacaataccagtgtcatagaaaaggcttaaagtgaaaagaacagcatcctgaccaatttcacgagacaatttaagtccataactctacattaccaagttagcggttggtgttttaggatctcatattttataagattatcagcttgaatacaagcctgaatgccttaaggaaaaattaataattttcaaatgtcaaaggatgagaaagaaattagaggttgtaaaagaaggaatgaatagaataggaaaaaattgacctcagggcttggcatagctgggaggcagcatgcagttcttggtcttctggcaagcagggaatgagggccctttgggggagttaagt

SEQ ID NO: 62927 - DNA, 1375 bp, Bovine  19866880487978
  misc_feature (1)..(1): n is a, c, g, or t
nacccaggaatcgaacctgggtctcctgcgtagcagattctttatggactgagctatgagggagcactcagcaaatatttctgaaacgcatgagacatttctcactgcaggaagaccaggttgctgctgctgctgctaagttgcttcagtcgtgtccgactctgtgcgaccccagagacggcagcccaccaggctcccccgtccctgggattctccaggcaagaacactggagtgggttgccatttccttctccaatgcatgaaagtgaaaagtgaaagtgaagtcactcagttgtgtctgactctttagcgaccccatagactgcagcctaccaggctcctccgtccatgagattttccaggcaagagtactggagtggggtgccattgccttctccgggaaaactaggtagatcctcttattttccctctttccctcccccactctcccccacaattaccacactgctttgcacataaatgacattcagtaaattccttctgattgactttaaaatgttcaaagaagccatatgatgttcttttcagagaaaagtggatctgcaagcatctgatttcacacggcctgagcgatgatgaacagctgctatttatgaagcagaagagacaaaaaatgttgaatgaatgagaaatagacttcaattgaaatggtaaggatttaatttagcttttgaaattcatttcctgatatgaagcttacaaaatactaaaaggcaacacaaaggagactgtgaaaaaatttcattctttataaatagattatctttgaacgtttcccaaaatagatcaagtacttatttgaaggttaacgggtatttctgacctgagttctcaacagtctgatatgagacagatttttttttttaaataaagtttttcataggggataattttacaggaaagttggaaagtttttctcattaacatcttacattaccatggtacacttaccaaaattaagaaattggaacatgtaattgttaaaaaaaacttcaaactttatttgaatttcctgcttctccagttatctcctctttctgacccaagtgagacagccttctgatattcttcagtggtgtgtaaaagactgtgtgttctagacatcaagctctgtaagtagaaatacacatgtctagagttgcctcgggtccttcatcttgaggcagaagtattttccgatcaaccagacttgattaggatccttagctctatcacttggaagagctgtgtgcttgtgggcaacttgtttaattacactgaaccatgctttccacagggtttctctggtggttcagagggaaagaatctgcctgcaatttaggagacccaggtttgatccctaagtgggaagatc

SEQ ID NO: 62928 - DNA, 1400 bp, Bovine  19866880488139
  misc_feature (1)..(1): n is a, c, g, or t
ntactttttccatgccacacaaacaacagaaccacttggatgtaaatgttttcctgggccttccaccgtgttgaacttctctgcccagacccagatatttttctcccatcttgcacatatacaccctacatttgagtggtttaattcctctatctttctaagcatgtttttgttcaaattatgaatgccactttgctttaattccatattgtatgtgtgctcagtcactcagttatgtccgactccttgaggccccacaggctgtagactgccaggctcctctgcccatggaatttttcaggcaagaatactggagtgcgttgccatttcctcctccaggggatcttcccaattcagggactgaacccacatctcttgcgtctcctgcattggcaggtggagtcttgaccacaaacaccacctgggaagtccaattccatattccagggctctgattttccatcaagattggtatattaagacttactttgtcagataagaaaaagcggtaatctaaaatgcaaagccatatatatacacatttgatttcacttacgcaggaataaatgtgacttggaatgccaggctattttctacacccagaaagtagtttggctctttcactaactgtcagaggaaaccgttctatagtctacaaggtaacctgaagtcccagacacctccagaaagcgcccacaagcttgatcactccctcctcctgtgctccggctttgcacccgtacttcttctgctgcattattatgcatttatttttatgcccaattcccctgctggcccagaagtttctgaaggacagcagttgtgatattcatattaagtgtttgctattatgaacacagtgcaatgttagaaaaagcaagtcaaagtttgccttgtagcaacggtcaattgtgataaacttatagtttccccatggccattttgtgagtgtctctttcaactattaaagaactgtcatcttaaaaaaaaataactttttacagatccagatgtttaaaaaaatatttctagctacataatgactctcacctgggtatcttgagatccacaagtctgcagttgaatagctgatcaataagcaccaaattttcttcttccagctcatgaatagcattttccagttcttccacttccttcctgtgatttgcaatctattctcaggaaaaggagaatggatgttagttttccacaagaaatttaactttaaaaaatgttgatggagaggaagatctatcttgtattatttattactgtgtttgctctaagaaggaagggatgggacggacttcattccaagtcattttaggcagaacttggtttcctggttaggcagttattagtgaatggcaagaatttcctttcctactcttcaggaacat

SEQ ID NO: 62929 - DNA, 2419 bp, Bovine  19866880514205
  misc_feature (1)..(1): n is a, c, g, or t
ntttggtaggtgccagtggtcgggggcaagggtggtgagaagggagaatggggagttagtgtttaatggggacagagtttcagctcaggaagctgaaaaatttgggagatggattatggtgagaattctacaataatgtacaattgtggtacattaagtggtgcttagtgccactgaacggtacagctaaacatggttaaaataatatgttttatattatgtgacttttatcacaataaaaaaaaaaactgaatgcaacacaaagaaggaagagctatgaaattagggtttggagagagagattaaatagcaagaatgagcattacgatagttattttggtacctggcttcagttatatctgaagtcagtccacctctatactcttcagttttgtgattcaataaaatactttttttccccttaaaaaaaaaaagtcagagccaggcagacacccatggaggccacactcaactcccatggcagcgaagaaagttctggttcatctggttcatctactctgctttgagtagagcctcaacctgaagttacagttgtagaatgacttagtgccagcgggaacttggcagcaacctagcagagagaacacagcgggcttggagctggggacactggtccctcctgggaagaccgcatgctctaatcatcgccaccctgttgcttccaccagattcgttttgtgaacataggcagttcacttaacctttccgggcctcaaaaactcctttggaggaagccaaaccaagtgatttctaagacctgcgtagtttttaattcagcatctccttagcccagtcataattgcaactcacatggtaaatgcttttaaacggcctgccgcgcacagcactgtaaacatcactggggagatgcacgtcaataggaccctttcctcaaagaacttatgttgtgcagtagacatcattgtaagtcaactatatttcaataaaatatagagagagatcattattatcaccactggacagagaggtaaaacgaagcaggggcaagtacccagagtctcaagctcgttgggtgacagagcgtgaatgcgaacccaggggcgtccgatcccagagcccactttatgtcactcgagtgggacacagggtggaattgttccatgtgacacagtgtggaagctccaccctctgctgttcatgagaagctgtcttcgttcctgccgaaggaccaccagctgactggagatgtggacacggcgtttccccagaccccaccccggctgtcgctgctccccagccgggtcggcagcaccagctggagcttccagccactcctggactctcaggaagaccagggtgggggtcaggagccacacccacgtcccctggtccccaaacggtggggtggaaagggcaccgtcaggagatccagtcaaagcaaggctcagtttaagctttgctactctctggctgtgtgaggttgggtaatttatttaaacccttgaactctaccttcctcatctgtaaaatgggcgtgagagcatgcgagacagaaagcttgaactacattttagaaaaatgtttgcatcatattccacacatggtttctttttaatacgtatttatttattggctgtgacaggtcttacttgctgccgttgtgcagcacgaggaatcttgagctgtggcatgcgggatctagttccctgaccaggaactgaccccgggccccctacactgggagctcggaatcttaaccacgggaccaccgaggaagtcctgaatcaagctacttttgattcagaacaagcgaattactcaaaagttctgtacaagtatgagaagctatattttcatgtcatctccacatagaaactttcccccaattttttggtgcacttagttttgaaatatttcagatataaaatgttttattataaataaaataagtactataaaatatcaagacttttttcaaagctttctagtcacttttataactcagtactacttcattagggttaacccttcatcttaaatgcagatatactgagaagcttttggaaaattctaaaattcttcaataccactggagaattggacttgcccccagaaaccacatatgcagcaccaggaaagccattcttggctgccagatgtaccactgaatcaatctgtctcttggaaacatgacaaattataacttaccttggaccctttcatctctgtaagaactgaaaaagtgagtgttttctgcaaatgccaagagttacaccatttttatcattctgtgtgcaccttttctgtgttgatgtgtctctgacagatgaaaccgggatatctgtgcaattttgtttcccgctttttccattttaaatcatctcatacacgtctgttcaggtgtctgcataggcttcatacaatttctgcggctgcc

SEQ ID NO: 62930 - DNA, 1312 bp, Bovine  19866880622593
  misc_feature (1)..(1): n is a, c, g, or t
naataaataactcatgaaatatttatttcaggaagctagaattttaaattttggtcaatagtaaacacagtaaatcaagctacacctcttataatttggacttttaatttttttagtggatacacttagttttcaagtgaataatgatgcatgtttatccaaaacaaaacattttgactgcaaatagtatttttttcataattttatttatttaatttttggctgtgctgggtcttcgttgctgtgcaggctttctctagttgcagtgggcaggagatgctcttcgttgcaatgttcgggcttctcattgcagtggcttctcttgttcctgtgtatgggctctagagtgcacgggcttagttgctcactctactgtggagagtactgagtgaatagttgaacactactgcttcagtggttgcagcactcacgctcagtagctgtggtacacaggcttaactgctccgccgcgcatgtgccatcttcccagatcagggatcgaactggtgtctcctgcattggcagacatattctttaccactgagtcaccaagaaagccctataaatggtattttaaatagtattttaagcttaagaaaaaagtaacaaataacatgttttgttattttcaatattccatatttttaaaagattttttaaatgtggaccatttttaaagtctttattgacttttctacaacattgcttctgttttttgatttcttggctgagaggcttgtgagatagtcgtgtcttgaacagggatcgaacccacaccccctgtattggaagctcaaatcttaaccactggacctccagagaagtcccatatttttaattttgttaatttcttctaattaagcttcacagtcacaaagatgtttttaaactgaagtttcattagccttttcatttcttgcttttaaatggtgatgtttatgttcacaacatgaaaagcttcagaatcctttaaaaattactttattcaatagagagattttgtattacttgtctttcataccattcagaaccacactagcctgaataaacatttcagatggccttggtatcatctgggcccaagcaacagcaaataatgaagcaaaactgtagaaactgtccaacctcttttgtgtgaatcaagtcaacgaattagctgaggctccgacagctttgcctttgtctgctgagacggattgtccaataactccactgaaattgcagtcccagcaataagacacatagatcagtgaaagagaatagaaagcccagaaatagacataggcaaatatggtcagctgatattgacaaa

SEQ ID NO: 62931 - DNA, 1821 bp, Bovine  19866880631983
  misc_feature (1)..(1): n is a, c, g, or t
ntcatgcttcctcctagacactacactcactgagaacacgaggatttgtgcctgttcattttagggggagctccttttgtgtctagaacttagcatgcagaactaggtatctgacaggtgttagaaaacttcaggctcaagtccttactcccttttcatccctaatattaacaagatgacttgaaccatgaaataagcgattccatgaattaaggaagcttattgtaattaaatgtcaaattgggccttagactaaacagtttagtgtcagcgggcatgctagtgcatgcggctaggacaaggctttttaaggaacgttgcatgtggtgtacagctatttgacccagggctcccagctcacagtcctgcccctgttccactgttccctgcgccagattctcttaccttttcttcccgtggctgtgggtcagcctgaccccagctggccatgcacaacagtgaccaaggccatcatgggtcaccctgcagggcgcggtctcacctctatctatggacaaattaacgaacaaatatgtacttcagggaaacgatgttttgttcctgcaggacaaagttcagtcatactcaagactttaggtcaaatcgagatctatttctgagatattttccacagatacttctcccatctttacagagacatgttttggtctgtgttcatggattcttgccaaccagcagtttacccaacgctgtgattcatttctttgttttctatatactgtttgacttctctcatatttggctttggctggggactctcagcatatgctttacatggctagtcagtccgaccttttaatatttttggatcttaatacaaaaaaaaaaaaaaaaaattcagaccagaggccaagatttttctaataataaaccagggactactcattttctttttaagtgagtattaacttcaatttagttctcttctgtgaaacttcacagcattaatgttcaaacgtaattcaggtcaagtataatatcagctcctggggtgtcattaatagttcctcgttcatgaataagagccctacaaagtagcacaggcccacagaaatgggcctgaggaaattaggccaagcaaggctcaaagaaatgaagggataagaggctgcattttccctgctctcaggagcagcacttcttttctcataagtaaccttagacacaggcaatgtaggcactggcctgtagcatagaggggcgctgaaggtctcaaaaggtggtcctccaacccacctctaatgcttgacattcctacctccagaatggtattcccttggcagaagtttgattcagacgcttccatccatccctttcctcattcattcactcatcaaatgttaattagtgccactgtgtgcaggaaccccggagagaaaagtgagaaggactcaaagcttttcgttttgtgggaagatcaaaataaggagatggttaaaactctgagcctttgtcagatggttaaaacttcacctttgggactgccaggaggggagggaggtggccccagagaatgggaagtcacagaaaaccacaagtggaagaacgatgaagtcatggacttcacagaggacaagttagggaaggaaagaaaatgctgagtgcagacctctctgacggagtcagtgctttaagctggctagtgtataccaacaaagtggaatggacagtagacccctaggttcccagtgtaaagtcatctgaaaactggcagaacttgactcataagctaagacttgatgggcttcccaggtggcgctagtggtaaagagcccgcctgccaatacaggtagatgtgag

SEQ ID NO: 62932 - DNA, 1623 bp, Bovine  19866880670130
  misc_feature (1)..(1): n is a, c, g, or t
natcggcccagaggcctgggcaggcacgaggcaggcgcatcctggtcacagagggctctggggtccagctacgggccctgtggcttagggagctcctggaggcttttcagtggggccaagctatgatctcagctcatctctgaagacccacctggcggtgggtctttgctcccctcatcaccccctccatgctttggctcacatggtccacggagagcccagcccccatcctctgactaaatcctactcatccctgagacctaactcaagtcttaaccctggaataaagcccttcgtgactactccagcccagaccttccttcttttccatagatgttttcattcttatggccaaaatcctaccccaaaggaaaggcaatgggaaaggtctttgtgtcagtgagcatcggcctcaccagctagaggagataaaattataacgatgagtgggtaacctgtctgtctcttctacaaagaaggcagaacaagacttgttcccagagcattggaaaaaaggactccttctcttttctattttcctatcaaaagaaaagaaaagaaaaatgccttaaggttcaactacagacaagggatcagtttgaaagctccgtagtgggtggagggccccttcctctactaactaatgggctcaattcatttctggggaaagaaagcctgagtttccctaaggttttactcatgagtgaccaggtcattcaaagatctcagggcacaatggctttccgaactccccagtagcctgggacaaaagaaccagggtgcacgcgctggccctgcccattgtgcagcagcagcagctgtgggatttcccggccctgcaaacccctccccgttcccccttcaccgcccagcgcctgctcggggctctcagcactgctgggggtgatggctgagcttggaggcctgggggtgggggtggaggctcttaacagaaaagcttcctcttttattcctttagcggcagcagggtagggaacaatctcagcggctagggaattcaggcaacttattttgggcactgactggaaagccaactgccctctcctttcttggtaaccttgctgtcccctgtaccgccccggagctctaaagataactgccaagttgctgcaagcgtttgtttacaagtctgtctccccatttagacatctaggcgtccttccggcaggtcctacttctctttatgttagttcttgacttgcagttggagctaaaaaaatgtttgaagagagagagagagagggaaggagagagaacagaaggaaacgaatggatggatggatggataagtgaataaataacagactctgtctctgaggctggacgcctagcttaggagatgccaatctggactctgaagaccctagtgggtcctcacaggttgcacaggctgtcaagtggggagtgtcatgagaatagatgtccgtcttgctactcctgtgcagtttaactctgcttttatgatattcattgaacttccttatgtgagattttgtgtgaataaaaggttctgtggctaagaaagtcccttgaaaggaatattgggctagatttttcccccctcgatttcctcccactttgctattttccatgataggcaag

SEQ ID NO: 62933 - DNA, 735 bp, Bovine  19866880789928
  misc_feature (1)..(1): n is a, c, g, or t
ntgtccttttcccgtctgtgatcctttgtttctggagactttgggaatactcgtcttgcttaaaagcattaatctcaggactgagtggccgtttatcaaacaggaaggatttctagaatgaaagcgaagcaactcatttattctagaatcatagaaagcatcaaagaaagtgaaagtgaagtcacatggactgtagcttacccggctcctccatctatgggaatttccaggcaagagcactggagtgggctgccatttccttctccaaaaagcatcaaagaacaaaggtaatcattcagaaaatgtcaaccagaaaacattaagttatcatatttgcccagtcttcaacgtggcaaatagctagtgacccacagattaatatgagcacacttaaggatgaatctgaatagtactgaccacagccccataacagagagggagatgaaaaaggacttcacggagtaggtcctccactagtacgtacacattcgtactgaaagaaggaattgagtgagtgcaaaagcatcagcaggaatgcaagggggtggaagaaggagaatatagcacctacttgggcctggccactctcaatacagggaacccagccgtgaccaagaacagagaccaacagagagcctcactctcactgatcccacatgctggtgccggagacatccagtcaacaaggaacaatgcacagatcatttaagaaattaatgtgtgctatgagggctt

SEQ ID NO: 62934 - DNA, 1067 bp, Bovine  19866880810068
  misc_feature (1)..(1): n is a, c, g, or t
ncctctggtaataataggtagatggaagagaaagggaaaacaaaaactctttaagtgctgcccttgtggaagcaagatgatgcctataagcattaccacaactaccttctgtgactctcagaaactcatttttcaaaaagatttacaaaattaattattctataacctacattcatagctttcataaacaatgacaaacaataaatgcattaagttcacttctgaagggaagaaaacattctgaaccatatggctctggttgcaagtcttactgaaggaaggagagctgcactaacatagaatattctttaccacatttaatagaataaatcttctacgatatacagccaattccaaacataaaaatcaccaccatctacctgattttacagagaaagcatttaaaaattaggttactttttcgtattcaatactagattaaacacacagggtaatactcaatgttacatcgtattcatacgataacatgaatatgtatacgtataacgtatatgtatttatgtatgaatacatataatgtattcataacagcacagaatgcgatatagtgtagtgttataactgaatatgtaccttactatatttaagacacttctttcacttgggtaaagactgatttctttgaaatgtacacttaaagacaaagaaaccaagttaagagatacagtcatttaaacacagtttacctctgcaactttgagaaactctgagattctagtcatcctagtcaggaacttcttatagatgtcaagaccttctttgcactggttctttttcatatcaaaatatttttctgccaaaaacagattataaacatacttttattcatatcaaaatataatactcaaaagagaaaaaagatttaaaacagccgatggtatacctgatgtctcagaaaacacattcaccctacagaaaaaagtgttaaattagccttaggtattcaaagcaagttaaaatagagatgctgctatattaaaaattaagaaattatgattttactattaccagtttttcctacaatacttcttccctacaattctcta

SEQ ID NO: 62935 - DNA, 1923 bp, Bovine  19866880828015
  misc_feature (1)..(1): n is a, c, g, or t
ncaagtctgtcctccactgctccccagtcacacagccggggcctccaccaagttgtactgaacgtgtttgtgtttccaagcctctcccaaagccctcctccactgcccaggtcgcccttctatctcttcagttattcagccattcaattattcgttcagcaataagcccttctcggtgccagaaactgtgctgaccttggagctgcagagacagacaagacacatccctggtctccaggtgtccctgtggctcccccttttggggtcactgtggtcctgacccttgttccaccccccagagaggagaggctcagtcactacactgtctacaagaatgccttggtgtccatgaaacggaattgccacttggtaaattaaactaatcgagtgttctgctcatgttttaataaatcgttgagttagactgtcctgcctggttagtgcctttcttttctgagatttttaaaaataattttatttacttatttatgaccgtgttgggtctctgttgctgcaccagcttttctctagttttggagagtggggccagtctctcgctgcggtgcgctggcttctcatcgccgtgggttcctgcgttgcagagcacaggctctaggacatgtgggctcagtacttgtggcccccaggctctcgagcagaggctcaggaggtgtggcccacgggcttagttgggattcccaggtggctcagtggtaaaaatccacctgccagtgcaggagccgcaggagatgtgggtttgatccctaggttggcaagatcccctggaggaggaaacggcaacccactccagcattcttgcctgggaaagcccatggacagagaagcctggcgggctatggttcatgtggttgcaaagactcagacatgactgagcgaccaagtacacatgcacgggcttagtcgctccgtggcatttgggatcctcccagatcagggatctaacccctgtctcctgcactggcgggtagattctttaccactgagccaccaggggagcccttgggatttttttctaactactgctctacatccagttccctgatggaaaatgccatgtttggtaaactagtataactcaagcatgactaatatccttcgtgggtgagccttgcttagacataaggacgttgtccttgaagtgacatatttaacaactccaggatgtttgctagaccagatttggaagatcccctagaaatgccatcatttttttctgtcctcatagggaaaaatgtgtcaggaatcatccgttcaatgctccctgctttattttccatctgctcctttatgcctcattaagttcttcaaggtgtttaatgtcccatgttctcttcatttgcattcatctgaggagtcaaaattgtaaaatgttatggaggttcactcatagaaaataatttgacttgaaaatgcaattatttatgctttcacccactgtgtgaaaggataaaacattataatgattacactcgagtccatacatccaggcattaacattgtgatcagatttcttttccgcctgtaatttttcagatggctcatttttgttgaaaagacagttctttagagtaagagggggtcttctgatttgattttttaatcaaatttttgacttgagcttctgtttccctggatatttatttagtctatagtgtgttgaattcagtttttcttgactctggagctccatagccccttgacatagtgtttgttttctacgccgttttaaaaccttttcttttgaaatgttataaatctggctagagagtcaagttggtgatttggcaaatgttaagctctgtgctgctgctgccaagtcactttagtcgtgtctgactccgtgcgaccccagagacggcagcccaccaggctcccccgtccctgggattctccaggcaagaa

SEQ ID NO: 62936 - DNA, 2764 bp, Bovine  19866880911405
  misc_feature (1)..(1): n is a, c, g, or t
natgttagtatgctcagtattaaagatgtcaagatactgtcatgaatttctttccctgtctacctactgcttagacttccaaaagaatcttcattctattttgtgaaattagatggtgattcaaagattttagaagtaacccacgaaaagaggactaaagaagcatgaagttttacagattactgttaaataacatcttttatcccatgttaataacttaacccatgacatttgtcaaaaatttcaagatctatgttagaaatacccagtattatctcaaaccaaatctggctatttcaaatgtattagaacttggcgctgggattttaaaatgtcctgggtccctcctcccttctttccttgcctccttctttcctccctctcttccttccatttattcttcctttttccatttttatagccttatggtgctccttacttatatctagggcaacatttcagcagaagaaagtactttaggaagcaaagtgctaccatgtcacgtggcctcattgagataaagagatgtgtttgccagtcatgatgctgtaagtcatttggactcatacagcctccatcaagatgtttgtgcctcagctgttgatgcagatataaagattatccctttaatttttaacatagtcaaagttaatatgtactgtttccttttcaatgctgttaatgttaatacaaaccttttaatttttaacattttaagagttaatataaactccattaatgcttcttagctgatcacaggaaggatcatcaagcactagttgtatcgataatttttttctgtagttaattttttggtgatgatattgtcaacggctataatgacatctacttatacttagattctttaatatatatatacacaaagtactatccttctcagtccctcatttgagaccatcctcagcaccctgctcattgctccaggcttcttccccagttgcctctgtgacctcctaaccttttctccaggcagctgctccttacccctggggctacattctttggatgtgcataaactccttccttcattcttccaagtacaggtaacacggcctattgtgtgtggtagacttgactaagtgtattcctttcctgggctgtggtacaaagtgccacaaaccgaatggcttagacaataaaaatttactgtcttaaagttctgaaagccagaaatttgaaatcaaggtggttgacagagttattccttctgagagctatgaggaaagaatctgttcagaggcctccaactctttgcgaccccatggactgcagcaccccaggcttccctgtccatcaccaactcctggaactcgctcaaactcacaccgatcaagtcggtgatgccatccaaccatctcatcctctgtcgtcctcttctcttcccaccttcaatctttcccagcatcagggtcttttccagtgagtcagttcctcccatcaggtggccaaagtattagagtttcagcttcagatcagtccttccaatgaatattcaggactggtttcaagacagtttaacttgattacctctataaagatcctatctccaaataaggtgacattctgaagtaccagatgttacaactgcaacacattctttttctttaaagtgtttatgtgtctactaagtctcttcagtcacgtccgactctttgagaccctatggtctgtagcccactgggttcctgtgtccattggattctccaggcaagaatactggagtgggttgccatgccctcctccaggggatcttcctaacctaggaatcaaacacatgtctctaagtctcctgcactggcaggccagttctataccattaccaccacctgggaagcctttatagtttttaagaaagaaaaaaagtgaagtcgttcagtcgtgtccaactctttacgaccccacggactatagcctaccaggcttctccatccataaattttccaggcaagggtactggagtgggttgccatttccttctccttatagtttttaggagggtacatttcaatccataacacaaagtcctaaagtaacacatggggaagacagcatagaaaagaaaaacttacactgaatttcaagtgtcattgtcaagaaatccattgactctgttacaagctctgattccttccttctgtccaatccctaccatgtttctggggccggctcatcatcctgggtggtaacactattatgcacatctcttacatcctgtgatgggtaattttatgtgtcaaattgactggaccacaggttacccagataattggtcaaacattattctgagtgtttctgtaatgtttggggatgaggttactatttaaatcagtagactgagtaaagcaggtttctttccataatgtgagtgggtcccacccaatcagttgagaacctgaaaagaacacaaggctagccctcccctgccttctcctgcctggcggccttaaaacaggaatgtcagctcttcctttttatatagcagcttcctgctttaagatgcaaactaggacactggctctgagagtaggtacacacacactcacacacacacacacacacactcacacacacacacactcacacacacacacacacacacaaactagagattctgtttctctggggaagtctaatacattccctaagaccgacctataaagaaaaatcacaaatgacataattatcccttcacattgcaccctatctgccacaaagccagccctttatcttactaaacgcaata

SEQ ID NO: 62937 - DNA, 1068 bp, Bovine  19866880940548
  misc_feature (1)..(1): n is a, c, g, or t
nctatccttttgattattttcttgttaagctaaaggtatttctcatatatcttggtagacaactgctttttttgttttattaaaacatgagtcactaataatattgatcattggatacatgtatatatatgggtgagtcccttctcttttcatttgaaacaagcacaacattgttaatcagatatacccaatacaaaataaaaagtttaagaaaaaataaatattgaacatttatgtgtaaaatactgcatcagactctacatgagtatgtcagttaattctcctgtaaccatatgaggtagaatattataaccattttgaagttcagtttgtttgtaatattgggaaaattatttcttttaaaaaaatattttctacctagcttaattcagttctttggtgattatagtagccatttaataaatattttttttatttagaaacattcagtaaattcttcatgactgaagtgaacttagaaatgggctttattttgtaattagaagtatttaatgttgaaatgaactaaaaatacttctgagatgtagcctaagaatttcaagagttgaagggtaccttttgttctcactgacttatttctgaactaaattcagtgttatagggtttgtgttgtggcttttaaataaatctgaattcttcgattaatatttttgcactgtatggctgtgactctgattgctagagataaatgtctttttctgtcctacgcctaagtgtttgaattcattgtattttactttgaaggaagtcattgtcattttagaacagaacattagctaatgtgttttttttttccaggttaatagcaacgaacttacaaatggggtaataaatgctgccttcatgctcctgttcaaagatgccattagactgtttgcagcatacaatgaaggaattattaacctgttgggtaaatatttctatcatttaataacgctttatttcttatcttgtgtcattgataaataatattggcttagttattacttaaagctgccttaaaattcattgagatatagttattcattgaacagtttggagaaaaga

SEQ ID NO: 62938 - DNA, 844 bp, Bovine  19866880955968
  misc_feature (1)..(1): n is a, c, g, or t
ntggagagaaattagggaggctgctggggtgagagagagacctccaaaacaagtaagcagctagattctgtggccaaaaagctgttttctagaaaatgcatatgttttgttatattcattttacagatcatgtggaggtggcataaaatagatgcgtgttacaataggaagatcactcttataaaggaatcttgtgatgaatcattttattgtgttacagacattttctgctttcctatctagattttttaagcctggggggagaaggggtgcctgacttactggcagtgcatttggaaaatatggttggtcagttgcttattctctacctgtctgtctttctctgcgagctttcccagtggctcagcgatagggatctgcctgcaatgcaggagacctgggtcagaaagatcccctggaggaggaaatggcaactcactccagtgttcttgcctggagaatcccatggtcagagaaaccctgtgggctacagtctatggggtcgcaaagagttggacacaactgaagtaacttagcaacagcatcagctgtccttgtctactagcttatggatttggatttctttttctttcttaaagtaaaagttcctggaaggaaaaaagtatcgctttttgttgatcaggttcttattcctattaatatttattaaacacgtgctgttgatgttaatctgtgttacgaaagactctaagaaactgtgccctcaccttctcttatttgtaactgccagacttgctgcgcaaagagccaaatatataaaagataagaggaagaaacacagtgttacaagagggctcggatgcccaggtaaggggacatatta

SEQ ID NO: 62939 - DNA, 951 bp, Bovine  19866881107853
  misc_feature (1)..(1): n is a, c, g, or t
ntctttgaagtgaatgtgaggctgaaatttgaaattgtaccttactaaacttccactgggcttcccacgtggcgttagcggtaaagaacccacctgccaatgcaggtagacgtaaaagacaagggtttgattcctgggttgggaagatgccctgaaggagggcttggcaacccactccagtattcttgcctggagaatccatggacagaggagcctggcgggctgcattccatagggtcacaaagggttggacacgactgaagtgacttagcatgcatgcaaacttccattactgcaaagtaggtttgaagttttgagacccacctgagatttctcaagggttttgaaaaggggacctgaccaaatataaccaaaggccccaatgagaagggagaaaatgggtatttcctgttgtattccactgaaatcagcatattccataaagtggttacaataatattagttaatagtttatgcttttctattataaggtctctgagtttgttttttttttttaataagaaaagtacaatttagaggtgaagtgtgctaatatatgttctcagtaagtatcatattaagaacgaaccagttgtttgggacatatatccatggaaacccaaactataaaattacactcaatgtcaatccatgaggcaggaagtgtgaggacaagcagttctcctattaacaaatttctcacccacctacctgaccaccaactccaggtgtggactgatcaggaaagtacagtgagactattatctaccccatccatcagatttctaataatgcagcctggagcctatgtgataagtcacttcagccatgtctgcctctttgcaaccctatggactgtgtagccttccaggatcctatgtccagggattctccaggcaagaatgctggactgggtccctccaggggaatcttcccaacccagggatcaaa

SEQ ID NO: 62940 - DNA, 1124 bp, Bovine  19866881134259
  misc_feature (1)..(1): n is a, c, g, or t
nctagccatggaggctcttgtctgttcttttcacatgccagactttgacctgtggggtctgtggacccactgttcccctctgcctgctgggttccccactttcagtccttccttataatatcacctgttgagatcttcacagtcctcagcagtatttgaaatcttgtttgcttgttcacttttgttcataaacgtcagctagaaaatgaattctatgaaggcaggcaggtgtctcactctttcaccagagttttttcagcacctagtatctggcacataataggtgctcaacaaatattcattgactgcatgatgatttgagaaattatgcagtggagaaaactgagcttagtttggcctgacatgccccaaaagttttgggttgaccaaaaagttcattcaggttacatcgtatagaaagactcaaacgaactttttggccaacccagtatttgaccacagacccctacttgccattgtagagaatactcagtatcccatggctcatttcctagcacacactttgctttctgctggtttaatatcaatattcggaagaggtaatgtttgaaactcagtggatcttcaaatccaaagttgaaaaatctcttgtaagccagcattttggtaggtctttgggagtccaggatatttttattgggagaatgttagtttaaaaagtaagttagagggcattctttctttgagatattgggttcaaaaattcaaaatagaatctcaagattgtagagttcagaggttggtgaaagggttggaggtgagagaggagtccagacaggacatagccaaatgaagggatgtggttgactagggtgaaatgagatggaggccctctaaagctttcctacttctaatggaatttttagaaacagacacctgcagttggaaacttggctattttcagcctatgtatgttttctgtgattatttcttttctgttttccctcatgttaagtaaagctgttcttgaaaataccagcctgtctcagttgtgccaaaggaaacaactttgtccacattgaacattttaaagggggaaccacacaggcttgggtgaggcatgaatttgtgatacgatgacactaagtcaggaaaacagaaat

SEQ ID NO: 62941 - DNA, 1161 bp, Bovine  19866881140684
  misc_feature (1)..(1): n is a, c, g, or t
ntatgtctacatatatcccctccttcttgagcttccttcctactccaccccattccaccccctctacgtcggtaggagcgctgagcactgagctgagctccctgtgctaacagcagcttcccattagctatctatttgatgtatgggtgggatgaattgagagagcaccattgatatatatgcctgtcccttttaaaaaggaatgttttattgtttttatttttaattacaaacatggtttatattcatgaaaatttaagaaatgcagaaaaataaaacaaagactcagctgtaatcccactaaccactcttgccatttgatgaatatttacatgaatgcgtgactagctgagtcacagttgaaggcccacaacaaccctgggacttaggtagggttattagtctcttttgatcagtgtaggagctgagatcagagaggttgaaatttgcctttagatacacagctggcaagtgatggagcctgatttgaacctggttctatatcccaatcttctcacaatactctactcgttttgatccatgggaatacccgaggtgatgccatgtcatcaaatctcagtttccagatgggaaatactccaaagcaaaaagtatgacttgaagatgttttcacagtgtgtcttgtctgtcaagttgggtcacacttcctgtaactttgtaaactcatccattgcaacagtggtgttttgattctttgcccctctgacaaccagaacagaaagcatcttccctcccatcactgggctggaggcttccttctgcttctgcccaaggcagaatgtggttagcacttactgcttaacctcttcctctgcaagttactctctgaaggagaacattttgtttagcccattttgacatcatgaacattctgtgcccctaaatatcaaccaatctctttaaaaaaaaaaaaaaaaatcagtgaatttttttttaattggagggtaattgccttacagtgttgtggtggtctcgtccatacatcagagagaatcagtcgtaattatatatgtatatcccctccctcccctacttcccacccctctaggttgttgcagtacccccagctgggctccctgtgttatatagcagctttccactagttactgtttgcttttttcgaatggcttaacaacctta

SEQ ID NO: 62942 - DNA, 710 bp, Bovine  19866881239204
  misc_feature (1)..(1): n is a, c, g, or t
nccccctccaaccccactttcccagtcatctccaaagtgcagacagctctcctgctaattcgggtcaatgaataatggagtgctggataccggagactgaattcttttgctgattcaaagaaccagcattcctttatttgggctcaacccagattccactcaaaatgtcgctttattcggcaaaaatctggcacgccattttctttccgagccaaagaatttgggggcagttttctaaagagatcacctgtttgtctttttcatggtgagttcagcatatatatttttaaaaaatgaaaaaggaaaaatggaaggattttcacaaagtgctcagtgcaaggtaattgtcaacacgtagttctagcactgatgattaaagagctcctgagtttattatgtgtcgtgggacattgtttcagcctgtgttagaatactgtgcacagatgtgtaatttacatttacatagaatttataaatctgtgttataaatcatgcactgtgtcaggaacatgtcatcatggatctagaacatttttcattaatttggataagcagtattccagttctgaagccagcatttggaatgagcactgcaggccccaggcagtacccggtgttacccttggtagagggcagcgtgtcccacttcctgtgggtgggcatgtccacatgctgcagcatatttgacctcatcacgcagagcagctgtg

SEQ ID NO: 62943 - DNA, 1688 bp, Bovine  19866881266786
  misc_feature (1)..(1): n is a, c, g, or t
nccatgtgcggtggagcaactatgcctgagcctgtgctccacagcccggcgctgctgctactgaagtcggcacgttctggagcctgtctccacgaccagagaagccacgacagtgagaagcttacaggccacaaccagaggagagccccagcagcgacgaagacccggcacagccaaaatgaatacataaaattaattcaaacattttaacagtgaagcaggtcacttcatgattgatttcatcacggcagtcagatttagtcacactagcggccaaattgattggacaaccaccgtccgtccagttctttcaatcatctatgttactactactactaagttgcttcagtagtgtccgactctgtgcaaccccatagacggaagcccaccaggctcccctgtccctgggattctccaggcaagaacactggagtgggttgccatttccttcagtgcctggaagtggaaagtgaaagtgaagtcgctcagtcgtgttaggcaatctaaatcaggaaaaatagcacaataggataataaagaacaatgggacccaatgtttttaggcatatttccaaagttactgtaaaccatgattttaaatgttcagataagttgattgcatataatcattgctaaaaaaaaatgtgaaatgctttgtggcagcacttctttaatacagggaaaaaaatcttttttttttttagaatgctctaaggttcattgacaagggcagctatcgagagatctgggagaatgactggctcaaaaaagaggtaagtggaattttaaaaaaggaaaacaatttcttctttctcatttttctgaaccggaaatgacttttatttatgagctgaagtcatggggaaatcatggatatgtgagtcaccgaggtaaagtgaaattcaagtggagccctaatattattacaagctgtcactcaatgaacaccgtatatgttttcaataataaccagaagtcaattttggtgtcacaattttcatacaatacactcaagtgtctaaaacttcttgatattctaaaactgacccggccttcctctgaaccctatttgctcccaactgatggaagcaaggctgaaggatcattctaacctcattctctccggttttaaattgtctcttcaggtattcaaactggtatggaagaggtaaaactgtcattatatgcagatgacatgacactgtatatagaaaaccctaaagactacacacagaaactgctagaattgatagactaattcaacaaggtagcgggatacaagaattaacacacagggatttctttacactaacaatgttgtatttctttacaacaatgttgtatttctttataacaaagttgtatttctttacactagcaatgaaatatcagaaagggaacgcaaacagtcaatgtcttttagaatcacatttttaaaatagctcataggaataaacttcataaaggaggtggaagacatgctgagaactacaaaacattgataaaggaaactgaagatgattcagagaaatggaaagatgtcctatatgctcttggattagaagaattaatattgttaaaatggccatagtacccaaagcaatctacaaacttaatgccatccctatcaacttacccatgacatttttcacaaaactggaacaaataatcctaaaattatataagag

SEQ ID NO: 62944 - DNA, 952 bp, Bovine  19866881317686
  misc_feature (1)..(1): n is a, c, g, or t
ncaaaccagaaacctcctacagttttgaaatgttgataactaactcaaccatttttaaatgttatgcagatcaaacaagcaacttacacagtctgagttcagttgctgcccaccacttaataacctttgatctttgtgtatttggtgtgtttaatcttagcttccaatttttcacaaaaaactacaaattacgttcagtaaaaacaaatgcagctagaatatcaggaagtgttagagggaagagacatacaattagtatggaaacaaaaatagatatggtaaaaaattgaaaatgacaaatgtatgtatttataggataaattgttcatcaataatgacatttctgaagaacaaagatctggtcattcaatcatgcctatactgatgccatcagcaataatgagcaaaaggaatggaaagttattgttaggatgaaagactttaataagcgtgcaaccagaaaacagacattaatgccaaatgcctaaataaagttaattctggataaagaccggcatttctttgggaacttaaagactgaacatgataaaaacgctgctgtgagaacttctgacacagccagataattccgtagttcaagggcattccagctcccaagtttcccacttgcagttgtcaacagggaggtggattacttctcctggcacatattcaacatagaggaaactggtatataagaaaagatcacttatagacagactgttagaaggtaggagaaaaaagcatgtttgctttgtggttttaaagactgatttttttttttaaagcaaacactgtaaatatttaaaaatccaaatagttttaaaagatatacagtagaaaaaaagtcttcattttgccctaaatccccagttctcctacctagttcagttcagttcagtcgctcagttgtgtcctacttctttgcgactccagaatcacagcacgccag

SEQ ID NO: 62945 - DNA, 622 bp, Bovine  19866881353995
  misc_feature (1)..(1): n is a, c, g, or t
nctaattacccctgatgagtggctctctcattcatttggttccaggcacttagctgtctcttgcatttgcttccactgatcagggtccctgaggtttgcacatatgttttcccagtgaacttttgtcctctctgaaaagtgcattctgctctctttttatcagattccagctttcatgactaatatgcggtgataactccagaactgtttacacgacaaattaaagtgggcagaatcttccgcttacaaattgcttcaagacagggctcagatgtctgcccatagaatcatcttctacacgctagcataaaatggatctgagcttgtacagcttcagctggcccttgacttagaggcctgttgtttctcgacagggatctgcgctcccagtctgttcctcaaactgaggctacagagattttatgacgcacttggaaaaaaatatgcgggctacttctccaacctgctttggaaaaacaggatgtttctctctcacaatcttgcacatacctgtaaacaagcgactcattggcaaggcctctgagtcagaggtatagcagtttcagactctcgggtttgatgatatttgctggataaatcagaagttcggtcagaacagagc

SEQ ID NO: 62946 - DNA, 701 bp, Bovine  19866881372169
  misc_feature (1)..(1): n is a, c, g, or t
ntgacagagagacaatagaaaagtctgtaacatacacactgcgggggtggcatgctctccccactcttctgctttacaaagattgccagggttcctaattcctagcccctctgcagtccccatgattcctgcccgtttgcagtgtgatcctcccagttcccattactctgtgagcttcctagtagccttccagtaactcccttaagttagctcgttagtatctgtggtcttgtctgcttgttgtggtttagtcgctaagtcgtgtcccactcttcagcgaccccatggactgtagcccaccaggctcctctatccatgggatttctcaggcaagaatcctggagtgggttaccatgccctcctccaggggctcttcctaaccgagggattgaactcgtctcctacactggcaggcagattctttaccattgggtcacctgggaagcctgtctgcttacaagtttgtaaaacagttaatattagactagagagtgtagtaaaacaggccatccatcctctcatcccattttcagagaataaacttgaggattaaagagaaacacttaaatcctagctttaactagacagaggggcttaaacagagccatgtgcaggcaatgtgacggtcctttgaaatgaaaaccagaaaaagaaaggggcaaatgtcaataggaagattagaggcttctaatgcagattag

SEQ ID NO: 62947 - DNA, 1666 bp, Bovine  19866881411183
  misc_feature (1)..(1): n is a, c, g, or t
ncgcttgcactccagctgccagccattcaggagagcaactgtctggcctcctttccagcttccataaggggaagacatgctctgcctcccatgagacccatgtttcctgcagtgccaattcccccagacatagaaagtgggctcagatgctaggcagccaataaaaaatggaacccctgacaaatgctctatactagaattcttaaaagtcccatccaactcaggatgtgggggaagtgaggatgtgcacatactgagtcacgtctgactcttcaagaccccatggactgtagcctgccaggctcctctgtccgtgggattttccaggcaagaataccggagtgggttgccatgccccctcctccaggagatcttcccgatcccggatcaaagtcaagtcacctgcgtctcctgcattggcaggccagttctttgccagttctttactgagccacttgggaagccctggttcaaaattggaaagctaaagctaagaggtcatgatttactgagtagcaacagtgacttgagactttatttaccaggaactgttcgaggcactgggtacaaagatgactaagacacagatgctggcctcaaggtgctcctgtcgggtagggaagaaagataaacaaaatactaaaataaaatgtgataaggagaggccataactgatagactacaaagcagaaagggaacccaagagtaaaggattaaagctggggcctgtggggggtggtcagaaacgctttcacagagaagacgggccaaaggaaggaaggggagaggaggaaagagcattcgaggcaaagccacgtctggtatgatttaatcttctttgtcggccaaaatctggtcctggcatttcctggctcagttcttcccactgccaccaaccacagcacacatgctacgatgattaaggtctaaaattagtatcagtaccggccgagtgttattagagcactgttagaaccacattttgcttctgctggtctccccccaagctccagtgcataacgctgttggcacacgcttactgctgctgccgttgtccttagatgcaaccaactgcatgctcagtcaggcctgggctttaaataatcagccagccgttgactaattgtaaggcctctccacgcctcgatttcctggaaagtaaaatgggaatcaggcttacttgcctccctaagtctggatgggaggggagtttgggatacgtgtatacgtatggctgagtcccttccctgttcacttgaaactacacaatatttgtttattaattggctatacctcaaaagaaaagttaaaaagaaaaaaaaaaacttgccttccaaataaacaaactcatagaaaaagagatcagatggtgggttaccagaggagagaggaggagagaaggaaattggaggacagtgggccaaaggtacaggctttcagttataaataagtactggggtgatataacatatggcaagagcttttaaaaatatttattgatttatttggcttcccgggtctcagttgcagcatgaagaatctttagttggggcacgtggtttctagttccctgtcaaggatcaaaactgggccccttcattgggactgtggagtcagcctctggaccaccagggaagtcccacaacatattaatatatctaaaaca

SEQ ID NO: 62948 - DNA, 1124 bp, Bovine  19866881493252
  misc_feature (1)..(1): n is a, c, g, or t
nactgaagcgacttagcagcagcagcagcagccccatcagaggatttgtgaggagctggtcacatttagctatctctgtttcactattttgggcttcccaggtggtgctagtggtaaagaacccacctgccaatgcaggagacctaaagagacgtgagtttgatccctgggttaggaaaatcccctggaggagggcatggccatccattccagtatatttagggcttgatctgtgaatcaaagtctttgaagaaagctcatccttgaagaaacaactagtatgggccctggaatggggaagctttccttctatgtccacagtgactgctaaaagccaagggataattttttcttgctggaaatgtgattaatcagttaaggcctggaacactggcctctttcatcactcaaatgcccaggatgttaatcacccagagtcatccaatttccatggccaacctggcatatagtcaagatttaaaaggaaaaattctaaacatggcctgttagtactggagaactttcccttttttataagatctattagtgaagttctcctgccttgggatatgtgctaattagtcataaaccaaagagataatccttgttaaggtagcactagctgctacaacacatagactccagaatattagtagcttagcaaagtgtaaatgtgcttcttgctcacttacattcgaagaggttttccatcttagtggttggttctgttccaagtagcaattaaagatcccaggattcctccagcttggaactcctccatattcaatatgtgggctccaagatcatggacttgggagaaaaagcacagaggatggcagttaggtgtttttatagacggggcccacaagtagttcatatcacttctattagcattccattggctagagctgggtcttatggccacactaacttcaaggtgcctgggagatgtaataaaactctgtgcccaggaggaagaggaaaaaggttttccgtagtccctgaaatcactacatgtcagtgatctaaaaataggtgatttgcaaaatatttggaaaccttccaaggcatgtggtcctatatagcctagtttgtgaacatagtgatataatatatagagtaag

SEQ ID NO: 62949 - DNA, 2114 bp, Bovine  19866881503065
  misc_feature (1)..(1): n is a, c, g, or t
ntttcagtgctcacgaataagttatctacaattgtcatcataaagatttctcccaaagggatttaagagctttctcttctgtcttctattagcaaccagtacatggaaagctgtagtctttcccattgctgcctgttgatttgtaagtcttttctgctgtactgaccattctgtgagatcaaggatcagtcatttatttccatatcccttgtgtctagcacaggatttgtacctgtagattagtatttattgaggcaaaatattaggaggacactgtgctaattcacttcagttgtgtctaactctgtgtgaccctaccgactgcagcctgccaggctcttctctccattggatctcctaggcaagaatactggatgggttgccatttcctcctccaggagatcttcttgacccagggatcaaacccaagtctctttcatctcgctggattggcaggtgggttctttaccactagcgccacctgggaagccctatttaggaggacccatatggggtcgcacagagtagaacacaactgaaacgacttagcagcagcagcatgctaattctactgccagaatatttctgtaaagtgttcattccgtgtttatcttcctgaagtagcagtctaaaaagatttcatttgtctaccgtcaatttatttttatttgtgtgtttattatttgcagctgtgttgggtctgatcgctgcactcagactttctctagctgcggtgcgcaggcttctcttggcagtggctccttttgttacaaagcccggctctagagcatgggctcagtagtggtggcacatggatttggttgccctgtggcatgtggaccaagcatgaaccggggtcccctgcattggctcacatggttaaataatctgcctgtgatgcaggagacctgtgtgatatccctgggttgggaagatcccctggagaagaaaattgcaactcactccagtattcctacctggagaagcccatggacagaagaagcctggcaggctacagtccatggggtcgcaaaaagtcagacatgactgagtgactaatgctttcactgcattggtgggtggattcttaaccactggaccacaagggaagaatagtctaccttcagtttaaataaaagtgcagccttaacaaaactgaacctgttataccaaatttccttttgtcttcctttgctctagccacttcctcctggtcaaaatcatctctttttgtgtcataatcccatctttttttttttttttaattggtgatagtctttttctgaaaatttgcattattgcaagttccccagaaagctgtgagtgttatcgataacaaaggagacccatccttccctctgccttcttcctacagccgtttgagtcagcagggtttcttggaatcttagcacaaggtcagtacatggcctctctccctgaaggttacagccatgctagagttagacaagggattagaatatcccaggcacacatccaggcattattgtaaagaatgaagtgctctgtgagctcagatttgaggaggggatttggcttggagaagactcttgagagtcccttggactgcaggaaatcaaaccagtcaatcctaaaggaaatcagtcccgaatattcattggaaggactgatgctgaagctgaagctccagtactttggccacctgatgccaagaactgactcatcagaaaagaccctgatgctgggaaagattgaaggcaggaggagaaggggacgacagaggataagatggttggatggcatcaccgacttgatggacatgagtttgagtaaactccaggagtttgtgatggacagggaggactggcatgctgcaatccatggggtcgtcaagagtgagacacgactgagtgactgaactgtgtgtggctatctaacatattcatgaaatcatgctcttgacaggcttcacagagctctgaggcctatcctttcatgtagcagagagaagctgcccagttcagtggaaagagtgttgactttagagtcaggacttgactttgagcctggttttaccactacctggctggctattcttatggcaaatcaccaatatgcgatcactttgcaataca

SEQ ID NO: 62950 - DNA, 1205 bp, Bovine  19866881595289
  misc_feature (1)..(1): n is a, c, g, or t
ntacttgcatttgtttctctgtcagactgtcgtgcctacatccttgcccccagtccagccccccattctccatcccatacacttcagctcggatttcaggaataatgaacttcgcttatatcttcaatcccctccagcccattctctccagctccatcatagtaacagacctaccgccagcatgagctgactgcttctcccaaatccttctcatgctcctttcggactcctcaagcttccaagtcaggccaaaggtagggagacttttatttcccagggtcactgttagaactctcccatcatcttatttaaacaaatagtttccacagcaacaaaacccatttcttggtgccttttctaagagttgtgctatttagagagactgacctttcctcctttttgtcattgtcatttaccatctttcattcattgaggactttggcaccagcttatagactttctccacccttggatgacttcagaatcaaagggctgattcccccagcacccagacctcctccaactggaatactctccttttgcaatccagctcagctactactgcagtcacaccccagaccttggcatagtgtggaatttgtctgtgtgaatcattgaaatcacagaagtcagtgagcctaacaacattctctgaccagagatgctgcttgctcagccttgccctctgaactcaccagtctccagcctcctctgccctctacctctcctgcccggtgacctagtccagtccagcttccagcccagggtcatcattcctgctcatcccgacagtaccctcatcttttgcctctatgtcttttcactgctgggcttccccggtggctcagtggtaaagaatccacctgccaatgccaggtgatgcaggagatgccactttgatccctgggtcaggaagatcccctggagaaaagaatggcaacccattccagtgttcttgcctcggaagtcccatggacagaggaacctggcaggcttcaggccctggggttgcaaagagtcagatgcaactgaagcgacctagcacacgtgcacagatgctgcgggggcccctctgcctacaggcggtcccccacccgcgccgatcggctctggcacccattctctccgtctttgaggaatccaccccaatagcatctaaatatgttcacggtctctccactctaaaatccccttgcagccagagg

SEQ ID NO: 62951 - DNA, 888 bp, Bovine  19866881606096
  misc_feature (1)..(1): n is a, c, g, or t
ntggaaggaatccagtgtggtctgtcaaggcacagtatagaactatgaccttggaccacataaaaacacaaacagttattaggcagcattctgggaggtctctggaggatgtgatgaagcctgagggtcaaacttagttcacttaatatctaccctagtgatcttggaacgtgggatcttcatccctttttaatgaaattcaatgaagataacaaaatggctggagttacagtcaccagaaaggacggaagaaatgttgacaggaaacgtttcccattaaacgtggggggaggaggaagcaaggaatgcaaaacagatagtcactaagatacagaggtctggatggagccgccatgatttaagaggcctgcaatagacagaagggcagaggggaaattatattgaaggcgaaatgtggtcgctggcctgagcgctgtttcccagatgtgcagaatcccagatgtcacagacttccatgctttgggggcacagctggagggaggaccctggtcaacactgagctggtctcccgggtccgggagctcttggagtagtttgggagacgccgaggcagagcggcaggggggaaggtggggagggcagtagagaagggatgaatgtgtgtcctgaagagcagctgcacttcctcttaacttgcccatccaccctctctactgttaagttgttctgggctggcccaaagtgtcagtggcccctgagtttctccctgaagactctctcaaggacctcccatatggtcctgaagtcattgcacatggcaggttggttggtaatgactgggttacttgactctccttctccaacctgtgaactccagttgacgaagggcacttgaggcaaacacacgttaggagaccatctgcagaa

SEQ ID NO: 62952 - DNA, 1170 bp, Bovine  19866881689193
  misc_feature (1)..(1): n is a, c, g, or t
ntagagactaacattaaaccagcatccaggggtccccccccttcaggatctaatgtccgatgacctgaggtagagctggcgtactaataatagaaataaagggcacaataaatgtaagacacttgaatcatccccaaaccatccccttccccaggctgtgtgttccatgaaactggttcctggtgacacaaaggtcggggactgctgtgcctatatcgcagggattgggacttaggaaggagaggttttgtatgaaaagaaaaaggaataggaaagaacagatcaggaaggttgtgtctaaggtgctggagatgaagcaagactcaggcagggagccccagtgtagcatcagcattgtccagaaggttacaggaggggaacaactgaaaaagctaaagagacaagggtaaagtgagtggtaaaagatggacttctccagctggacacaacttctcatatgagctcctgtcctgtactgaaaactttaggagggaaatgaactatggttttttctgccctgtgtctcccatggcgccaagcatggtatcttcaggccttgagcagagagagcacttagagactatcttctgattagactccattcagcaagcgttgattaagctccatctttatggttggccaccataaatacatggaagatccaaatggaataagatagtttactcatggtccccgaccttaaggagtttacaacccacctgaagagaggaacagctctaaggtgatataaaccaattagtaaagcatggtatggattgactggtttactttgaacacatagaggtaattcattatgtaggaagtatctccactgaattgttggttcttgatctaaatcttgagaataggattttgattcaagtgggaaggtgacccagcacagtccctggcataaagatttattgtgtgagttctaaacaggaggacctgcataagcaagagacgtgattgggacaaacgagaatcacacagactcttagggctgggaatatacgagacacttcttccctcttgacaaaaaccccacatttctttccagttctttcttcccccaaatggccgtgtgctttgcgaagtcttggtcctccgcaaccccaaggagtgggagctaattaatccctagccagtcacagagaagttccctcccca

SEQ ID NO: 62953 - DNA, 851 bp, Bovine  19866881725229
  misc_feature (1)..(1): n is a, c, g, or t
naacctgcgcttcattaagtcctgagaacaggtgtgtgatctcaatcaaaagactgtgggttcaagtcctcatccggattttgactgggttcaagccccagcacatgggttgaagtctcaaatctgagttgcacggtttcaccagggcacaggcttctgtcctctgctaccctccaatcaccttgatgtgctcaacaccctagaagttccatcatttagggttttttatggtggtttcattatgtaggcatgatggattaaatcattggccactggtaattaaattctatctccagcccctttacccttccaggagttgggaataaaaattctatcctgccgatcaaggtttggtctttctggacaccacccccatcctgaagctatcgagaggcttgccaagaatggcctcattaaaagacattcctattacccttatcactcaggaaattctaaaggtcttaggcactatgccaagaactgcggataaaaaaaaatatccttccatgataccacagtgtgggaattaatttaagggcgtaaatttaagggtatatacagtgaataagtagtttgtaattatgatgccaacaatggtttcaaagtttcaaaggtaataacaagtcattaggttacacttgtgtttcatcgcaatttattttccactaactttttcgctagggaaattaatgacatcactcattaattatagcactcccctccccacttcatctagccccaatgccatcttactctgagtcatttatttgataattagatgttacagacactcatgagaatgtgtggctgaattaaacattctagcactgtgatagcctttctaggaaaag

SEQ ID NO: 62954 - DNA, 1326 bp, Bovine  19866880351862
  misc_feature (1)..(1): n is a, c, g, or t
ntagaagtgcagtatgtgtgaaccactttgaaaaatgcagactgctcccgcagcacgattgtcgctatttgtgtacgtagagaacacaaagaaggtgaggcggtgagaagaggggaagccttcaagcagcagagcccagatgtgcttgtccaccttgcttggcgggctgctgctccagggcgggaagctagagtgaagatgctttatcgaagttcaacattttctcgttagttcttcacttctgtttttacaaaatgacaacagcaagtagttttgctagagtagttggtgctcctcaacctcttaataagtatttacgtggcatcccctgtgagccaggctctgaacagtgccattttctctcggcctgctttcagtcactgtgtcattctgcagagggtctgagcagttttcagctcccctgggtcttctggttctacatctgaggctcttcccacaacaaaagagctatgagaagtgggacttggtgtcatgtttatatttgcataggaacgtgcattgcgagctgtatttgctggattattggcttcattttattttttttttcataaggaaggttttattttataaatagacttcagttagacacatttaaattttaaaagggaaatgacatgaacataatcatagaagctgaaatgcatagttctttttctgggtatagttagaaaatcagtttatgtaaatggtatgagagacagtacttccatgtgaaaatctgccacatgaaatggtcacatcctgagggaagagcacagtggcccaatttatggcccatgttcacagagagaactctgtgatatgcatttttattttaacttcggttctggtgctattttatgttcctacccttgttttccatcttctcctttatccgttttagatttgtgctgtgtttttttttttttttttgtattgctgtaagcctctttaaaccctttctgctacaaatcagggatatataaacagatagatttttttcttttttaaacaggaatcgacttaaagcctccagagaagtggaatctgtagaccttcctaattgccacctgattaaaggaatcggtgagtctgagaaaatgcttgttacacagctcacattgtttggccactaacactaaaaaattcactaagagtattttggcacataattactgtttatcagaggaaaaatcacattagatcagcaaaaccttttcatctcttttgatctcatgtaccctgtatttcttctctcttactctcactgtgatttattaatgatttgttcaaccctatgtgtgttgttagatttcttgcttgttt

SEQ ID NO: 62955 - DNA, 1953 bp, Bovine  19866880381074
  misc_feature (1)..(1): n is a, c, g, or t
naatacacgctttggggggataatcatttcgtctccttcttcatggaacatgccctgacctgactggctttggttctagaagtcactgggctcttcggggctctggagctcagctgcagccatgaacctgcatgtggttgttaagctcactttggagggtgcgaggtcatccctgaggggtctgatggggtcagggtgtaggggaaggcagtgggacctcagagctggagttccagcaagctgcctgcagtgtcacaggcagtccccgcaaccttatttacacacaggcttgcaacctcctctagaagcttccagaaaaaaatgggagatgctgaagaactcaagaaatcttaaatcacagatgcgataagaattatagaaatatagtttatactgtaaacaagacctcatgtaaccagtctggtgtggcctaggaaaacctggattggatagataggtaggtaggtgaattaaaacacaaaaatagggaaaacgaatttggtaacatcaagcaatgtaacatactgacactttataatatatttaatagcataaaatattgttattgcactttaaaatattctaaatcaagtatataagtttcatgttcctctgagctgaaaacagacctgagaaaaaagtagaatggctttttaaagggttaataattcccaggtgaggaatgtgttttaattcagaattcctcaagaaaaaccagccttctctgtagattttacaaataacagccaatgctggctaatatttctaacctgtagtcagttttctgttgatgaaaaatcagaatcagggattattactttcacaaagaatgtttagacatcccagtgacatgatcactatataaaataaaattcaaattatctgagtttaaacactgactttgacagttagtaaaatcatttaattttctgctatggaaactattttaataattttaaccacttcttagattatatcaattctttgagatgaagtacgacggagaatgaaaataatctttgtaaattgagctccattgcaaaaaaaaaatgatttccattcttcagtagaaatattaacggataacctttcgagtgcctttccttgtatttctcttctgcctctgcatcccctgctttctacagctcaaagaaagcctagctcatgaaaacagattctacttaatgatccccttccctctgccttctcccattctctttcattcacattcccaactttgcatctctgttctcattttccctttttctttccggggaatgaccacctcaaaggattaattcagaacatgcagcagaaaatggtaacaagagtgggcaaatcaggatgtggatttaaaatcaagaggtattttaaaggaggagagttactcaaattaaacatatgttaagaatatgggtttgttgttcatggcatacctgctgcctgtcatcccaccctcatcggatcagccttcaagggcaaagcattccctagtggaataataaatagagcggctggagtggatatgaatctgagcagcccagcaagctgcctgtcctcttggtctgacttcactgttggaacacaggtggtcactgaaccagatcagctagtgaaatggatcgtggcccctcaggctcactgccagagagagagagggaacacaattcaggctccaagtaatcaggctttgggaataaaaaattctaatacaggtcttactgagcttttataccaaactgttttaactgacactgcctgttttccaaggcatcatctttcctactttgatgcaagtgaactaggcaaaaatccactggtcttttttaaaaaatatgctggtaagatgcttaacagctgacctgccatcaatcaaggggtgtggcaaatttattctatagataaaaacacaaagagttgccctatttctgcactttcattcttcccaatgta

SEQ ID NO: 62956 - DNA, 714 bp, Bovine  19866880414231
  misc_feature (1)..(1): n is a, c, g, or t
ntgtcccccctcccccccccacccctgccaaggaaacactaaaagtagacacaccatccccttgtgttaaagggaaataggaatatgacatatctcagtacttaggcagaagttcatgtttgatggttttcagatgcaaaagtgacttttcttcttcttgaaatttaaacaactcaaccgtggacttaacgtctggatggctcaccaccagcaggtacacagtattatctgagaagagattaaaaacaaaaatcgaaacattaaccgagctctcagctgtcagctctgtctctaaaaagcaatttctacccacctccaaccagtacttaggatgtcaggcagatggaatattttcatctctttgtagagagaagcatttgtgattgctccagagaaaaatggctaaaggaagacctagtgacagtctaaaaaccaccagactccacagggggaaaaaaagtcctcaacttaggagtgagcagcccttgacactaaaactccaaagagcttattaagctttctgctgcaaatggtctcagcaagatgcagcactgagataaaagagataaaagatgagaagaatatcaataagagaaggtgtgctcaggtgtaatttacacagtgtgagatgataaattccataaaaagagcacctgagagataatatcaaagggatttagcttccagggagtcggtgcaactctgcggcatgaa

SEQ ID NO: 62957 - DNA, 1581 bp, Bovine  19866880432492
  misc_feature (1)..(1): n is a, c, g, or t
nggagtagataggatagtagatactgctgtatgatacgttacatccagcagagattttactgacctccattcaggcccctctttatgccaacaacacaatagaagcccagaggtgaagtgcagcttttctgcctgtcagacctggaatacagactcttttttttttttattaaatttttagaccatttaataagcatactataatagaaaagccatcctttctttttcttaatttctttcactattatttctaaagaaattgtgatgtatgttcttttcctcttgtaaaatatttttttaaaactcctttattgaagcatagttgatttataatgtttgccaatctctgctgtacagctcaggtatacacaaacacacattcttttttatattcttttccattatgatttatcacaggatctgcaatatagttccctgtgctaatcattaggaccttgttgtttatccattctaaatgtaatcatttgcatctaccaatcccaaactcccagtccatccctctccctcccgctctccccccttggcagctagaagtcggatctctgtgtctgtggatttgtttctgttttgtagacaggttcctttgtgccatactttaggttccacatgaagtggtatcatacggcatttgtcgttctctttctgaccgacttcactgggtgtgatcatctcggcgatgatgagtgtgatcaacacgtgaggccacacgtgttgctgcagatggcggtgtttcactcttttcagtgatggagcaggagtcattgtgtgtgtggatcacatcttctctctccattcctctggtgatggatgtttagttgttcccatgtcttggctatttgaataacgctgctctgaacataggggtgcatgcatctttttgaattatagttttgcccaaatattttcccaggagtgggattgctggatcatgtggtgaattctatttgtagttttctgaggaacctccttattgttttccatggcggctgcacctacttacatttccaccaacagggtaggaatggaatctgggactcttagttcccaactaaatgcctttctgctatatcgtgtgtctttcctattatctcaatccaacaaatagcttatttttaattctctggtttgttgtggtggtgtagaaatagcccacatcttgtacaaaaaccagatgccacatatatttttggtagctttctaagaaggaaactttgtatagtgtggtagtgctatgtgtatagagatcagacctgcttccctacttttattttaagggaaaaaagaatatattttgaagacttagaagctaagtgctgtttcacactataaggctgggagaccgaggcaaaaaaaaatctctaacaattattttccagcaaagtaaaacataattgtgtccccctctgacctcctggcatcttgcttctcttggtgccattatgctttgattgatgccatcgtttatttgtccttgacagtgagcataatgttttgccttcagagatctctgctgttatatatgcagtcttgaggaagcagaggtagaatgacaaggaacgg

SEQ ID NO: 62958 - DNA, 1437 bp, Bovine  19866880478611
  misc_feature (1)..(1): n is a, c, g, or t
nattttataaaaattagtgctgcctttgcatacaggataatctggagaggagacaggcaattttacagctctgtaaaagtgcctttgaaagtcaaaacatttttaagtctttgtagagctaaactgaagaactcccaacaaaacattttctttctttcctctcaaaggaatgctgacatggcaagaaaaatagtttcaccatgtgtttgtactttcttttataaggagtataaaagaattgctatactcttttaatctgagcagctcagtctacagaaactttaacttctatctagaaattttactgtgggaagctttcctctcgacatgcatactagatattttttcttgatgccttaataattcatctccagtttggtgatttttatcttaacatggagaaattgatgagggctccctgcctacgaattcaaataactaaaagttgaaagctaaaatctttaagattagaggaactatggttatttagtgaagactagagaataacttaaaagtttcccctcagtggacatagttgtatcttattacatagcttttaatctcttactaaggataagcaagaataaacacatttgttttgaaatatggtttcaaggggagcccagaaagaattttttatacagtggagcagatattaaggaacgtgatagactttcctagaagagttttgctaaggttatggaggtccactttgagtttaggcaagacccaaacatgttaaaggcagagttggcagaggtctagggaaattaggatcaaagaaatattaaaataaaataccttttgacttttacatttaaaagagaaacaaatttcagggaatgaatggcagtctaacaaggtggacattataaaaacatgttctgcagggttaatccgggtgtaataaaccagttaaggagcatggaacctcaataaagaaagatgtgattatgaaattttgagtataggatgttttctttcactcagatttgttttctagctcagttcccacccatattaaaaattgtattagaaatacatttttattcctaaataaattagaaatatatttttaaaagataattgtttaaaaaaatactacaagtgcattgactttaacttttgttaagcactgggttccatgttgccctggctggaactcttctatcagaatggtgaaggtcttcctccattctatgagtttccagggtcagctataagaaaagacaacaatctgggtggcttaagcaataaaaattgattgtctcgtagatctgaaggctggaagttcaaaatcaaggtgtcagaaaagttggttctttctgaggaaggtgagggtaagtctgttccatgctagtctggtcctagcttctcgtagccttgggggtttcttggcttatagatgcatgatcgctgtatcttcagattatcttc

SEQ ID NO: 62959 - DNA, 1786 bp, Bovine  19866880553420
  misc_feature (1)..(1): n is a, c, g, or t
ncgacttcactttcatgcattggagaaggaaatggcaacccactcccagtgttcttgcctggagaatcccagggacgggggagcctggtgggctgccgtctacggggtcacacagagtcggacatgactgaagcgacttagcagcagcagcagtgggtgtgaagtggcatctcactgtggtttgcacacacacttttgtgtactcagcacacagcttaggtctaggcacacacagtgctgagaggcacgaaaattccaagggatttgaagaaaagtcattggaatattgttgttgttcagtcactcagtcgtgtccaactccttgcaaccccatggactgcagcacgtcagggcttccttatccttcactgtctcccagggtttacccaaactcatgtccatcaagtcggtgatgccatccaaccatctcatcctctgttgtccccttctcctcctgccctcaatcttttccagcatcagggtcttttccaatgaatcggctcttcacatcaggtgaccaaagtattggagcttaagcaccagtccttccaatgaatattcaggtttgatttccgttaggattgattggaatgagtggtttctaatctcccagaaatcagattttagaatcagctgcttttctttcttaaaaaaatgcaaactgagtcaggaagtagcaagcaagctaattcaacttttgctcccggacaccccattactaatggggtgatgactttcagtaggtggttccttttagagttgagaagaatgacgtgtgtgctgtagaagagcgacttaggcataggaaaagagagctctgaaggaagaaagaccctttcccttcatctcaaagttaaatgcccaactcatgagtcactttcacaccttctccattgtcagatgcccggtgctgcatgattgcctagaagaggtgtttttgacagcaatgatctccgattacatttgtttccattaacaagagaaatatctttgagggtttcttaggtactttcagaaatatatactagctcatgagtagccagaaacatctgatctgtctgcctcacaagcctctgacagctaagcatttgattttaggcgagtgaaatgtcagccgccattaaacagcatatggcaacaatatggccattccctctccaggaccagtttctccccagaagagatggtacttgaaataagagatgcttttcaatacaaggcccctgtccctcctgcccaggcacgatagctggggagtgggcagaatgctacgcacgaaaggacccaggcagccagatcacatgtgaagccacggggcctgccgcccgaccagtggtgaccaaaggctgtttgccctgggcatctgggtctgtggttaagggaaagtaccatccttaagccggcctggattaactctatgaaataggaaacagcccccacagccacttaggggttggggccgactggaattgaatgcacttggtgtgcagtgtgggaagggagatgtggtgaatggagccccaccccactcctctctggggagttcccttggtgaatggggtgaaataggctgctttgtctctaaacagaagacgaggtgtggaaccctgcggtagtgggtcagttcacatgccagtggccgtgtggcaatacaaagagggctgcctttgcaccaggtggcctgtgggagattagaaaatcaacgagctcctcaggagcctctgggtgaccacatctgtggaggacaccagaaactgtccatagtgatggcctgaccctcagaaca

SEQ ID NO: 62960 - DNA, 708 bp, Bovine  19866880586133
  misc_feature (1)..(1): n is a, c, g, or t
nacgggtgctatttaaagataaggttggttaagtaaatggtctttgatcgctggggcaataaatatgggtatatttttccatctaaacctgtgtttcttgtacaaaagatgagatcactttttttttttttttaaatttgcttgttctgtgcaggaattggtgatcataaaatgatcttttcctgaaaagtcattgagtttagaagttgggaaaacacccgagaatattaaacctttgtctggagagggcttattgtcctaatattgaatggggttccctgagtgtagtgggagcgacagagtcctagcctctggtgattcttaagaggcggacggaatttggctccagcctgactctttctgtttgatcactgacctgtcagagatggccaggtaagagccccttgtcctgtaactttaggagcattgaggatggaaaaagggagcctttaatgtcctaagtgaaaaggacacacaataataatcaaaaagaatatgaggagttgcagacatggcttttgccagtaagtattcctttaaaacaactctagctttcagttgaatgactaggttttctaattttcaatggcataaccatgggctatatttagtgtatcctcaaggctgctaccaggggcctgagagaacgggccgtttcagtaggtcaggtaggtttgttattttttttaaagtcaggttttaaacttg

SEQ ID NO: 62961 - DNA, 2062 bp, Bovine  19866880600582
  misc_feature (1)..(1): n is a, c, g, or t
ncacagtttgctcataaaagtgagcaggtttggtagatacatttaaaagatgtgaaggccaggacaaatcccagttatgtaatttgtgtccctgtaccctccaagcatacactctggttgcaaggtggggagactagtaaataaaatcatgaagctttagaaaagtagaggttttttttgtatcattttttctgttctctgccagtcttcttacagttttgtctttaagtttttttatttataagtattagttgctcagttttgtttaattctttgctacccccatggattgtagcccaccaggctcttctgtccatggaattctccaggcaaaaatattggagtaggttgccatttccttctccggacccagggatggaacctgggtctcctgcattgcaggcagattctttatggtctgagctgctggggaaatcccatagtagaggctaaaaagagggtcagtatgtgtcaagtcagagtgttcaggataaagttaaaggattggactgttggctctttttcccattgccttcaagtgtggcctgctgaacagtggaaggttttaaaactctttcaagtcttagtgctgttgaatatatgcttaaaggtttatatctgacttccaagtcctcaaaaacattttaacggcttgataaggagggctatatttaagagttgtatcgtgttctcagtgtttctttatgaatatgtgtgcttcttgccactgaagactgatttatattttctgtgcctagaaaataatatttgttgaaacaaaacagatgatgatacaagatttagctgattgatgctggcctgctgctgcctgtaggcctttttgtgtgtgtgtgacttcttgattttttttgttttattggatgggattatttacttctagtctgttagactcctgcatctatttctgccatgactttaaaatctgtgtttttaaagtggagttcctttttatatgaaaaacatagcaatatgcatttaataacaggttttagaaggaggtacctgatttgctttgttttaatctggtttgttgtaatcaacctttctttttctttcttcagaggatgttaagcaagtttttggacagaccacaattcatcaacatattccatttaactgggattcagaatttgtgcaactacactttggaaaagaaagaaaaagacacctgacatatgcagaattcactcagtttttactggtgagtccagctcttgtaaaaggttaaaaagaatggatgaataaataaaactaggatcccaatccaaatttgctaaccctggccaaaccatcctatttggaagtatttcttcattagtatgtagaaactatagggttaaacaggctctgatacagcctggaaccatttcatgcttaaatggaatacactctgaggaccctggaaattaagtgatctgctgaaaggttatataaatcaggaggggcgagttggaacctgaactctgggcttatgactggttccactactgtgtccgtgctaagtcactctgttgtgtctctttgtgaccctatggacagtagcctgccaggctcctctgtccgtggaattctccaggtaagaatactggagtgggttgctatttcctactccaggggatcttccccacccagggattgaacacgcatctgttacctctgcattggcaggcgagtttgacttcttggcttatgactggttccactactacttacttaataattttgttatccctttagaaatggacagatgttgtcaccagcatctaactgtagaattatttgcgttttatagacaagacattggatctaaaacttgactgcatattggaatcacctggggagttttaaaaactattattgttttggtcccccacctctagagattagattctgtgagtcaggtgtgtgtttgtatctggggtgaagggcagagagggcttgcttggcacttggagtcttttgaggcatttctgttgtgcggctaagtgtgagaaacactgttcagggcacatgctatccatagcggcgttcagctctgcgg

SEQ ID NO: 62962 - DNA, 1469 bp, Bovine  19866880630426
  misc_feature (1)..(1): n is a, c, g, or t
nggtttttttcttagtgtattctagtgtcaattactttccccagtttctggattgtttctttaacttgtttgactatttaggatgtattgatatgctctttttttcgaagtagggtatcactttgatgatctttatcctgcttctcatatatgttagttgccaggattacagtatgaatagaatttgaccattaggacaaattactactacatcaactcaggacaataaaaattgagagattgttcttattcttccagtactttgtaaagaataaataaaagcttcgtagaggaaaaataaatatgatctttgaaaacgctcctttttccttccaaagtagagtaacaggccctcccataaattctggggaagcgacctcagtgtttactactggaagctcaccagtgctggggacgtttctggagaggaatgttgtggaattggccgtaaaagtgaaatagttttctctcctgccccctgctcgctggcttgaactacacccaagtcaaaagtaagaagaagtctcttaaaagttgtctgtttccctctcacttaggaccttccttagtgattaaaaacgtaacttttaaaccaaatttcccctttaccactctgccagacccagctgcgttaagagccataaagggcgcccccatccaggagggttatgtttgagcctcttggcttctgcccacctatgaaacctaacttatgcctgattggtttgctttttctctccctcagtcatcctcctttaacaaaatttagttaatgaaccgagttttgctagtcctttgctattaagaccatttttttttttcaatatagcaatccatgggccatcaaaatgaaatgtctttatgtctgtgagtgtgtgtgtgatactgtttattcttattacagtattttgtgtatatctagatctgtaatgaattagagcaggcacacacctcactaagaatgccttttccagtctggagtctgtctgaaaaaacagtttcttaagagtagagaatgatcatgtcttctttagcaagtttgtgacgaaattactaccaatttctctgagattggtccctcttcatacttacgccccctacataatcctcttagataatcttcctaaaataaaatatatcacaatatataacagtgtttgtattctgtggaatcttaatgggtgtttttttaaagccaggagaagaggttccatgatttaaaagcaatacagaaaaagttaaagtgaacaagtatttttacccgagaggccttttaaacttattcttcaggaatgggctgatttatgccatgcagaggtccccaaactcatctggatatggaactcatttttacccagacacgcaggagaacagtattccttggaatatactcttggaaactctgacagacaccgctccacttgctctcctaatcacttcagacacctcaaccctgcatttcatggttt

SEQ ID NO: 62963 - DNA, 1201 bp, Bovine  19866880644146
  misc_feature (1)..(1): n is a, c, g, or t
ntgctttctaaaaaagcgccagactagaggggacaggtctttaaatggagtttctgttctcccacaaggaatcttccaaatgtgaagaagatcttaagtcctgttcacaaaggcagttttctgagagataacagcaagggaagtaggaagaggggcttagtaaccgtgggtataagttctcattgtggccatgtgattttcccttgatctttcagaaccaagagaaaacaaagattaaaaatatcagctttccaggaatgtctgaacagtgagtaaggcatgtaaatcgttgaggctagtagatgcacaacaaaatttcttcctttccttttcctcccaaaatatactcttggtccattgtaggaggcttccctggcagccttactttagcagcttcactcacctgtagactaaaatacaattacatgttccagggaacactgcctgtggttgccatcttattcagttctgttttgctcctctgagttcctctaatttggccatatgctaaagagatttaaggattcagttggctactggtagatggttggtattttaaacatttttgttgctacccaatagactgaataagagaactggcccctttccaaaggaaaactaaagaaaaactattcaatttactatgcagatgcttcaaagtgatttagagcaactactccacagcctgactttccaaagagaaagtcatctttacaacaagtatgactgactcatttatccagaagataaagtgatttgttctcttgtggatggggaattcggtttccttatttacaaggaacaaggtcatagctgaagatgctgtcttccaaatacaaaacaaatttgtagagggtgtatttcactgaaagccacccgtatgtaatttatgtataaattacataaggggggggtggggagaattatagggcctgtaattgctttccagggtacagaaggacatttgatttttttttttttcccttcagcataattcagaaggaagtgataccccagggagccaagactgggttttctttttgggcaagaaagacattttctggggaaggaaaaggtgtgtcaaagtttggggaaggtaaagaagatttctgccattgaaccattctgcatatgaagcccagggtataagcagtctctgatcatcaggtacctttctgcacacaaagatatcagtataaaa

SEQ ID NO: 62964 - DNA, 1235 bp, Bovine  19866880662787
  misc_feature (1)..(1): n is a, c, g, or t
nttaggcccagtgcaacacttcaggcagtgtctgtgaaccatggctacatgctagagtcatcgggaagcttgtaaagaatagtgattccaggatgttacaccagaccaattaactcagaatctcctgtctgggcaccgacattctttcaaagcttcccaggtgactgcaatatacagctatgattgagaactcttccatgctggaatgtgcccagtaactatatgctaaatgaataaacaaataggtgaacaaatatgagattgcacagagactccaaaaacagaaaaagtaatggggatactgatagcaagcagtgtaacagaaaataaagatgtgagaaaacagagtacagtcagtggtaaagaatccgcctgcaatgcaggacaccaaggagatgtaggttcaatccctgggtcgggaaggtcccctggagaaggaaaaggcaacccgctccagtactcttgcctgaaaaatcccatggacagaggagcctggtgggctacagtccacggggtctcgaagagtcaaatatgactgagtgtgcacatatacatacaaaggggaaaaaaacacatttagcaggaagagaatcattagagtctggaagacaatgtaggtaatttaatcacaaatagttttcagaaacatgggaaaaggaatttgctggcaacatgaaatcagactcttaagtacctgaccaacctgagaaaaataggtagagagaaaaccagtgcattgaaacccaacaaagcttcagtgtaccagtccttttcaatcacttggaggaaaaatgatgtgttcagtacgtcctccttctccatgtttgaacctttaagcagggtatttggattcacagactgaacccgactcagattgtttccccttccagcacactgctgtacttcttaaatgacaccaggcttccaagcaagattgattgtaaactcgaaaaggttacatgtgatgtaatgaataacacatgctattccctcaagcgcatctctggaatgacacacaccaaggatcctgcaagctttcgtagtttagaaaagattgggaagagatctcacagacaagtgccaaaagagaatttcctattatgctcacttaataaactgctctatcttgaattcattcactcaatgaatacttaatgaagacttaaaaactgtttttggagttctataaatgtttgtcgacaaatggggagatgaatggatataatgtgccaatc

SEQ ID NO: 62965 - DNA, 1641 bp, Bovine  19866880698927
  misc_feature (1)..(1): n is a, c, g, or t
ntcttgttccccagaacattcacaagagagccagtcttccatgggctacaacactttaaacttttaagtctctcctatagtcggcctccttgtatatggtcccagctttcatcatagttcgctatcttttcttcatctccactccatctgggttccagaccctggcatgggctagaccctccagtgagaaccaggcagaactagccttggcactctgtgctgggggatagactggaatgcttcagaatctgcaaggtccctcatttttgaaatgaagttttccatgcaggtttgaagcatcaaggcaaaacagggctaagcactttggaaagacagagcccgaacaaagccaggaagtgtgaaaatgggaaaatgcagatatattttcctttctcaccttcaacagacttactaccaaaacactaactattaattaaatgttccacccttcgagtttcctcccagtgggggcaaagggagcaaagaatacttgctaccaagatatggctgtggactactttaattttgtgccctacaaggggggctgagcccctggggtacctcatgtttgttaacaacttcatgacgctcatgacatgaatgaaggtccctgagtcagcccggagaaagtcagtgctttttaataagcaaaaacattgaaccaactagaaagacagttttcatactgttctccatagaggaacggaggagtaaaatttccatatgtgaactcaacaagattgaaatgagatggtccgttgtttgaataaactgagggcatgcagctgagtttttccttggcagtcctttctaacagcctgaataaagagcatgttaaattacctactttggggagaaagcccgtggaatatttcctcaggaggaggagacaagtggatttaaaacatatcatgtttttaaaggactaagtttttcctgcatggaggcatggtataaatattactttaaaaatgccatgtttcctaaaacacagtggtttccccaatatataatatgaatgtaaacaagatgcctgtcaagcatggctataacatactgcttaccacaccaaacttgtaatatgcacttattagtcttggttctcttaatgaaaggaactaaggacactgcataaattcttcaacacaggtttcatttctccagctgccttgtgctgtagaacatcaggctaacaagaagtgatgctaacaagaagctaaaaccagtgtagcaaatggggcatttaaaatatatataaacataccggccttcacaaagaaaggagctgtttggggggaactaaatggatccctagacagacatattttagtttaatattccatgtattttcctacatgcttactatgtcagttcttctcaatggcagaaaaatgctctgtgagagaacaagaagctggcctgccattattccccggcctcataatctccacacaaccatttttggggggaagggtagaaggtagccacctgaattcgccaactttcttcggtcactttagggccattctcaaataccaatatttgtagacagcagctaaagaaaccaaagattggactgcttattctaaacaaaccatctggcagcttgtggggatttggggaagctggacattttataca

SEQ ID NO: 62966 - DNA, 1180 bp, Bovine  19866880705202
  misc_feature (1)..(1): n is a, c, g, or t
nacatatgattttacttactattagtacacactgaggttgagcataaaatgttttttcatggtgtttagtttagtgtgtatgtactgaatgatacccagaaacacttaataatttatatgattattatattttgcccttttacttacttatactgatacacacacttgccattttattgttcatgggataatttttattgttaagtaattacggaaataaatgaaaatttatgttaatataaaagccaatgatggaattaaaagatgaacgatttataaaaggggatctgatactatctttatttatatgtattatttttaaagcttttattttactatattggatatcatgtagttttacagacaccctgggattactctgaaatgtatggaaagcaaatggataaagaaaaataaaataacttatcacatgagtgacgtataatgacagaataaacatattatgtaccaagttaccttcaacaaaaataaaagaaatagttcaacatccaaatcctgaataaaatgagatcgtggacaagtaaccaggtatgaatgagttggaggaagggtgttgcagtaaagacgccgatcagcaatgaaaccaagatacacaacagagtcaaagaaatttaaacatgttaattagctgctaatctgccaccgtttcaagttttcctttaagtttcccaccgagcattctattttcatcatagaataactctgtgcctggggtggttatgaaattcataaccagattcacagtatttaggttggcagagagaggctgggattcagcaatggaaatgaagcttttcttcttcatcttgtgatttctggtatttaccagtggtaactcatttaacaagtgtaagacactctaacagtaatgcagtgggttaggttgactgcagcatcagccagtaagcagccaattgctaaccactctacaatctgtcctcctatctccttccagccccctcaattccaaaaataaatacacctgagccataagccaaagcatttcttaaaacataaaaacaaaaggagatgtaaaagaatagtaaacgctggacatggtatatcctacacaagtcaaatctgaggctatattaaaacacaaagcactctaaagtacctagagggggctctggcgagatcccgatgctttgcagcaggg

SEQ ID NO: 62967 - DNA, 1550 bp, Bovine  19866880764129
  misc_feature (1)..(1): n is a, c, g, or t
ntactagggctatgctatacaacatgatgatgaaagctgacacttatatgacatacaggaaaggtgctaagaaagtaaagcccaagagttctcactgcagggagaaaatgttttttcttttgtttttattgcatccatatgagacaatggtgctagtggtaaagaatctgcctgctaatgcaggagacataaaagctgtgggttcaatccctgggtcaggaagattccctggaggagggcatggcaacccgctccagcattgcatgggaaatcccatggagagaggagcctggcgggctacagtccacagggtcacaaacagtaggacatgactgaagtgatttagcacacatgagatagtgcatgttagctgaacctattgtgaagatcatttcacaatatacgtaaatcaaaccatcacgctgtgtacattgaagagtgattgctgtgcgcattaaggagtgatacacgtcaactatttttccattaaactaggaaagaggactaccattctgctagcttgtgctgagaaataaaaaagaagtccagtaaccttctctgcaaatgagcttagcaacttttattgatccctgaagcaaccacatcagagcccattatctttcttctttctattcagggtggagagacccccctgagggtagggtactgagctcctcccagttctacagttttcctgaattcttgttgcttttgtcttctctttcgaacaaatcactagtcactaattggacaaaatagtttgggccaatgacagcatcatgccaaacagatcatctccagagtatcatcccaaaactttctctaagtgccatttccaaaagcaatacactgaataataaggacatttagaaatccatcatatcactcaatctttcagaatcattgatgttgctccccaatctcaaggatttccttactttggatgggcagtgatgatgataaagattttctgatgtcaggaataaaattggaacaatgaagtatttactttaaccaggctctttttaaaaagcctctttcttaatttactgtgtgaaaaacttccctccattggccaacagcaaaaccctaacctggagctcagacatgggccacactaagccacacagaagtccatctgagctgaatttaaaaaaaaataaataagacttcctctcagagagcaagcgtgtatgtccccagatcttgaccacagaggacctgtggtcaagcaagcagtctctctagaagttcagcaaccccttgctaaaagcagatgctccaactgttactgtaacccttatgggtatccacagtgctctctgcctgagacacagtgacaggacagcaacagtttttaattcatcagtccatgtgctacataaagagaaaacccagtaatacacactttattttaatttccaaagagactggcttctaatcagcctgcaatccactgatttcagtctccctgaagtccaattagctgggagcgtctgtcaactgctctttacataaagatcattcaagcaattccatatatacaaaat

SEQ ID NO: 62968 - DNA, 1413 bp, Bovine  19866880777338
  misc_feature (1)..(1): n is a, c, g, or t
ntcatcctcatagaaattttagaaatcctgaaaattacgaacaaaccattcaaatcccaacaatttcaagaaaatcttaggtaacatatggtgtatttctgttcagtctttttgctgagtatctttgtaacatagttacaataaatatgcatcatgaaagactgattatagtttttaaagtttatcttttatgatttaaaatgggaaatatgtctgaaattataaaatattttggaaaaatagataaaatatggcactacccacatatgactactaacattttggcatatgttcttacaataattttctagggtattttcttaagttgttatatggaatatattgatttgggcttccctcatggctcagcaggtgaagaacctgcctgcaatgcaggagatgagggcttgatctctggttctggaagatcctgtggaggaggaaatggcaacccactccagagttcttggctggagaatcccatggacagaggagtctgacgggctgcgggccatagggttgcaaagagtcagagatgactgaagcgactgagctcacacacacatacatatattggtttacagcagaggtaatacagatattcacagatcctagactgttgcagaataatttctaaggaccaataatgtgctgcctatttcattttaccttagtctattcctaaggctcaatagaataaagcattatactgcaccatccattaaatttgaaaactccttttattgattttttaattgattttattgatatgagtgggctaatacttaagatcaggttgtcaaatcagactcatttgaaggatgcttctgcaataacaaactttactgatagttggaggatatgggcaaccaagaggcatgggcagagcagacagaagtctggggcaccaaaggtggcttcgtgggtcctgtcaccccacatcagatatgttctctctgatctagaataatagatgacatttcagataatgttttgcagtttacttcacatagcatgaagcgtgcttaagttatgaaataccttcattttatacttcagaagagttatataacttatgtgagattcttcagggaaccctgcatcatagatctatagattctgggtttatttattaagtaacccttagcaaggacgtcgtgctaaggcattctgtgataagagcccttccctttagcaaatattattagtctatttatctggagtttcagttgacaaagagattagactggattaacctgcctttttctcttccccagtgtagtttctcttaacacccgcaaagaaagtgaatgaatctctgaccagctgttgaaattctttcattctcaataagcaataggaaaagagaaaaaaatccctacaatctagcttctcattttccacccctaaatc

SEQ ID NO: 62969 - DNA, 1488 bp, Bovine  19866880858740
  misc_feature (1)..(1): n is a, c, g, or t
natggaccatagaactcagaagcaatcttttcagaaatataattttttttttaatattggatttaaagtttacctttaagtagatgatagcatcagttccgtatcctggcaaagagtagagatttagatctccttgaaagtacttggcgtagagacgagaaattggtaagccgtaaccaaaaccagcctggaagggaaagatcagttactgacaaagaagtgaacacaatcatagaaatacaaaatgtattccctgatactgatgtcctagaacttagacacatatcttctgcttccaatcggaaaccccttggataactgtttcttagttggctttatcattccttctcatatcccccatgcccagtttaactaaactgattaacttgcctaaatacatcccttgtaatccttcctctacatttagaactaggtggctggggtgaacttagcccatttagttggtcttaccagcggagcattccgggaattatccatcacaggcgttggtgcagtggagtacgtgtaactgaagagacggtcaatgactctcaggggaacaccaccctcctctgtctgaaatcttaaacaaacaagtcatcagagctatatgctaaaaacaatgtatatttgtctatacaaaaaatgtcttgtcttcacctggtatacatgactttgatctgtagctcaaagcagagagctttattattattgactcctttttaaaaattctcttaagaaggactcaaaagacaaaacagaatagttaccttaattgtaagatcttctttccccaagacaacaatcacctcaattggtgtcagagaaggccagttttgctggtgttcaactgtggccctcattgcattctaaagaaaacaaaaccacaaggtattcaatggcagaaggatgagggacaataaataattgtttttatgtttaaaatgaaagcacagagggtaattcaaagttcttattttacttttttaagttaggagtaaaatagctctgtgaatagccatttatgaatgtgtcatgcaggatgtataatgaaaaatattcatttatcatgtaatatagctcttgggagtaatgtctaatggaaaaacaattctgctagctgtcaagttcttatttgtaagcttaatttaaatgtagaaattggtttttatagtccatttcctggctctttcttttctgactttccattacattttacatcttagcaccaaagactattacataacaaataaacagtgaatcattgaaccaatttattggcttttataaaatttgatgggaaaatgctgttactatgttaaaggatagtaaataattctaaattaaatttcaatttgcatttgattatcatcttaacttttacctatgatggcaaaataactattatgagttgaaccattcaatttaaaagtaaatcaaatcaacaaaaaagagtctttgtcctttaaacagaaagaaacccaaata

SEQ ID NO: 62970 - DNA, 1642 bp, Bovine  19866880926394
  misc_feature (1)..(1): n is a, c, g, or t
nggaagactatctggcccacctaaaactaggatagaggtcctctgtttcaagacttaacagagggacactgaaccagatttaacagtattagtcaccccaggtcactgacaattttctacttggcaccaagactagaaacagagaaaacttgagtactgaaaagaggtatgctgaagcaacgacttggcacagcacacagcaatgctgaagctgtgaacgtcgctcaggcatggccgattctccgtggcccctcggactgtagcccgccaggctcctcagtctgcagaattctccaggccagaatactggagtgggtagccgttcccttctccagggcatcttccagacccaggaatagaactggggtctcctgcattgcaggtggatttttttttttttaccaggtgagctgccagggaagccctaaaagaaaattttttttttttttttggctgcaccgggtcttagttgaggcatgcaggatctttgatctttattgctgcatgtggatctagttccctgaccagggatcaaacctgggcccccagcactagaagtatggcgctttagccactgggtcatcagggaagtccctttactcagtcgtgtccagctctttgcgaccccacagactgtagccccaaagactcctctgtccatggggattctccaggcaatgcgcctcaaagacaggacctggaatcaatagagatttctgaccacagaggattggggcaaagtagataagcccagagaaaaggaaactcatgggagagaaaacctaaggctggaaagtgggacaaaacaaatgagaatgagccagggtggcgacacagcccaatcagactgagtgagtggagaggtgatctgctgaggacacccgtggccagcagaatggaagggcctgcctgccaggtcattctctcacaaggcaatcaagtttccagaagctcaaagctcaaattgttagtgacttcacttggtaattaccaatacaccgaaagcagtgttttgaaaggcagcagccaggcctgtggaatgcctctgaactagattaagacaccaggctagtaattaaactaactttatatgggagaggtctcttgctcaaacttgagcaatcttgctcatgtcaagaaagccattttcgcacaaaagtggaaacaagaaacttttgagcctcaatttcggctcagataccaccgttggcacctctgttctcctaactacaaaactaggagaccgactccttccaaggggtgttaaaggggattaagattatgaaatactatgaagatgaaaaggactgagtctcagtcttgtatcatttgcaggtagtttaacagtctctgcttctgtgtcagcaaacaagttttaacgttttatccatctagacacttcgatagcagccattgctatagcacctaagtgctttttaccagaccagccactgaaagactgcttggcatcttgtcagaatgacatgctgctatatcatgtcaaagtctgcacaagcctaaagattcagaacagaagatgacttttcttccaattgataatgaatactatgcctcatgacaatactgttcatgtcttacagctggatcacaatttggtaaatcgtgttccattgcacgatca

SEQ ID NO: 62971 - DNA, 960 bp, Bovine  19866880960612
  misc_feature (1)..(1): n is a, c, g, or t
ntgtcagaaattactttgcattatgtttaaatctctgaattaatttttaaggtttcccacatgacagtacctggaattttcttgagaatgatatgggttgtattcttgatccagctgacagtctctgccttttcaggaatacctaatcatactttctagagaaactggaatatggaacagcagcttgggaggggtgtgcatgtgtatcaaaaggtaatagtaaaaggcatttcagaatctttaaatatacagcgaattctgacccatgaaaaactttgataaattgatttttaacagatccagtcaaaattttggcacaagagagggaaaaagtactttgtttacaaagtcctcaaacatttcttgagaagttgttacctgctggtctttgttctctgccctcaagaaccccgagtaagcaattataggatattttctgttctgtgctcacaactggattttcataaaataacattcctcttttattccgtttcagtaaaattaatatggtcagttgggaaggatgtatccttaccctttggtactcagtgacttgaagatttctataattttaatagcttttacattacaacttctacagaaggttgttcataaatattaagtcaattaaaggacagtctgtaaaatttttatatcattgttgtcatttatatgcaatattggagagaatacattttcataccttctgatcttataaatctaaactttcaatttcctttatgaagtggctacttgatagatagcacagctcccaccagtattgccaagctctgtataaccatgactattttgacttttttcccatcctgggaatttgcaaggtttacttgtgtggtgaagttgaaggcagaccatttaactgtgcctgttgactgaaccagacttgacatttgcttctgttgaggagaaataattggctgccaagccaatatctctgca

SEQ ID NO: 62972 - DNA, 1522 bp, Bovine  19866881002809
  misc_feature (1)..(1): n is a, c, g, or t
ntaaacagtggcaccaaatgcagtgtcagtgatgaactccacaggctttcctgagaggcctgccagtcagcccccactaaatctccttgaacaaggagcaaggcacggggacatgagttatgtagcttcctggggataatgcaggtcattgcaaaaggaattttgatgctctcagtttaagaaaataagagtcagagctactcgctgctaattaatattgacgtacttcacatataaaaagctgatctctcatttacaactggtcaagcagataaatcaaacccacgtccaggtataggcctcttccctgtctgattgtcaacttactctcctacccaccaatcaatgacagttcaactctaccctggtttaggaacacatacagtggtcctgccagagctccatccatgccgggttaggagatacagtgttcatgaagcctgcccagctcgtccgctacagagcccatgttctgaatttgttttccattagtgacattcccttacaacctatctacactgcctgatccatcttcctctctcctctgcattgtagcacttgctcgcctgcagttctccagcttcactatcactgaaaacaatcccttcacatcttttttttctcatcctccaattacccctacctgacaacagaaatctcaaagttcaaatcagccactccaggtactctgaactctatacccattcccaactcctcggacttttgtcaaacttccactctctccttatttccctcttttccctggtttgccctttatcccccttgtttcactatgactcatcatccatcctcccagacgtctcagctcttgcagcttgtgtttcagcccattttggagctcagtaaaccaccatcctaccatccaagtaaatgaatcaatcagttcagttcagttgcttagtcgtgtccgactctttgcgaccccatgaatcgcagcatgccaggcctccctgtccatcaccaactcccggagttcactcagactcacgtccatcgagtcagtgatgccatccagccatctcatcctctgttgtccccttctcctcctgcccccaatccctcccagcatcacagtcttctcgaatgagtcaactcttcaaatgaggtggccaaagtactggagtttcagctccagtactttcttcctccaaagaaatcccagggctgatctccttcagaatggactggttggatctccttgtagtccaagggactctcaagagtcttctccgacaccacagttcaaaagcatcaattcttcggcgctcagccttcttcacagtccaactctcacatccatacatgaccacaggaaaaaccatagccttgactagacgaacctttgttggcaaagtaatgtctctgcttttgaatatgctgtctaggttggtcataactttccttccaaggagtaagtgtcttttaatttcatggctgcagtcaccacctgcagtgattttggagctcaaaaaaataaagtctgacactgtttctactacaa

SEQ ID NO: 62973 - DNA, 2762 bp, Bovine  19866881037839
  misc_feature (1)..(1): n is a, c, g, or t
ntgaatgtttgggcataaaagaggtatttgtataatgtagttcatgattcaccgtatctatagtgtccaaaaaaagcataatgaaaaagaagcatttttccagtggtttaacaactatttgagtcaactgttaggctttcattatgactagtgaccaactgctcacttttaaaagcaaaggagagaagagtaactggaatagagattggagaggaagaacaagcactctttctaagtttatgttctacataccttttccccatgcaaatacagttattttttcctggccatcaatctatagacaagttggaggctgccgtctgagcacttcacacaagtacgctttttcttaacctccaactttcacctgtgaaacattcatttacctgtttattactattgagtgcctgtatgtgccaggcactgttctaggccaggttatcctgttcaaatagatgacaataggtgagtatctatggacctgtagatgtggctctctaaaggtcagaaaaactctagtgaggaatgtgataaaccagaggagggctgccagaccgatgaaaggttctatctaaatgttgcaaaagtactggccgaccgtgaggacaaagatcagagagaattccgggccactgatcagttttatctgccagcctaaaaagtaagagtgcaaaactgctcctacagtgttaagctctgatattccctaaatgataaataattcatgttttaaaatggaaaagatgttctgatagctgacagtctcagaaattcatgcaaacctttcatgaaagtggaatacaatgattcattcacttcctcactttgcaagtccagcctacatggcatataaatatttatacacaaacttgtataggcagatattttatttcatattctatttcagatataccaatagtaacacacatacttacagaagaaacaaataactcttcatttctgtacaggccagtgttaatctagactcataagactggagcagtttcatgccgtgatttgaggctactgttctaggcagtaatgtttcaagataaaatttagcagttttgaaattctataactaaacacaattttgttagacataaaaaaaaaattaacactataattaatgactgcctcagaatccaaacggctattgaagatgacagtttgaaaccacagaagaatcataaagatgattaattatacaaactaatacttgtttcagaaggtttatattcagagaccatttatcaccaaaatgagaatatattaatctcattgaatattgcaaattactatgcacacattaatttggtttttataaaattagatattagggttttcttttcatttagtcaagtactccgtaaaatataaaagtcataagtattttcttatcaattcagaaaaaaaagtggcttgaaaatttataaactaatgctacctgaataagcacactatttatataagaattagtttaatcatggtctttaacatatgtaattatcaaaatagacccactgctactacatttactataagatgaatacttataacattaattgaaatagcactttctttttaacatacttttcctagaaaaaaatcatgttaacactaaaattataatcatatattttaaccagatgattttatttcaaatacatataatttattatgacaaggaaatgaactaatatattatttcaaagtagcttattttatgtaattatatttattagcaccccaaatctgtccatacaaatatgcctttgtgctttttacttaactgcacaggtttgtggctaataaacattcaggttaaaaacactaagtatctggattttcagtttttatctggatttgggcatcacataagtcttttccatggagggaaaaaccaaaagaagtgtttagcattagcgaaggaaaaaacactgtttaacccatggaagaataagctagcacttaaaagaccttctagagtccagaaacctatggccacactcgtttaatgagaaacacaagtgttcggggcaattataactggactccggtgagctgagcctagctcagcccttccctcccctcccagatgctgccagaactgagccacgctatcgggctcctcgtcggcagaggataatggctttcataaagcacaataattaaatcgactgatttcaagtgcagttctttttcattaaggaactcgtatttgcatcaacccccaaatttcagtttaacttcgtattttgtcttctgcatgccagccttccccacagagggggattatttatattcagggcataaattcctgtggaaaagggatgtgggccctgtcctactggaaaacgtgaagtcattccacgaagcgaacaattattgcctcagtgtaatccacttaaaaaccatacgtgtattatttagtttgcgtctctcaaacactcttttaactcccaacacgtccagtttatcaggtgctactatgctgaacagcgatttaaagtacaagggaaatggctcacggaatccctctttcttcttgctctagctgtctgtgagaacggctgcaggcactttttatagcccctgtacattacaccttgaccaccattctaaagtatcttgcataggtcatttttcctactgggattccaagtagaattttcattccagtttttaattgtagctttaaaatagattcagatgaacgtttaaaaccacgctttagcgactgcgtttgatctcatagtctc

SEQ ID NO: 62974 - DNA, 2533 bp, Bovine  19866881095129
  misc_feature (1)..(1): n is a, c, g, or t
naattttaaatgacccatcaggtacagtctgtaaaaataagatttatctactttttcttaggtttgcaaccatatttatcattcagttcagttcagttcagttcagttgctcagtcgtgtccgactctttgtgaccccatgaatcgcagcatgccaggcctccctgtccatcaccaactcccacagttcactcaaactcacatccattgagtcggtgatgccatccagccatctcatcctctgttgtccccttctcctcctgcccccaatccctctcagcatcagagtcttttccagtgagtcaactcttcgcatgaggtagccaaagtactggagtttcagctttagcaccattccttccaaagaacacccaggaccaattcaaagggacttaaatttaaagccttatgattattaagaagaaaaaattataaactaagaaaacttcaattaatagaaacactaggtggtttgaactatagggataacctaataagcttgtgaattttaatggtcttgtctttgaaactgggagctggatagatcatacaaaatcatccaactcaataaccttctgcagaacaggacagtcatttatataacatgaaaattaagctcagtgtgtccatttcttaccagtgaacgttcctcctccgactctgacccttcctgtcgcacagacactgttctcctggtgtttctctagagcagatgaagctacagccaagccagttgagctggaaactatagcatcacctttgacctacccctcatccctgaggcttccagagtttgggccagacactgcaatactttaactagtttctccaggtctttttactctccattctggtacttgtcaactctaacttcatatgagaattatcaggagaatttttaaaaataaaaagtactcatgcctgggccccactcagagcaacaggattggaactgctgggggtgcagtccagacagcaggcctcctgaagatcctaaggcacagccaggattgagaatcactgctctactccaatccagcctccaggtcggctctacacagtccagctgattatgcttagaaagtttaaacaggttcctgtttaaaaaataaagcacacacagcaaacaccgacagttcccttttgcccatcaaagcaggccccaatttctcagcatacctttaataagcatctccagacctatccttcacctgtccctactgttatcatcccttaactttaagctcccctcagatccaaacttccccacatcagctcctttgttcatgctccagcctccatctgggactgcctccttcctccccacttgggtttcacccatccttccaggacaatgtcaaatgtctcttcctcctgagcttcaacttcaggagttgtcatttttcctccttaagcctataggggttggtttgtacctgtcctgaacatcctgatcgtccctgtagctcagatggtaaagaatctgctgcaatgcaggacacctggcttcgatccctgggtcaggaagatcttctggagaagagaacggcaatccactccagtattcttgcctggagaatcccatggataggggagcctagcgggctacagttcgtggggttgcaaagagtcgcacacgagcctaacactgctacactgaacatcctagtttatccgtctgtcttatttctctccttccctttaatagggtaagaacggtgccttgctctattacaggagcctaagagagcacagcatacagaacagatgctcagcatttctggaattctttcgcgtgaggcttatataatttgaattgataatttggagactgtgacatctgcctaccgcgtttttttttaataataagtaaaatgtgagaaggactaggcgtgtcctgtttggcattctggcttcacggttcctggacgaggagataaataaggaagtgatgtaagaacagtagctgaatatttcaagtatttttgatctaccgcgccaagattagagagcggaagaagcttctccaacgcggcaggggagggatggagaacaactttgttagagacagaggctggtttgggcaccaaagagaagcaggatccgtgacctgaaataaatctttataattaaagtttcagtgcatgagtaatagtgttgttttcaagttaaagcacgaggtttgcccttgagtaaattgcacggcactcgcacagctcgtcaacctaggtagcaaagaactttgtgagcagcaaaagcttgtaaactctccaggaagtctcgcgatccagcccaaactgtgtggggttttgcgagcggctgggggtggggtggtggcgctcggcgggccagggagcagagccggcagagagcgtccccggccccgggccccagcacgagggtccccgcgcccccgcagccccggcatcccgaccctgcggaccagggagggcccccagcccctacctgagcgccaggagcctctcgcccagcagcgccagcgcgatccccagcaagctcagcgccagcagccg

SEQ ID NO: 62975 - DNA, 1089 bp, Bovine  19866881172303
  misc_feature (1)..(1): n is a, c, g, or t
ncaagggcataggatatctttccatttctttgaatcatcttcagtttcctttatcaatattttataggtttcagtatatagatctttcacctcctttgttaagtttatgcctaggtattttatatataaatatgttttatttacatataatttttttttttttggccgcactgcacagcttgcaggatcttaattcaacagcctgggcttgtgaaagtacagtcataaccactggactgccaggaaattcttcataggtacttttgatgtgattttaaatgtgattttttttttttttactttcttcttcagtatatagaaatgtaacagatttctgtattaatttaaaatgagtttcagcaaatttaaaagtttttgataaaaatataccctaccatagaacttacatgtgacttttttcccatagtggtggaaataacagtccttaaaaatgcagattcaccctcataaaatgtttcaccatattctaacatagctcgctgtcttttttatctgtgaaactttcacttaggttgggaaaatattagaagttttctttcgattattttgccaaacattttcctcactagaaatgttagtttgctttgcttgattagcacaggatgaaaacaaaattgcttctagaaacttaaatttatctacctcactctattacactttttcacccagctgacaataaaaacaagatcatcgtaatgttagatttagaaggtgagctgtatattgccccgtttttagaattaaatgtcactatcaggaagcactttaagtataatcttagcttgaatgtgtgaatgtgtattcacaggttgtatccacacccaaagttaataatttctgccattttaataattgtaggtaagaccaaacaggtgtcctaacaaacaagaccaccactcttttcattttaaacagcatctgtctggacagaatcgtgtccttcttacccttggcagctcctaactcttctcctgagcgcaaacgcatttgaaactctgtctaggagacttttaatccagtaatgccttaatcattaagcaagtgaaaaatctctgtcatgtttcatag

SEQ ID NO: 62976 - DNA, 1535 bp, Bovine  19866881209044
  misc_feature (1)..(1): n is a, c, g, or t
ngatgaggagacgcccttgcacacggctgcccactttggcctccccgagctggtggccttctacgtggagcacggggccatcgtggacagtgtgaacgcccacatggagacccctctggccatcgcaacctactgggccctccgcttcaaagagcaggagtacagccgggatcatcacctcatctgccgcatgctgctggactacaaggcggaggtcaacgcccgggatgatgactttaaatctccgctccacaaggcagcctggaactgcgaccacgtgctcatggacatgatgctggaggccggcgcggaagccaatctcatggacatcaacggctgcgctgccatccagtatgtgctgaaggtcacctccgtgcgacccgccgcccggcctgagatctgctaccagctgctgctgaaccatggggctgctcggatatacccgccacagttccataaggtgaggctgccacgtgcagaactgggcggatgggcagcagggtaatggggactcagagggtggctcagtctgaaatctccaagtcactcaagcctgttggaggcctggctaactgcctctgaccttcgatctgacctttcattttgtgtatctacccctagctatctcagcctagtccacgtttgtttgaaatctgggctgagagcagagaaagagcaagaatagcaggtaattgtccatggcctgtgtgaacaccagtgaactggtagtggcttcctgggggactgaatgggcaagatcagaaggatactgtgcctctgcagaagcggcgaaaggcgccacactgcacacgcggctcttccacagaatgtctgcctatagatgacagagcctgctttggaaccggtttgaatacaggaaagggcggctcagttttctactttaatgaaaactaacatttattaagaactaatagttaatatttattatagataataaattatatttattaagcacacttataagtcatcttacatttcttaatttaatccatttaattctgtaataatctgataaggtagattatattattattctataaaggaggaaactcaggcacagaggagttaagcaatttgatctcacacagtggcactgtaggtattcaaccttagttcacttggtgctagtctttaattttataatatactacacaacctttattttaaatagtatttattgataatttctaatgggctgctgctgctgctaagtcacttcagtcgtgtcagactctgtgcgaccccacagatggcagcccaccaggctcctctgtccatgggattttccaggcaagagtgctggagtggggtaccattgccttctccgtctcatgggctagtagggaccaaatattaacaatattggcaagattaatacatggtcactactctcagttagcttaggatctagctggagagacaaacacgtaaagaggtaactttaatatttcatggtaaatgacgaagtagaggagtgaagggttctatagcgcagggagagtttagcattaagt

SEQ ID NO: 62977 - DNA, 1068 bp, Bovine  19866881216359
  misc_feature (1)..(1): n is a, c, g, or t
ntacacacattgctttagaaagcaaaataaggacaacctggggtttgctggagaagctgcccttgaggttagacatgtacagttaaatttggagtcaagctgaggtcactgctaaagagatttggagttggaggtctgtgtggaaaatggttgcctcgtggaagctattcactcaccaataaaactcattttgaatgatatcagagcaggaaaaatttaagggttttaatccaaaaacaggcttggacttttcttgaagtcttggttttatttggaaaggaggttctatggtatttaatctttgccatccaacctctatttctaaaagaaatcctagtaaaaattgaatgagaagttttattgggaagatatacaccatatatcttccataggaatttcgttgtaaacatgtaggtaccgagctatacattgttaaaagaatgtccgtttttacttcactctgggtccctctggacttccctggtggatcagatggtaaagaatctgcctgaaatgtgggagacctgggttcgatccctgggtcaggaagatcccctggagaagggaatggctacccactccagtactcttgcctggagaatcccatggacagaggagcctggtgggctacagtctatggggttgtaaagagtcagacaaaactgagtgactaacacacttacctgggttcctccagacaaacagagtatattgtattccctgttttaaattggtatttaaattttaatattaagtctttactttcctctttggctgtttcttggaggtagaggaggggggaaaaatgggacagaaaacctggcaccctgtctttttaagcgaccacatcagcttggatgccagtgactggtgacagaaaagccaggctaagtgtgttggagccttcaggaaaggcagtctgctgacatggcagcagctccatttctagctgatttgaggcccagataactatccctttcagcttaagtgatgcttggcagtaattgaccaatacccagttgggtggagcagagttctttggaacctgttcagaccagctctgcctgc

SEQ ID NO: 62978 - DNA, 2034 bp, Bovine  19866881245964
  misc_feature (1)..(1): n is a, c, g, or t
nctcctagaaacttacgagggacagttttaaagagtgtgtgtgtgtggtgacggggggtggggggtgggtcgggggaaggagggtggtatttttattattactacaggaaaagatactgggtcatgtcttgtaaatatatattggaatcactatttttaataacagtatatagatgggaggagggaaacatcaattttctaagtaatgcttcatccagactatgctgtgctcagtccggtcactcagtcgtattcgactctttgcgaacacatggactgtatgtagcccgccaggctcctctgtccatggaattctccaggcaagaatactggagtgggttgccatgcccccctccaggggaatcttccaaaccaggaatcaaagccaggtctccagaattgtaggctgattctttaccatccaatccaccagggaacaagtgagtatggctgaaataagcttctgatggttgctggttaattgtcaccctacattatgtaggcagaaatggtcacaattgcaaattttcaacagacataggtcttattaacaacgagtaaataaaagcagatgccagtttctcacctgtaatacaccccaggggggaaaaaaaaaaaaaaaagatcccgcatttcctgtagggcttccctagtagctcagctggtaaagaatccgcctgcaatgcaggagagcctggttcgattcctgggtctggaagatccgctgcagaagggacaggttacccactccggtattcttgggcttccctggtggctcagcaggtaaagaatccacctgcaatgagggagacctgggtttgatccctggagaaggggacagctacccactgcagtattctggcctggttgcaaagagcaactttcactttcacttttcagtttctgtatgtgagtgtttctgattccgtctgagagatattaagttgtgttgcatggtagatagagagttacatagttgtcctttgaaagcccaggagggttaccttttgtgtgtgtgtcatggacttctctggctgtagtgaaactatagctactttcctagaaaaatgtttataagtgcatacaatgaaagtactagttgcaaaggaggtcaattacattcaaaagaaatcatcaaagtgttctttcagaagtttgtgctacagtagtatagcagtgtaatgtgtgctgcattgttaacacattaaatagcaaggtgtagcactgttctttcaagtagtaatgagcataaatgttgtttcaagaaatctgtagcaccataatgaaatactgatcataactcttatttccattagtaacaaagtcacaagtattgctaatgcttctggaacttgtttcctactttcgtaattgaaagcaatccttaattccattagaaaccaagatactttcccctcattcaagatcacaaaccctccataattctatatatggaccatctggatgaagaatgtgccatagttaccctatgactgggtgggatctcttctttagggagttttttttttttttttttaattgtctgtttgaacacaaataccctgataccgtgcttttttgtttttttggttttttaatttttggctgtgctgagtcttcgctgctgcacaggcttttgtctggttgtgcaagagggggctcctctccagttgccatatgcaggcttctcattgtgatggtttctcttgttgtggagtatgggctctggggcatgtggcttcagtagttatggcacatgggcttaatagttgtggctcatgggcttagttgctctgcagcacgtgggatcttcccggatcagagatccaacctgtgtctccctcattggcaggtggattctttaccactgagccaccagtgaagccctaaggaggtttttaatgacagtctttggagaagagaagaatctcatatgtgacatcagaatttagaatgaagacctaaaggagaaggcctgggcctatggccagggcttctgtgttagtttggagagcattatgccaatgattctgg

SEQ ID NO: 62979 - DNA, 1437 bp, Bovine  19866881320086
  misc_feature (1)..(1): n is a, c, g, or t
nggaacctctgggaggaacatgtttgaaaagcacagcacttttcaaaataatatcatggcaggcttcccagctcacagccacaacatcctgtggaatcaacaaagcaatttaaaaagccccaaactcatcatctccaggggagacaccccttcctctcagagtatgaatcctaccatttgttctttcaattagaacaattctgtggaggtggagggcaacaaagcttctcttcctagactctagaatactggtcttcttagatcatgacctagacagatctaaaacaaacatttcaccccctaccatctcactaatcacaagcaggcttctttctgtattttatttcattttaatgatgattatgacccgcaatggcaccccactccagtactcttgcctggaaaatcccatggatggaggagcctggtaggctgcagtccatggggtcgctaagagtcggacacgactgagcgacttcactttcacttttcacttttatgcattggagaaggaaatgacaacccactccagtgttcttgcctggagaatcccagggatgggggagcctggtgggctgccgtctatggggtcacacagagtcggatacgactgaagcgacttagcagcagcagcagcaaggacctaacagaagcagaagagattaagaaatggtgataagaatacacagaagaactatacaaaaaagctcttaatgacccagataaccatgatggtgtgatcattcacctagagccagatatcctggaatgtgaagtcaaatggggcttaagaagcatcactacaaacaaaactagtggaggtgatggaatttcagcagagctatttcaaatcctaaaagatgatgctgtgaaagtgccagaaaatttggaaaactcagccaaggccacaggactggaaaaggtcagctttccccaggcaagaacactggagtgggttgccatttccctctccaatgcatgaaagtgaaaagtgaaagtgaagtcgctcagtcatgtccgactcttagcgaccccatggaccgcagcctaccaggctcctctgtctgtgggaattctccaggcaagagtactggagtggggtgccattgccttctccgaatccctaagaaaggcaatgccaaagaatgctcaaactactgcacaattgtactcatctcacacactagtaaagtaatgctcaaaattctccaagccaggcttcaacaatatgtgaaccgtgaacttcctgatgttcaagctagatttaggaaaggcagaggaaccagagatcaaattgccaacatccgctagatcatggaaaaagcaagagagttccagaaaaacatctatttctgctttattgactatgccaaagccattgactgtgtggatcaccacaaactgggaaaattcgaaagagatgggaataccagacca

SEQ ID NO: 62980 - DNA, 2528 bp, Bovine  19866881353648
  misc_feature (1)..(1): n is a, c, g, or t
ntgggatgaattgcacttctgtggaggagcagaaagtgtgcagctctgcatcagcaagggtctcacacctaccgatcccatctcaggcaaggcccatgttgtcatgaggtagcatcaggggcaggtggtgtaggagatgaaggcataaagatctcaattctgctcagtcactatatggttcctagtgctggactgtaatcatttaacttttctggcccttaatttcctcactattaattggagaactaaatgaaaaaaaattatagaataatgtgtctagtaggatcccattacctttttttgttttgataatattaaaaacccctttacaggaattccctggtgtccagtggttagaatttggtgcctgggttcaatccctgattggggaacaaagatcctgtaagttgcagcccaaaacaaaagcccactcccctgcaaaattcctttattaccaagaggaggaaggggataggatgaattgggagattgatattgatatatatacattgctgctgctgctactaagttgcttcagtcgtgtccaactctatgcgaccccacggacggcagcccaccaagctcccccgtccctgggattctccaggcaagaataatggagtgggttgccatttccttcttgagggcatcgtccccacacagggattgaacccgtgtctcctgcattggcaggcggatatttttctcactgtgccacccgagaagcccagtattgttattacctattccttaggactattttaaaatgttggatgagaagagcaatatttccacattctcagtatcatgatatttgggtatttggtggatattctagttcccctccccacaaccctcttttgatcacataattttaactgagagtgtaataagggagcgagctctatgatacctaccttcaggtggagttgagagggacagcctttctctgtcccctgaaaggagacttctgtgactcccagtggagacagctccattcaagtccaggtcgatgtgccttcctgtgggacctgactctcaaccagagggcactgcagaaagggactcggtgtcaccagcattaacaaccgtctgcctcatctcctgtcccagccgaggtgcagctgctgcagggagtcccagcgcagtgcccgcatgatcgtgcccacctctattatgtacagttgtcctccatgacttttaagatgatggcagagagcagtggctcggatccagatttactgatgcgatttattatgaacttctgaaggggtaaacaggggattgtgtgtgcgctcactgaaatcaccagattgagtctgtccatccttttttttttttttcttgttacatttaaatggcaaaggcatgagtaacatctcaaagcctatgagtaaggaggtaaaatataaaatgcagtgttttcaggtaggccacatgatgcttcgtttatacagcatacgtttttggttgtttcattttggcattgtatctggaaaatatagtgtacacatttattttcacagataggggtctattttctttgcagagcaggtgcttacctcccattagcataaatggaagttatatgaattccttgaaagagaagacccattttattatttggctataatttttattctattcatgcatctcaaaagttacttaaatagacagtggttgcatgtaccacttaaaattcgaagatctagattttaaaatgagcccagcacttgagtaagtttgcaagattttgctccccaaactatgggacaccatctgttttggagctgtgtgatcccattcaattaattgaaagatgagtaagataacaagtcataaattaactacaaatataacctgaacatgtcgagtgtattcttcttcagacctgttaatcattgttgggtttttcaaaaatgatgtgtgaacacacatattcttaagaattaaaaataagaattactcacggccaaggctctttaccaaatagcaaggttttctatatatagagagagaaagctgattttaacggcacatgggccagtgagtgtagaattattcacgtgtcctgatgattgataaccagcctcgctacctgtctctctcgccgatgtgttttacagaaagcctgctgccattgttaatgcttcagtgcagtcacacagatgcagctgtcataaatatcccctaacaactatgcttgctgcttatctgaattagttagaatgctgtttgcagccccagttgtgaaagaagcagtttatcttctacctcctatttatttctttttccattaacctcttctagggaagattttgttttcagttgggataaatatgcataagtttcagatccctgattttattcctacagtagtcaaaatgataaaattccaaaatcatctcggctgaaagtagagttggaaaaataaaacagcaactggaaaactgtaatttgggagatgaaggaggtcttattgccctggctttctctgtttagtaccccatttactcattatctaaggg

SEQ ID NO: 62981 - DNA, 1496 bp, Bovine  19866881387970
  misc_feature (1)..(1): n is a, c, g, or t
ntagttgcatacaagtagtatgcaaatggatacttgtgacgtttatgattcgtttttaaaaaaatttaggagtttgggtcgcagaaaggttcttcatttctccgtgcttccattttcttagtttccaattgggcgcagaaaagagacatatgaatgatggataattggtgacagtcttctccaaattcattttacttgacatttctggcaccatcgcccctaggatcatcctcaccgttaacatgaaaactcttgttcagatcaattttcccaagaacttgtcatagtgttatctcctaattcatgtgctcgcaagcattttttgctgtgaaaaggaaaagtgccagaataagcagaattgcattcagtatgcaaatgaaagttttatagaaatagggttgtattggagatgagattaattgtgacagttcaggaggagttttacgggaaaagatgaacatgttaggtcttcagtggctgtcttccctaatgcatataatattaggcaaaatgaaatctccatgtgcccaagcttggtggaggaatgtttattgagtgcatagaaatttgagcaaggcatgtctctaagagtttatgacagcccattttcttttctcggtgtgaggatgaattggtccattatcatctaaattggaagtcatgatgatggttcttctttgagtctcttgttgtttacttgttaagaaacttgtacaggaaaatgtgttattctgaattaagctgctattatagaatagtcttccccatgaaaagggaagattttatatagggggagatcagatctaacttaatttatttgatttttcaacagagggtaaggtatacaatcggttactacccagaagtcctgttttcaagtttgattgccttttgaacgatttctgcagtgatcatacagaaaagttatttgtgtatattcactttttttcttcttttgctccaaggaaaccaacatgtctgacaaaagtgacttaaaagctgagctagagcgcaaaaaacagcgcttagcacagataagagaagagaagaaacggaaggaagaggagaggaagaagaaagaggtaagtcctgggtgcttgtgcctgtgatcagggaaaaggaaaaccactcagttcctaggggctggtcagatggatgaagaggaccctgtgaaagaatgcgtttacaatacctgcataaaatgagtggtatttacatacttagaacagtaaggtcactgccatctattgtgtactggtcaggcaccacataaatggtcaatagcatttggtccagagacctccaaaccccaggtttaccccagacttgaacagaaccctgaaagtgatctacgatagttctactgttagaaattccttcacctttccgggtctcagttccctgtgcttaacagagaaatagccggtgtgtttattttgttcagtcatgaggatgaaaaaagttgatcttataagcacttagcaatatctgggata

SEQ ID NO: 62982 - DNA, 1615 bp, Bovine  19866881422967
  misc_feature (1)..(1): n is a, c, g, or t
nacacgatgttttgccgagctcaggaacaagatgcaggtcgtccgtccacataaagaaatactcattccaagcgtttctgacaatgcagagcgcactctgcccatcaccccccacctccttctcccggaagcacggggagccttgaagacctgctggcgtgtgtgaagaaaagcaaagcagagggctatggctgctggcttcaaactacaaatcccagtgcctgacccagcagagggtgccgtgaggaaagactgcacgataaataaaactccaggaaaggtcagcaaagatgtgctcaaaggccaaacacttctgccacagacgacttctactgcagaaccagctgcaagcaatggcggatttaacaggcatgactcaacaggcaggaagaccagagacgtttaccgcttccacctcaggaacggttgcctgtctagggaacgccagggtgccctagtagacagtgcccttgagcaggatctgtggggaacagaagccttagtccacacttgggtagcatggtagggctatgtacatgaaacaagtcttttcagtgttgagatccgcaaaaggtacttacacagcctccggcaagaatttctgctgccagtgggactgagccatctctgcgcataaatttatccctcacaaaatcattcaccttgaagaaaaatatttagaaaagctgataaaaaatatagagatagtcatcaaacacacatatacaactgtacataaatgttatttttcttccagtgttttggagtaatcataaactgaataaaagaacgagcttaagactttgctcttgatctcatatatgtcgtttttgaaagccagaatatatagatatgcattcctgatgtttgggggagaatataaattaagagaggtggtttaacaagcctaattcatatatgtctgcaattaccatagcatagagagagagacatattaacaacagaggacacaattaaaacatacattttataacttaaaaacttttagaagatttgattaaaaatcactttcaagtcttctaacaggatttaatctcaaacagcttcatcactgaaacacatttagccgagcagatctttcagcgtggtagaaactcagcatctaagaaatttctcaaggattctcaaagaacatcaagagcattaattaattaagtacaatattctcaaaatggtgtacactacaagcaattttaaggatcaatcagaagattagctgtcccaccagtcacatcggaagatgatgaaaggaaaatttcagcgccaacactacgcagcccaatccagagggaaggtctaactctccggggctttatgaccttagtgatgacaatgtgatcactgacccgttccagaaatccgaactaactacttaccacctgtcagataggagtcgggcactggagaaccaatctgatggagcaccaacttcaaccagaactcagattcctcaacctgttgctctggcaaatgttacacctcgaacacaaattacttgtgtacttgagtgatatgttctggagtcagaaaaaaactgctttggattctagctttcccacagatgaactgtgcaaacgcaggcaaacacttcccc

SEQ ID NO: 62983 - DNA, 1101 bp, Bovine  19866881518419
  misc_feature (1)..(1): n is a, c, g, or t
nctcctgctttttctgtttctttttaccgaccagcccacaggcagcttttcaatagaataacaataagacccagagacaagtcttcccaaataaaagtgatacatcctgctactcattcagaacacaactccagtgtgtttacttttttttttttttaaggcaattttatttgcttcccttgtagctcagtcggtaaagaatctccctgcaattcaggagacccgggttcgatccctgggttgggaagatcccctggagaaggaaatggcaacccactccagtatccttgcctggaaaatctgatggacagaggagcctggtgggctgtagtccatggggtcgcaaagagtccggcacgactgagtgactaacgcgaacacgaacgaacaaacgaattttattttcttcgtatataaacattaagtccaattctttaaaataggcttggacctggtttaagtttgaaatccaaggactattccagagaaatgtcagaattttggatggccatagagactgaggctggtggaaataagtttttaatggaagttttaaacttatgtccaagctagaacaaaggaaggacataaggattttccccacaaagtgctagagagaaacaaacaccagaatttgcaattatgatgattttacttacaaatattatggcatatttggtaaaataaatagatattttagaatgaattgaatatttagccaggtaaaagaaaaggtgaataggagaaccacggaacagaactgttaaaagtcttgaattgtacactaagacattaaaccttttacattgggattagaaaatccagttatttctccaagagtttgctccccattccaacttgaaatggaataaacccccttgtgtgggaggtagaatttgaggggatttatttcttctcaagttgaagggcatttggaaaaagcagacctttgttattaatgctcaaaagcatccaggtgcttttttttttctgttggcaatgctaatgatgaagtaaagtgattacaaatgacagaggaaagaactaccatccttccaagcataaaatcaaagcactgcagttcaaatcacaatgaatgtg

SEQ ID NO: 62984 - DNA, 1024 bp, Bovine  19866881726003
  misc_feature (1)..(1): n is a, c, g, or t
naacatacgagggattacattttaaagtatagcttagcagtcttttgagataagtggaatttgtaggctacgccaagctaatccctggcttatgttttttcatgggaaaatttgttttctgactcccaaataaccacgttacccaatacaaagcaggcttgtttggaacttgtttgtatgctggcaattcctcacacttggttggaagtatttctcaaataatgacatataactagtttgtaattagaaattaatggttgttaagcaaaattacagaaataataatagtttttttcaatgcttctcaaactatgtgtgctgaaggacaggttttctttgcctttgtaaagtacagtgaaagtgaattactagaaaatgaaatgaaaattcagacgtacaaaataggagcccaaatcttttataatttgattcagcagatgtaaaattactttgtcaaatttgtgtaacagttctaaatgcttattctcaagttttcatacttatcttaccatggaccagaaataaagcattcacagaccaaaaatggtccttggaacacaagtggacagcctttcgtgatcgtattttaacactttaaagttctttgcagtatattatcacgtgtaaaatccccagtaatttatgaaataggcttcttgtaattattgtcattttgtatatgatgggacattcgtccctccatatcctttttattttcttcctctcttttccttttttttttttttttaaggagtcatatttttagttttttaaacatagaaatacatggaagaggtgttataaaagatagttattatcagtaaaagaaagatttgctttgtagatgcttcatactagtgctccttggagggtagagttccctaccaacttacggcagtgtgcaaattcaaagaaaaactgaatgagtttttccattgtgtcagtgtatctctagaacatatgaataaacaattttgagataatgtggaagttaatcagagggtccactgacccaagtcatttt

SEQ ID NO: 62985 - DNA, 914 bp, Bovine  19866881820151
  misc_feature (1)..(1): n is a, c, g, or t
ncaagcagcctgttgggaagcaaactctgttatttctctaccggcacaaaacctttttgtgtaaacggaggtataaaatttgtgcatgcttagtcgctcagttgtgtctgactctttgcgaccccatggactgcagcccgccagggattctccaggcaagaatgctggagtggattgccatgccctcctccaggggatcttcccaacccagggatccagccctcctctcctgtgtcttctgcattggcaggcggattctttaccactcacaccatctgggaagccctctaaaatttgtaggtgctacataataaactttaaagaaaaaaaacaaacattctggtatatttccactttgcaagcctgtttcctctttccttgccttcctcctgggtccttctttcattcatcacgctgcccttcctgtcttcctttcttcttttttgggccttgctgagtggcttgtgtgtggctgagttcagagcacaagcttagggaatgattgatcacatcagaccttccgggtctgcttgtccagcagagctcagcttaaagccaggccacaaaactgctgtggtcaccatgggacagaattgtattgatgatcacagccactggcatttattaaatactgttatgaattatggtggttggtccatgtctttacatatgcatgcattcattctgcaatatatatgcattcattctgcagatatttgcatttaccttgtacccagcttttctagctttgaggacagtacagagaacaaaacagatctcacagatctcaaaatgttagaatacattttcataatctcttgcgcaatagtagtttttacaaagtgatttcccagggtggtgcaagtggttaagaatcctgccaagcaagagacacaggagatgcagggttcgat

SEQ ID NO: 62986 - DNA, 1371 bp, Bovine  19866881634725
  misc_feature (1)..(1): n is a, c, g, or t
ncgtttccgactctgtgtgaccccatagacggcagccaccagactcccccgtccctgggattctccaggcaataacactggagtgggttgccatttccttctccagtgcatgaaagtgaaaagtgaaagtgaagtcgctcagtcgtatctaactcttagcgaccccatggactgcagcccaccaggctcccctgtccatgggattttccaggcaagagtactggagttagtcagttataataatgatagcctgcttttgtggggtctgtcacagactatgtagttagagttcagattgtcattaaaagaaattggagcaacgtgtctcaggtaaggaacaataaatatgcttattttctgccttagaaatctgataagatattgtctggccaataaaatcttttgtatctactattgttaatgcatgagaagaaatttaattttctgtcatcaatatatatagcaatctaaattaattttaatatttatttgtaactgttaccaaaataatgagtactacttgaagtcatatgaaaaatgaggtacttggtattctaatgttctaaattagagcttttgtaatacatagaatctaatggttttacctaatagccaagtagaaacatactgtacctgcaaccttatgatctaactattttgtttttccctctccctttctcctagtagccttttttttcatataagcataaggtataccaaatgccatatgttaaaaattatatatatctttttttttcccttctcagtctaaagaactccaaataaaaaagcagtttcaggacacctgtaaaatccaaaccagacagtacaaagcattaagaaatcacttattggagactacaccaaagagcgagcacaaagctgttctgaaacggctcaaggaggagcagacccggaagttagccatcttggctgaacaatacgaccacagcattaatgaaatgctctccacccaagcagtgagtgtgtgttatttaggcaaaacaaattcagggccactttccttccaccccctgaaagaagtctcagtaattaaaacactaataggaagtggtagctctcctacagcctgggaaatagtagtggttatctgtatttttcctgtctctgcattctttggaagtaggcatgatttatataaaattctcattgatacacttagacatgagattctaaataggctccttgccagtgcctctcaggtgtttagcacatatcaataccaagagtatacctagattagagcaacagcattgttaggcattgggcaaaaagtagtactgtattagaaatctaaatggtcacattttaatggaggcaaatacaaagtattttctatgtaagttttgt

SEQ ID NO: 62987 - DNA, 1547 bp, Bovine  19866880234003
  misc_feature (1)..(1): n is a, c, g, or t
nccttgtggctcagctggtaaagaatccacctgcaatgtgggagacctgggttccatccctgggttgggaaaatcccctggagaagggaaaggctacccactccagtattctggccaggagaattccctggactatatagtccatggggtcacagtctttgatcctcactttattcatcattaaaataggtatagtgaaaatataatacaactataataactaccaacagagtttctctaagaataaagtcagaaaatacttcaaaaataaaacccctttataccatgtcaggtacttggtaaagtctcacgaaacatcacctgctatgagaattgctgtaacaacacctgtggaatcttatttggcgccagaaatagaaaatagaaatacaaaataggaaatagaaacatattgttaaatgacttaatttctaatttttaatatgagatattctgttggcatttatgctaactgtccacaactaccttgagcattccaagatgctggaggaactctccaagtaagagtgaatttggaattttcaacacatcaaaatgtgcgagaggaattaactagagatggttttattaagtggctctagacaggggccaccaagggtactggcagatcctgttggtcggttgttgcaggtcagaagcccagcagcttgtgttgaaagatcagtgatgataagcaagtccgttttgttccaacctacccaagagaacagtcattactagatataatcatgcttgtcaaaagcggttactgaaaaccctctgctgcttcagcataatcagaacgacagaagctgcaggatggttttccttgtgagaggcgtccaagcagaatgctaattaggtgaagtaaaaggaaaatggatcagcagctgagagatgcatttctctctagtgagtgaacacaagaaaggaaataggaggaggaagaatgtgacttacctgtgttatggttcatgatgtgattctcaacgttgatttcaggcttttaattctcactgctgattttttaaagaggtgctgggaaaaaccacagcaaagagaaagctgggtttttctctctgaaacattggaggtcctttcattggaaataactttgtgcagagaaaaaaatgaccttaaaacccagtgccagttgttatcatccaaccccctggaaagaaagctatcaaaaaataaagtttggagtttatatatatatttttttgcccacttctgctgtcttttgggtgacctcagatggaacttgaatccagtgacaaatggacccaacgactaagatctagtccccttggaataactctggtatttctgcttttatttccttccaaacattcaatttgaaagagaaatctaaacatttaatcagaaaatctcacgtggttgttgtctaggggaacatgacagagggcttcctgcctgtctaaagcactaatataaactcttcacaagcagaacttcatataattctcatagcatactgagaggtcggtctcattactctcgtgagtacctacgtaagaagtgag

SEQ ID NO: 62988 - DNA, 2557 bp, Bovine  19866880345231
  misc_feature (1)..(1): n is a, c, g, or t
ntatccaaggagaaagtggttcattttcactaaaaagaacagatttgtattggcctgaaggcttcaggtctgtattgctacaagttttttaaccaagacttcagaacactgcctatgtatttggtgaaaatatttattgatcaagtgtataaccagttagtatactatcactcctactttgtattaagggttaaaatttatagaatctagaaattatctcagaggtgtttaagaatcaaaggaaaaataaaaccttttttttttttttttttggtgcaaaccattgttctagaaaacagccaaaagggctagaatatttggaaaactctcaaattattagaatcacaaaaatgataatttatagacaacaatcattaattactgctacacataagagggatatccaaatgggacatttttagttgtagatcagccaagagattaaaataagcatgtttacagagacataactatttaaaatatttatagagaaaacagttgcagatgattcaaagagagattccaacaaaaacacagcacaaatgtagacaccatatggttcaacgtatgcactcatgacctcatgtgaaaagccggccaaagacacagcagctggagatacctcccttttacccacagaacaacaaactcttgggtttggaagggactaattataatcatgtacatggatgagtgaaatctatgggtaatgtcaaagtcttcgggaagaaatctctcaaaacaattgtttctgaaagcctttgctttgttggggtttcaaattcagtctccctttctttctgactccatctaggcaattcaggcaggtgatacacagttttaatgaaacaagagaagcatcacattctttctgggctcttttgtcatatcttgataattcattagcaagataattatttgaggggaactgatgcttgtaagaactttctatcaaaagcctttggtaacactggggaggggaagggaaggaacgtgagggccagggatgctcatacatcatctactgagaccagtggtcctgaggggaatgctttcagtctgcaatgtgcctctcctcaaaccacctcagcttccagcctagatccccaaggtttacagtcaaactcctccaagagctgaactgcccagaaactatccaaagagttctgaaatcatttcacacaagacccctctaattttttgtttaaaataaacacctttctctatcttaattgaaagaagacaatttgtagccacagtgaggaagggaaggcagggttattttttgtcatccagggctgcagaacaagtctgttgggcagtataacatctttgggacagaggaaaagccactggagcatcttcctcacttttgaactttctatgaccataaataataatgtgcttcactttgcagggcatgtaatgtgagtcaagatatgacgatagaagaaaagagtgatgagctaagtgctattgagaactcatatggcccagcaacatttgttattaccatattctgtgctggtttgttttgaactttgttttaaaattccatggctgatgacacttcaaattcatgaggaatcttctataacagaatgcttttgtctatggattagtggaaatttgatgaacacgtaccagtaagttgaggccagtccatttttagatactcagtttaagtctttgcaaagaaattcctaatgtgggcaattaagcaagcataacctatcaaagatgccaagccttccagataatgtggaattctgaccatatatttaccctggaagctcttgctctactcaaatactttaacttttaatgaagtgttcagtccttttgtgatggcactgaagtgtaatcaaacatcaccacaagccaagtcacacactagcatgtcttgccttgtttaaatatctcaaacgtatttgagtaactggtaatgatgtctaggcctctggttgtccatatggtctgaacagactgtcttttgtagagcagttgtgctatcttagtgagacaaaaccaaatcatctctgctccaaagtggagagcttaggagggtcagattaagttggtgccttacctcaactcttgaaaccaactcacattatagccccagaaattgctctgttgtctgaaaatcttgcttgcatttgtgaaatacacaggaaccacacaccaagcatcatgtgatatgtactctgccacaactgtccttaggatgcagtgacaagccatggatgatacaacaaagccagcactgaaaccacacgtaatcgttctggacagcaaacactctacatggtggcaccacttcatctcagacagataataaggatcagtgaaagggtctgactgttggcaagaactctgctctaatgctctctgggtggtatgggtattgagacaagcaaggtagctgctgatttttcaattaatgaaacttaaggggagttttagggatttggcttaagagctcagaaactaaaataattactgggccttaataattattcgcattatctcccgaggaaagtatcccagggacgat

SEQ ID NO: 62989 - DNA, 1427 bp, Bovine  19866880407691
  misc_feature (1)..(1): n is a, c, g, or t
ntctctaagactgtgtatggtctccctccagcccctgtgaaactcgcctccttgtagtgtctctggggcctgatgctgagggaacagtgcttggaggtgcatatttgaaaaacactgttttatgctatttttttttttttttcaatttctttgccttcgtcagtcttcgtttatgtccacaggtcatctgtagcatgatttatacactattaaatttttcctccatatatatgtatgtaattttaaaaataggatagttgaacctctatagaacttaaggttttatttaagtcacataagctcctatactggcattagtgaattgtcactcacctatgcatattaaggaggcataatcaaattgctgctgaacccagaggaagagcagatcacctcaaatgatcatgaaaaaatccaatttgagtcttttaattgttttcttgtggcagtcccacttgcttagatattttctttccatcttcatcaagcatcttccgttaaggacaaaagagtaaatttcaagtcatgcagtttttatgatgtcaatttttatatgtgacagttcctggtagggaagtagatacaactgagcaaatatatcttgcttttcataagaaggaaaaacactaacgatcatttctgatttaagtctaaataatgtaaaaagggttttacaagagctgttgagacgaagaccctaaaacacttggcagttgcctttctgctgtggtctgagctgccctgtagggtcagctgggacatggcacaaatcaactctttcttcctgtggttcaaggatactaattttcttaggccttctaaatgcttaccagaatgtaaatcacagcactaataaacccatttgaagtctttagattgttatgagtattttatttattagcaacatataaaccaacatatgtgtttattgttgttaagtgtaaacatattgaggatgtgaggcttatacatccattatcagtcattctttcgaatgtttgttaaaatgttattatttgttatgcaaaaaggagtgggcatctggccctctggctaaagtaaaggactcaaggaagtattggacaataattattaagtcagtgaagtaaataaagtgtaaaatcaccatacactttggctctgggggaaggacttgattggagtgggatcaagacctttgaaaggctcttgaagaacaggaaaatgtagggattttttttgagtgggaatttatgtagggaatttttgagatgctttggtttcaaccctgtaagccagaaggcagttattgtactagttaaatgtggaaataaatcagtaggtatttatagggtaagcactacgccaagggaagggtgcagagcagtaaacccaacccttttagtctttagtgattttgcaattcctttagagagataagacataaa

SEQ ID NO: 62990 - DNA, 1756 bp, Bovine  19866880457569
  misc_feature (1)..(1): n is a, c, g, or t
natgttcccattccctttcctttggcacatattctttcaaatttttctatctatatgaacacatattttccccacaaaaatcgaatccttttttacagaatattcagcaacttgcttctatactcatattatatcaagtgtatctgcagaacagagtcccatcctctatagtttgccttaattttttaaccagtccgcctttgtaatctcttttctacattagagtgctacaatccatggactcgtgaatatatttttgtaagactggctatgcttctgttgaataaactctgtaagttaaattgctacactgaaggacagtctgcacagaattaggaattatcagaatatccactaagtagggtataatatttacatacttagaaattgtattgtcagctccatctgatataactaaataccaaatattgagtggcttaaacaacattaatttattttctcctagttacagaggctggaaagtttaaaatcaaggtctggcaagacttagtttctgatgaaaattctcttccttgcttgcacatagccactttctggtctgcacattatggccttttctccctatgcttatgcagaaagagaaagagggcaagctctctcatgtcttctgttatcagggcatagtaccaccacaagagtcctaccttcctgacctcatctaactgtaattatatattatatatggccataataatatctcccaccagtcccatcttcaaataccatcacactgtggattaagggcttcaaaatatgaattaagtggaggacacaaacattcagtccataacaacagtattttgagggtcctaatcactagatttgtaattggcaagtcttcatttgcatgtccttaaatcacctcttccaaccctaaatgtgtttcaccagttttaccttgacaaattgtgtggtggtttattcctctatctccttttccagtttttacagtggcagaattgctctaggaatatgtggtatgtttttcctttgtctgtctaaagtggtctttggctgtctagaggaagacgcattgcaggctcttatgagtatagggggctgtgatatttgaaaatccaccaggatgccctgcaaatctgtttgactgcattgttcttgttgactggattccatttacgggaggggacattatcatttcacccttcattacactgtcagttttctcttgcttgctgggtagatgtttgagaagacatttcagtgttttcagttcagttcagttcagttcaattgatcagtcatgtcccactctttgagaccccatggactgcagcatgccaggcctccctgtctatcgccaactcccggaatttactcaaactcatgttcattgagttggtgatgccatccaaccgtctcatcctctgtcgtgcccttctcctcctgccctcaatctttcccaacatcagggtcttttccagtaagtcagctctttgcatcaagtggccaaagtattgaagtttcagcttcagcatcagtccttccaatgaacacccaggactgatctcctttaggatggactggttggatctccttgcagtccaagagactctcaagagtcttctccaacaccacagttcaaaagcatcagttctttggtgctcagctttccttacagtccatctttcacatccatacatgactattggaaaaaccatagccttgactagacggacctttgttcgcaaggtaatggtctctgttttttaatatg

SEQ ID NO: 62991 - DNA, 1935 bp, Bovine  19866880506444
  misc_feature (1)..(1): n is a, c, g, or t
ntttcccatcatgctcactacagagctttaggagaaatgattcagaaaaagttagttaactggccaccacacataatactgtctcatgtgaagcatgaaagtactttggaatagggctcttggaaaggacatatccttcttgtgatggagttatctcagtctgcactctgatgccaacaggagacaagcctacattacatgagagaattcaggggaacccccgggcctctcctgcaccaacaagaatagactcagttgctacacacagtgataatgacaaaaagcacatcaagaaccatgatcaccttttggaaagaacaaaacattgtcaatctttctcaaaacactagtataaagataaatgaattataagaaatgttatttaagaaagaaatcatgtgccataaatttacctaaaacagagcagtcctggagacagtgttcccattgttaataaaataaaaataaactgaatcatcattaacaaaatcaaaaccactcaacttccaactcttgcttaccagcagaaaataatagcccagagtgtccttttctgagcaaatatccttatcatctaagtcaaattaagtatgtttttaaaataattttgattattacttgcaggcaaggaaaatcaatttaaatgtgctaatatttcagttattatataaggaactgccactgagcctgaggagaactgttactctatcatatctattagaaaggcagtgttcttttaataataagttaattttctcttgtatgaattcctcttttggctttgcagatgggactacagaattgtgtttttttaattaaaactacacactggaaataaaaatggttttgaagactggtattcaaaattgagatctgagaaagcagcagttttgtccatagggtacaccttcccccttaataaccaagcatttccttactaaataaaaatgataacaatatagcagaatatacatcctggccttgaaacaaagcacctacaagctaaaaacttgcaattcatcaactgatacatactacactgacttttaagatttctaaataattcttcctttttagtggaataaacacagaagttaactttatatatataaaatgctagaagccatggaccatagatagtatttatagctctggtgaaggcaaaactgccaaggggaacagcaggggtattaaggcatttcatttaaaaccacatcttatttcttgttacaatgactccacatatatcatgcaacaatacagaatgcacagtctcccctctcctcccctgaaaacactgaaatcaaggctagcgttaaagacattggagatgtcacactctctgtcatggtccagaagggggaaaataggacaccaagtcaaagtaaaaattggatcagaagaagaaaatgattttttgttctacttgtatttcattttttggttccagatctttttggcttaaaaggagaaaagatggaaagaaatacgcagtgaagagtggggaaagtaatggaaaatacaattccacaaccaaagtaacttattactgggaaccctactgattctatcaggtgaacaaattgtgcacaagtgaaaaaagtttttaataaatatccctaaaattggagcagggacaattatggccaaaaagcctttaaacagaaacataaaaaccatatgtaggacttccctggtggtacagtgaataagaatctgcctgccaatacagaggacacagacttgattcctggtccaggaaggttccacatcccgaggagcaactaagcccatgaaccacagctattgagcctgtcctctagcgcccctgagctgcagctactgagcccatgtgccacactactgacaaccatgcacctagagcctgtgctccgcaacaagagaagccgccgcaacaggaagcccacataccaa

SEQ ID NO: 62992 - DNA, 2844 bp, Bovine  19866880539941
  misc_feature (1)..(1): n is a, c, g, or t
nttttaaaagaataagttagagctaaatatagccacctaggaggatgttcataataaattgttaggttaaataaagcaatttgaataagagtgcacattgtatagtcccatttatgttgaaatgacaacaacaacaaatgtgagaggtgggaagattaaaaatgtgcattgatttgtctgaagattgagtaagtaggggatggatagacactatattgataatactgattatctaggggacagggtgattcaagaagaaagagaagaaaaatttttttctctttttacctctgcatattcaacttgctacaacagccacgtagtacagctgtaattttcaaaatgcaaaggagaagagctgactttggcttccctggtagctcagtggcacagaatctgcctgccaatgcaggatacatgagttcgatcccgggtctgggaatatcccacatgctgcagagcagctaagcccatgtgccacaactactgagcctgtgctctagagcccgcgagccgcaacaactaagcccaagcactgcagctactgaagcccgcgtgccctagagcccatgctccacaaagccctagagccatgctttcaccacagtgaaaggcccacacacctctactagacggtaggccccactcccagcaagtaaagaccttccagcaatgcagaaccgcagtcaaaaaaaaaaaaaaaaaaagctgacttttgttaaatagcaaggagaggttcgctttgtttactggcatgtttgagatggcttatcccccagtaactagctgtattatgtgtgtaaacagagcatccttagagtttacttcctctcactccaggaagattagctccaaagtgacacctgtctttctctgccaaatgatcaccacatgtgaccagaccttataactcataggagcatttctcccagttttaatgtctctttggtaaaatcttggcaaagtgcccccccattccctgtcagtgagccccatccaaagcaggtgctgtggggctccaatgcgggcgaggcagccaagccaagggacagctgcagctcaggatagcctggacgaggcccttggcaccacagatccacgcagaaatttcatttaataattaagagaggtttggtacttggaaaatacttccctagggttgtggatgaccaaattacacctaggtataaaatttttgcagagcttttaaaaagacctcgggtattattttgtgctccctccctccctcccttcctaacccttccttctttgtttctctttttctttttggtcttatgaaacatacaacaagagaattaggaatatacattttaaatgatgatcatatcatttatttagtgcttacagtgggccatgtattggtaaggatttataataggtaatttatgaattgttaatgtaataattgctgtaacaagtaaacctccagatctcagtggctcaacacaactactcatttgttgttcttatcacagtctaggtcaggttgacaggggccagatacccattcagccactcagggactcaggttccttctatcttgccactataccttcctcttagttctcagagttctgtccatcagctgactgatgaaagaagaagacgaggaccagacattggccaggcctggaaatggtacttatcagtgcatttatactccactgggcagaataaggggcttccctgatagctcagttggtaaagaattcacctgcaatgcaggagaccctggttcaattcctgggtgaggaagatctgctggagaagggataagctacccactccagtattcttgggcttcccttgtggctcagctggtaaagaacccgcctgcaatgtgggagacctgggttcaatccctggcttgggaagatcccctggagaagggaaaggctacccactccgatattctggcctagagaattccatgggcagaataaaatcacatgatcatatctaatagcaaaggacgttgaggaatataatgtagctgtgtgttttgtaagaagaggactcacagatgttgaagagcataagtagtctccacattttatttgtattctgtcacctacaggtgacaataactcattagtctataagcttaagatggcttttgtttcttcccttagtttctctagtactgtgtagtatgcatattaaattaatactgaataaatgaatgaatgacaaaactaaggcacagaaaaagttaaacaacttgctcaaagtctccagagtatttattgtgaacacatggattgtgagcatctatattgagtaaaatattcagggaacctatcgttttatgtattttatgtcttaagatctttttttaaaatgtaatccattcttttttatggtaagctacaaattttatcatctggaagctctaactaactcagaagataaaaatacggttttcatttgagccattcagtggagaatcaaggctaccatatggtttctctagtacaaaagtgggaaagatgtgtgtacctcctcattctttcttgccttttggataagttaaaaattcaggttcaaggactacctaggggcattcagtttactttatatgactatgtatagagtttaaattcctttcttctggccttgagatgattgataaaatcagaggagtagtgaatatgaaatgtgtacctccaacttccctaaagctcaggaagacagagagaggccaaaatgcacgagactacctctccacatccacttctctagtgagcctgggtctgagctagggccatgggaactggaaaagacatagcagtctgactcttggtcttcaaaagacttagcagt

SEQ ID NO: 62993 - DNA, 767 bp, Bovine  19866880554147
  misc_feature (1)..(1): n is a, c, g, or t
naaaacatatgtaatgaattcagacctaattggccatggtccagcccagttctaaggagggcattcttggcattttggaggtcagaggagagattttatttgaaccttgtcatgtgtgtttcccatatgttctatttaagttcgtttattacattcactggatgtacccattgccttttaatttctggacagaggtcagatcaactggacaactcaggttcattatactatcaatccagtgccctggtgcaaaagacatctacacagttgtcccagtatatggaaacagttcacagagcaatctagagtttgaatgggaaagagacctgcttaagattgatgctcattatttggccagaaaagaatcctgattcagttgggaaatttactttgcagttatagtattagggtgtggctcatgtctccaaagtttacatggaagctgtattataaaaaaagtcttctgagtaaaagcatccctctgtagtattcttgctgacctattgaatttccatggtctgctcatctcagaatttcactgtgtgggatagcggagggaatggggaattctggggcatgctgctggttgaattttaatttgtttgtctaacttcagcagagaagtgaaaaacagtgagtagcatgttctatttgtctatcagaggaaccattcatttgatggaaaggctcttccaaatcctgttttcatttcctcttttctgttggagtccgatcccagttataattatcaagccttgggtgtgtga

SEQ ID NO: 62994 - DNA, 1271 bp, Bovine  19866880554614
  misc_feature (1)..(1): n is a, c, g, or t
nttgatagctggtgatttatatgtgctttttctattgagttgaaaagcaaaaacattcgtatcaataaggattactgaatattattagactcagatgtgactctaacttcagcttcagtgtttcagagtaggagggaaagacgtcttggatttcttgtctagttggtgtccatctctccaggttattccttttgccctgattcactacctgatggtaatccagccattaatgtggtctctgcataggtctctgatatccagctgtttctagaacaaagtcccaaaattattcttgcctccaaaactttgtttgccatgtttctttgggctgaacgctcttttagcaacgtcccactttcctttagagctcaacttaaatgtaattttttgggggaagctttgtggcttattgttactatgatttttcatttagctctttatagggaaatagctgttttctttatgcatgtcttccaccctctgtaggccacctcatgatgttccatggctcactggtgatacaagtccttcaattactctagctacaaaagcatcaaagattaatctacactgttgcctgtgcgcttagtcgtgtccaactctgtgaccttacggactatagcctgccaggctcctctgtccctgtgattctccaggcaagaatactggattgggttgctgtttccttctcccatgtatcttctcaacccagggattgaacccacatctcctgagtcttctgcattggcaggtgaagtctttaaccactaagtctcttggggagccctaatctatactgttacagagtgacaaaaactatatccagattggagaagagaagagattaacaacagatggagtgaaaatgtaaatttaaatatcttactcttccccccaacatgacagttcttaaattgttggtttctgactcttcatataaggatggagtgtttagaattaatcctgggacaaatcagtctcattttgtccagatttctggacagatcttttgatgaactgatggcatttaatgagaatagagatttttcatttttatttctaggaccagttgagtttgaaatctgtgactgtagagagaacctgggtttcctctgtccttatctcttcaggtggtcagtatgttaagtttaagacatgatcgtaacatgggtactaggataatgatcaccttctgtacatactgattggcacagcatgtaacttttactccatcacactcattggcagtccctaaaacaaaagctgatgat

SEQ ID NO: 62995 - DNA, 4622 bp, Bovine  19866880622577
  misc_feature (1)..(1): n is a, c, g, or t
nttgacctggccctcctgatgttcttattgtgggtcacttcaaaaagcttcatctggtttgggtcctgaaaagtgagatgtgcagcatttgcttgggccaccgcatttatgggaatctgaccctagctgccatttccagtgaaatcattcattgcagtgtttcaacagagagaacagaaatgacttggatctgtgggtatttgcactgtcaggagatgatcagtgttgactggttggcctattcttctaagagcctttcagctgccctctcagcggctacagttctgaagtccatgagatggattatttgcaaacaggccatttgctgcatgaccaggagatgtgaaagaccagaaagtctctgaaatgactgcacagatgggagctgctcacttccacattatagagaaagggaaggtaccctggtgacccttctgacatctggttccattttattccttctttaaaagctgataaataggaaagttaattcattcactggcagaagatccaggtttgattgcttcatttactctgattcactccaacttggaataaataagcactaggagcctactgtcagccacatcaaacatatatctcctaccaccctcaacaaacaaccccaactgcaagacttagaaatgggtactgtgctaagctttttaaattcaaatacacttttagacttaaatatccttaaaaagttaggtaggtttttcagtcagacttttcagcaattctgaattaagtttggaatcagctacccagttaattcaatccttttttgataaaaagcttgttgaagtcaagtattaccttaagttgcatcctcaagcatgcatatgggatccatatgatgtggccatgactccattaataccagggcgattagagcaaagttggatggtgatggagctaaaacacgaacttcttctaaacaatgattcaagggagaagcaaactggtccgcaagatgtttcacaaataaacgtttgcatagcaggcactgctgatattttctaattttgatgaaaggaaaaaagacatgtggagtggatgggtatgtgtgagtgtgtgtgtgtgtgtgtgtgcatgtgtgcacagctataggaaatgaactatactttcttaacattcaaaagcagagtttactttattactctttatacttttatatcttctttaaaattggctaaccacagaccaaaagggatgtctttttgtcaacacattgcaactagatcaggggtgcaaacatgtggtgccctctctgccatgcccctccagaatccacagtgcaccaaatctggctgcccttcagaatcctcctaaacacagtgctccaggcagcctctccccagggatcagaatggaccatgctattctgggctgtcttggactaggcctaactccactcacttcaaagagagctaaaacgatgctgaaagaaaatggttacatgtcagctcactaaacagtgctactggatacagcataggcaggacaagggggaaaatctcaacggtttcaatgaaacacaaaagatgttgttgagtatcttcaaaccagcaggcaccgggcttgggtaatgttccaactccatcatgatgaatttccagggatcttgactcttatttgttgtatcaaatgtaattttcaagaagttggtctcaggacttccctggtggtccaatggttaagaatccgcctgcccatgcggggcacacaggtttgacccctggtctgggaagacgccacatgtcacggggcaactaagcccgtgggcagccaccactgaagcctatgcactctacagccggtgctccacagccagagcagccactgcaacgagaagcctgcgcactgcagccagagaaagcctgtccgcggcagtgaaggcctagcaagttccaaaatgaataaataagtagatcgttttttctttaagttggtttcaggctggagggtgagagatcatttgtttcataaagctacctattatgatgtatatttcaaactgaacagagtttaaaaattttacatatattggcaaacatgaaataaataagttgcaagacatatatggatttatatgtaaaaacatgatagcaaatatatttaccctatattatttgcatatgatatgtcaaaatgctagttataaactattaaaacagcttttcacagacagtattatgaattgagcatttcaagtgaaacctgcaaagtgtcaccactgtagaactgaagaaaaccttttaaaatcataaaaggagaaacacagaaataagtatttctcttaccagtggtctgagttctggatgcgtcaggatatatccattatttgtgattgcaaaggcatagccatgaatccctaactgtaagaagaagtgagaaagaaaccttcattagcttgctccctggtgaattcacaaagcagaaagcagcccgacatttagtaatttacagcttaaacttggcattcataacccttatcagcacaatatttcattaaaatgaatgcaaggcactgatccttgacatttggtggaaatgaagacctgtcacaggataagctcagcaaatagcacaatttaaaatgtcacagacccatgttggcatccaaagaccccactttgatttatttaaaatgaaaacaattataatttttaaaaagcaagtggctaatgtttctggagactctatgtccaagtgaacagaattttgtcaacctgggtgtcttttctctacctgagataagtaaggcaagaggggcctccctctgatgcaccctaggctcccgacaattccatacccccaaggccatctcaagcatgcattctcctaggcagtcattttccgtaattcttcaaggagaaaagtgtccccacaagcctatataggagcctgccaaccccttttacatcctttcgtctttaaactgtgaggccgccaagcttttccatgcatgcttccatcgacacaaagcctgggtaattttctatgcagagcctcacttaatttatgttttctgactaaataggactatgggaaatagtttgagagcaatgaaatgttttattagctttaaaaagtatgtaatcaaatttaacactgcacttatttaaataataatcccagctttttgacaatatttctattacacagttgaatgcatccattggctacaataaatttacctacaaatcattcatgtattaaaatggcctctggcataaaacccatactgatctctctctctgaagaaagaaaatgtaacccacttttgccggagcagtgaaaggggagaagaaaaaaaaatcctttttcccaatgagttatttcatagtcctgagccctcactgttattttctttaaaattctctgctgctcgcattcttgaatatgatactattaaatgatccagacaacagagtttacaaaccaagaatgaccctgtctgcttgttagcttaacgtcaaggtgatgtgaaattaacttcagagaatttaacaccgggcaattaaaagtattccttgcattacaaaaagcaaatacgcacgtggtagtcaagggcaacagacattttcttctggagttaccttacacagcaagtcttaataagattctacttgattctaatgataaaagtatatttcattatgctgtgaaagataaaccagagatttcctatcctttgagatgtatatcgtctcttttcatcttgtctcttggaaaaatgtcagacacagtcagcactgcattaattacctttattatgtccctgtttaatacagactgaggagtcaaaacggactcagagagtttgactttttccattaaaggcaaaagtggtctttggttggaaattcaaactcacgatgagaccaaacaaatgatattttatagtcaactaatatattcagtggcttctaacgtacattccttcacttcttggtttgcctgtaggaagcaatactccaaagaaagtaaaactccatgcatatgccccctccaagctctctacttttcttgtgtagcacttatctaagtgataatcaattatttgtgaggttgactataaatagtcaagatatcagtcaaggcctttgattatttaaagcctatctccctgccagaatataagttctgtgacagccaaggtcataccatgcagttatagagggatggctaggatgaagggaagaggggtcaagaaaggaggaagcaggaaaggaggaagaagggaagtaacagaagctgaattgagtgcagatcctacaaaagtatcctgaactctctgcttctttcctgggatgcagagactgaggtgaccttcccacccaatgtcctccactcattgtttagctgccatcttgcttccttgttgctcactcacatttcattctcccagaacctgcctctgtcatgccccctcgcccaccaaaatgccaccagaactcctttctctacagttgccagtggcctcctaattgccaaaccatatagaatgtaccctcttttcctggttgtcttagcctactgacccctcttccttgacactctaatccctcagtttccaggccccacactcccggattccctccctttcgtaggat

SEQ ID NO: 62996 - DNA, 2746 bp, Bovine  19866880628772
  misc_feature (1)..(1): n is a, c, g, or t
naagatctgggttcgatcttattcccccagggtccctcccatcttctaaatcagaatatttttaccatgtcctctaggttaacaactcagaaaccttcatgtcctcagaattgaaacagaggtgatagtgataatatctccctgtgaggattttatcaaatcctcatagtgttctgggtagttaagattacatcaggtccagcttctttaacttttatcaaaaaagatgaaacagtctatagtggtttgaagcccagggtccttgcgggtaacttggattctataaggagtccagacaaggaaatgaaattaatctggggcctctgatagagggatggcagctccttagcagacagattggtgaggggtgaacaatgtatcagtcttggagattcagctgcaggccagcaccctgcatgaccccctcatggccgcccggggcggccctggagtcagtctgcggcactctgggccttactgacgagccatcagggagccttgggctgggctttctgtctgtggcccctggtggcagtagcaggggtgggtggtgactgagttccagtgtcccggggtactagtgggaaaggctgacccctgtgaggacatcccccgcacagccctttcccctgggcccccagcactctggcttcccttggagtctcttcactttccagtcagatcgtctttcccatgcagtcagtttaggggctggaggcaggtggtgaggaggaactggcccaggcagttgccatattgtcctttcaattctgagattcctctaggcctcagctttggggactcaaaaatccagaattgactcctttgttctctgggttcctctgtacctcccttccccgaggccctaagcatggaatgctttagctgagggaatggagaagagccagggggtgccaggaaactctgggaggaatgttggtaacgactgtgtttcaaagtgttatccctcaaagaaagcacgagaggcaactgattaactgcctagtgcctggaatacagtgcatttgcttgttcagtcatccagtcagtcagtcagcctttactgagagctactgggtgccaaggaacctttggagaagggataaatccctgagtagaggggcactgaggtcaggcagcttggctcacccttaagacctctgcagtggtatctaccctgctgagacagatttgaacttcctgccaagtcagagaaggaagcacccgccctgccccatggtccaccctgcccccacaccagaacatgatcagtgcagtctgttctgaaaagccagttcaggaacccaaagaagagactcgagtattgccaagtatgtgtttgagagcaatcatttaatgacagaagatgatttttccatcctcaacatctgcctgattaaattatgggacaaaactggtatccttaaccccatgtctaattcccaaatattccaagctcttgagattccaagaggttgaagtggggaaaaaatgcttaattactccaaaatgctgtccaacctgctcattaatacttcccattcgcttctccctccctgctcatagtcaccttgtgtgcagctattgtgggaggaccttgtctaggtcggccatggctgagcacatcgccacccacgtatttgacttcggaatgggtgtctggatagagagagggaaccaggcccaggggtgtgctggtcttgcctttccaggctgccttcctgcatgagcacactcataagcacatggtctttcccttgactgtttctgttgctgtcttttccatgtcaaatgaaatggagccactgaacagtgattgggataatggtcttattgacccacccaccatcaagagggcaattctgcttctgaggagctgtccccagaatgatcactgaattttgtttgaccctcccttgtttggtcctggttgctatctgataaagatagaggaaatgtgctgttttcacttgcactggacatgcagatctcagacacttcaagcttattctcagcttggaactttgcatgtggcctaaaatgcttttcccaccctcaccaggtcactagattttcaccctataggttctccctcttaattgaatacttacctaatactgtcttccgtaattccaagacataattagtgagcagagaaacgtgtttcatgaaatgattcatttacaggcaaaatcaaaacatgctgaaatttaccatactgaaatgatagacccttgagattgaaaagctggatggtatctggcaagacacagatgaagtttatgtgacagtgcaaaaactcaaggttccaggcttcactcagtcgggagagattagaaacaagaatacaccacaccatctgatcccaggtgctgctttctgggtggaagtccatcatctctcacctggttggatgaatgctaccagctcctaaccagtcccttacacaaactatagagcccacctccctcacctgcagatatgtcctacacacagatctgttcacatctcatgtccatgcttttatgagaagctgttcatgggtcttcatttccctcggaacagagccaaagatacctggatggcagaggtaggtctcctaggagagaaaagtgtctgaaaatagttgatgtcaccatcagcacagcatcaacccaactgcctgttcatacctttgacttgtatcataagtgcctacctgggctgggtacttctcagttacaaagaataaagagtaacaaacagt

SEQ ID NO: 62997 - DNA, 1512 bp, Bovine  19866880652988
  misc_feature (1)..(1): n is a, c, g, or t
ncagcctttctgagctcttttctcttgtaatcttgtctaactaaaaagtataatattatgggttgtcagtgtaaatgggataatacaagtaaagagccttgtgtgacaaatcaagccccaggatattgtggggaccgtggcagttctgtgggcattctgtttgtgttttattgactgctataaagattgtgaggactcggtgatggtggatgcttgcgggggtgggggctggatttaaagaacattttaaattattcaccttgttcaggttatcatgataaacatcagtgagggattgtatccacacacacatgagtaaacagacagagtccttgggatcatgcagtctgcatgcagttctactttcaacctgacatcaacttagtctgtgcaacctcagctacgcctgtctgtgcctgtctgtctctccccctcgctctgtctgtctctctgtctgtctgtctctcacacattcacacccttatttttcttggtcagctctgagctagaagaaaagcaaaccgtagctgtactgggaggttctgtgtgagcccagggaacctaagtgttttgttactgttgtctgtctgtttttaaagaagcactgaggatatgctagcagctgcggtagctaaagtatgccagttgagaatcagtccgcatgggggaacagcccagctcggcgcgtacaggtagtttatttgtctctgtcttgttcacctgaacaacaaaagcagaaaactgactccctccttctccctcaccacaagtcactcagcacagaggagggacttcgaaggagaaggaatgaaagaatcctccaaagtcgttgtttcatttccagttactttggatccttcaggataatgttatgtaattagggcacttcccccagaaacctggtgtctgcaccagacgtctgtggacccagtcagagcctcacccacagctggggacaaccagcagcagcagtgtgcttggccagctctagcagggaatcctcactccaacctgacaggccttctccaagcccagtcatacagttaaatccttgttacaaatggatgttgccctcggttctggccgaggctgccagattagcacagtgggtgtgagtgggagattgtggccagcatgggggacggagccgactcacttaaaataactcctattccctctccatctgccactgaggttgtttctgcccctgcagccagaggaaagaagtgggtttcctgaagcacaataccaatatttttctaatttgtccaataaaattttccccccaaacttaatatttggcttgatttatccagtattttctttcatcttgtatgatttgggtgtgaatcatgaagtgtctccaaaaacatctcagatgtaggagccttactcagcagactggctttggtttaattggcaaagctgctcaagcaggacttttctgttgatagctgggctgtctgtagtctttctccaagtgtttctcagtcactctgtccttgccacccg

SEQ ID NO: 62998 - DNA, 1313 bp, Bovine  19866880653432
  misc_feature (1)..(1): n is a, c, g, or t
ntgaaagtgaaagttgctcagtcgtgtctgactctttacaataccattgactacacagtccattgaattcttcatggcagaatactggagtgggttgccatttccttctccaggggatcttcccaacccagggatcaaacccaggtctcccacattgtagacagattctttaccagctgagctaccaggtaaaaccaaatggaaggaaatagatcaaaatctagtcatttccttctcaggctcatggctgctatcactcgcagctcacaatgaaaatcccactattacctgtatcttctgtctcttatatacacaaagaacttactctccacgtgaagttatacttaatataggttacattaaagcaataaataagacattgtccgttcgtgaaataacaagaaatctgccttaaacacacagaactagaaatttaatgggaaaataagaatgagagtctggtgcagcttgaatgagctggtttccatgctggtccatggaattccttccttctgtgtgacacagggtttctgtaatgtgtccaatatctcatctggaagtcaagcctttcatctttgtgccatttcaagtttgacctaagtcacagatgcatccagcaggactgtaatttgacaaggtaaacaattaaatcacacctgagaaagcccctgacccatgactgcacaggcccccacgcctgcacatgccaagacatccaaagcagcacggtggacagccctggcaatttgttcttctgaccacagcccacccaggctgcattaaaaacagccagacgtcgatgttaaatttaacagtaaccacaataaataaatttggtttgtgtactgcaagctgttagtctgctaaacagtgacataagggcataagcagtggccacgattcacctattaaaagatgatcttttggactctacattcaatatttcgagatgttcagtgagtttatcacagagtgtgaggaatcatctaatggttattggaagcatgaagcacaatctctcaattcactttagaacacagaaaagtaatgcttttttaaaaacgcagcaaattgtacttacaagacaagttctgtcattatccatttcactgcagcaaggaaggcattataaggctgcagagaagaattcggttcattaaaaacaatgtatcacacacaaaatttgtagtttaacctaaggctttacataaagacaatgttattcttctagagagattcatatcatgtcaaaaaacagtgaagctctcccttaaagacgaaaatggttggatactatatcccaaaactaacat

SEQ ID NO: 62999 - DNA, 905 bp, Bovine  19866880661516
  misc_feature (1)..(1): n is a, c, g, or t
nttaagcgattcattatgttgactgtagttaaggcatatttccaatacgctccttttccttattctgcatttcagatgtcaaaacttggcacttagttcccttaacacctgctctctaacagtggaaagaatatcatctctccctctctgagattcctcccctgggtttcctactgttgctcccccttaccagcttcatcagtcatgactggactgacacacaaaaggatatacctgatttcaatgggtgccatggtgatgggggccacagactcacagaggcagctgctgtccaccaccaccatgaacaaattgctgctcgggatctgctggatgacaaaggacctgttggaacaagaggcagagagagagtgagtggtcatttaccatcccccaagttaatagccatgaggaaaacttcctccagagtgggacaactgctatagtattttggaaaacaaatttcagagactggtttactactcaagttgcctctttccatgaagctcttcatttcaaatccaaagcttcactaagaagacaatagctatgtccatacgtagctcacacaactcatcttggaaagactagactttatgtgcatgaaacaggagagtcagagttggctaaattacctcagtttctaagctctaagaggttatgcttttccaagactcattttcttctcttagggcttaaaaaccattgcaaggttgcatctgatgttcttctgagtgtatgtttctctcctcctcacctcaaggatagactgaagccatgccatagtaattataaaagaacatgaacttcctagacctttccctcaatcactttgcacaatgtctgcccataatagaggtatattgcttaggatgaaatcaaggctagtggtaaggagctccctt

SEQ ID NO: 63000 - DNA, 2237 bp, Bovine  19866880686336
  misc_feature (1)..(1): n is a, c, g, or t
ntttgtgaacacttcatttaaaatgtactttaaaaaaatggttcattaaaaaaaaaaactaaagacactaaatatatccaggttgaaactgatgactacttatgcttgaaacctaagacagctttaaaaaaaaatctttaaaaagagaaggagggtaatgtggagagaatgtgttggtacatgaaacacccaagagtataaagattgcaggtgaagcttgatccaggcacgtacaccatgctttcaggactctcttcatgtcttttctctgccttccctgcactggcttcattctcaggaaagctgtctccaagcagtggcagagttggctacgaggaactcaagttcccctcctgccttagtgatcctagtagacagagagctactttttccagataaatccaagaaagcatccagattgagtctcatttgggttggtatgagttgtgtccccaatcctgagctactcaccatgtcctggagagttgtgggtctccttcacatactcgggtccttcactggcttccttccgaaccaggatggtcttgccatcactggaactgcatttactgagtgtgaggtccatggagattccctataggaaaaccaaagagatttccctgaaatatgtgggggatgagtggcggtggtccacagcccaggtatcttcctaatggaggtctattctctagctgagtaataagttttttcttttttttaacttttaaaagtatttatgtatttatgtttttggctacactgggcctttgttattgtgaggactttctctagtagtagctgctgctgctgctaagtcgcttcagtcatatccgactctgtgcgaccccatggactgcagcctaccaggctcctccgtccatgggattttccaggcaagagtactggggtggggtgccaacgccttctccgctagttgtggcagttaggggctgttctctagctgcagcgcctgggcttctcgttgcggtggcttctcttgttgctgagcatgagcgccaggtgcgtgggcttcagcaggtgttgggctcagtagttgtgactcttgggctgtagcgcatgagctcagtagttgtgctgcacgggcttggttgcctcgcagcatgtgggatcttcctggaccagggatcaaactcgtgtttccagcattgcaaggtggattcttaaccactggaacaccagggaatccagcattcttttaccaagagaaaagataaagtggatttagggtcatcattctgaagtttactcattgtccttgacctgttttatctatgcaacagcccgttgactttttcgtttgttactcaaagtagtcactctgctacactactgtatggatttctgtttgtattttaagagactcggccattaatgaagactcaagtagaaagtattgactgtttcatacctacttcactggtttagcagacattgtagaggagcattccaaagggtatatccctggtcccgtctgtttctttcaatgcagttaaattagagacttgctggaatatgatgactttcaggccagcacactgggaaacctttcctcccctcactctctagtctctgctagtttcttgaatactaacagtgcagtgtactgaatttcttgagtggtttgattaaaacaatgaaagaagatatctaggaatggtcaaaagtcatgggatccatctctgtggattccacttttgccaggtatcatctaaaaggacttgggttctttagcacaggtatgaacttttctgccaggagagtctccagtcccagcctgctatttagtatgtaagtatcttacacatgaagaggaggcatatgagggtgactatatgacaccatcatcttcaacaaacatcttcttcctgcctaatgtctgcacaacagtgacccaacaaattattcagtgggtctccttcatgtcaaggaaatgacgtattagacatgtgtttgccatgagctagtgtcttcccaaggttattacttttccaggacttctgctagccacatgcatattaaaggtttattccatactgaacttgggggtgtgcttgccaccttacatacagtacctagttaattgtttcagcgtaccttggctacggaggtattactgtttttcataattttgcagttgagcaaggaaggaaggaggcttggagcagctgagtgccttacttcatgtcacatgctcagtgagcagcagaaccactgtg

SEQ ID NO: 63001 - DNA, 1520 bp, Bovine  19866880698104
  misc_feature (1)..(1): n is a, c, g, or t
ntctctgtcctgggcccgataagcagattctgccatcccaaaggaagcccacagtgcggaagtgattgcgtagggccctttctcagtgattatccactgcgtgactaaagcactcagccacagcacagtgaaacccaaccaaaatcaaccgtccaagttatctaatcgtagccactctaaatcaaataaggcaggaacagtcatttcagtttctggattttcaaaggcagcatcaaatttctccaaagttaccatcagtaccctctgcctctctgtccagtaagaagggacgtatttatttatgccaaatgacaagccgacttcgagcatctgatttcatttattacaccatctcattgcagaaagctgtttgttacctctcctttacacttttaataaagggtgacaatatttatcagaaaactcattattatgtgagacaaaaagctaaaattggattttcaaaataaaaatagcagtccagcaaaaatctcatttaaacaaaacagacttttccacccggacagggctgctgaatgctgatgagttctcctccgtgagtgctggaaaaggtagcactgctaagtggcttacccaaaacaccctcatttgtcatcagtcctggcatagaaaacacaagaaatttcattaaaattactttataatttcagctttggggcaagataaaacttaaccttgataaatattattgcctgtaaacacatttccagagggtgtatttgtcgatctttaagcccaccagattatttaaggcattaaaaccagcttccaaagttaagatattggcttcaaaccactgaagatatcattttaaaaacagcccatgtattagcacagtatgtgccggactctgcagccaggacatgcacagtttcacttcccccacaaccgtgccaggagggacacctgccacaggaacactggggcagaagagaatccactccacagcctgcgtccagacaacccctttcctcttcaataaagtcacgtgggacttggtccagcccacaagaactgtctaaaaagcaagtgacactgttcatgacaaagcacttgaaaggcattttgaagtataggtgacaggttcaaattttaatcctgctgaagcagctgtgaccctggagcgagtgacatgaaagaagcattctttatttaggagaggtctagattatgacctattttaataagagcatacattttaaacccaataatttatttagaattaattgaaagtaattagcagtgtctccttctgttggtatgcctaaccgtaactattgtttaaatgcagggttatgactaagttttaaaaagtctaattgtaaacagccagtgttcttactcaggagttaatcttcaaatggtataattcatccctgggtaagtttatagacttttacaacccctcatggtagctgtcactgctgcaaatgaatatcttgattaatagcagcaacgtaactagtgtccaatatgtattcatcaccacagctcaattt

SEQ ID NO: 63002 - DNA, 1220 bp, Bovine  19866880704918
  misc_feature (1)..(1): n is a, c, g, or t
nttgtgtctttataagaggaaaggatccagagataagcagagaagaggcccgtgtgaagacagaggtggagactggagtgggcaaggaaggagtctcccctacaattgacttcttaattttagacttctggcccttagaattgttaaaatacacgtctattgtaagccatcccatctgtaacacttcactgtcatagccctggggatctaattcaaggttgggacctataaatgagagtgagatcatcccatcacaatcaaggattctttctggagatttccttcctctggtcatttaaacacttcagttttggaaaagtggtgcatactgtaaaaagatgcctgcttaaattcctctcatctattcttgatttcatgattctaacagcaggattaaaagtgaggaaaaattatacatcctccatccttaaattaaataagtaaataaaggtcaccagaacttgagtcagagagggtctgagttaacgacccccttagcatcaagaaggaaatccagtcactgtactcacagtctcattctgcttactaaacacaggcatggcgaccgtggtcatcaggacggggccctgatcatcagcaagctggatggagaaagaaaagccagttacctgagaatagtctggaagaaacagtaccaggggccataccttttcactgtctcatcccttcctgaccaggggctgttggaaatggaccagtgtccactcaagtctttatagcttaggtgggaggacaatattcctctacctggatgtgctaatgaggatcctagcctctcctcacgggtgggggaaacaatgatagctaccatcagtcactccagctgatctgtttactgcattcagccatttgagttcaaataaagccctgtttggatcctagtgattcattttattttattactacagattgattttatcgttttactttacagactttatgttcaatatgtgcaatattaatgcttctccttaatgtggaaattgaggatcagaaagcatgagcataaggggttttacgagttgcccctgctgcaaacaatggaatctggaagcatttattctccccaaggtagctgagtcatggcccttttgaatctctacatatatctacatgccagtcccagatggaaaacaaacaaaatgaaaaaataacttatccatttcatccctgaatcactggtaactgaagctgaacat

SEQ ID NO: 63003 - DNA, 1626 bp, Bovine  19866880740512
  misc_feature (1)..(1): n is a, c, g, or t
natataaagcctgatgtatagtatatgctatgtaaatatctgctgaatgaaaatgaatggacatttctgtttatcttttactgaaaaatattttctttttaacaaaagtattatatatttactgtagaaaatttgtaaaaaaaaaaaaaagcagttaataggaaagaagtatcactggtattagatactttttgcatgcatctttccattatttttttctatgtatgtatacttttaattttttatagattggataagactgtccatggcattttgataagaacagatactacactggatcttaaccataaagccgagaagctatgtccatggtattttggaacctattttgtctgtttagtgatgtcttttcaagtcattaagtggtcaacttcaccattatttgtaatggcttcactaaagtcactgagtgaacatactacaacccccttctgtgggcacgtctagattgtaatttttctctagtatgaacagtgttttccaataatgtgttctctaatgaacatatgtcctttatggaaaatctttgcttcactctctgatggtgtccttgggcaacatggagagataaacaaagatgatatccaacatattaaagcttctgaaaagacaaattaatttggtgggtagaaaggaaggcaactcatgctttcacagaatataaggcatctacattttttctaagattgaaaggacaacattatcttcctgaaatcatcagtggctaaatgtttagatgccatggaatttggattgttacattggttctatctgaacattttagcaaaataaaaaaaaaaaattcaacttggtggtaaaaaaataattcctagaagtgatttccgagaaatggaattgccatgtcaaaggtcatgtgcatttcacatatttgaaacatatggccaagttattttcaggaagctataacaatttatattcccaccagtggaaagactatttcctaatatttttattgtcattaacaaatcatttccaatttaatagcaaaaccccccaaaataacacctcaaaactcttatttttattttaatttatatttgtatttatgcataaaagtagggttggacattgtgatctgttttttgttgtgttgccatgagtatttcctcttctgtgatctggcagttcatgtcttttgctagtgttctcatatcatagtgttgcaattaagaaaatgagctttggagtcccacataccttaaaagggtccaatagctttcacttaactgctatgtgacctggaacatgttcctaccctctctaggcctcagtttgcttatctgttgaatgagaataatgctggtgccctcccgttgcagtcctgctatgtgtggtatctggcaaagggccagtgctcagcatcctcaagttttagttcatcagtactcatttaatccctctatttctcttggcatattcctactccatatgccatgatgaattatccccatttaacctatgtttatatcttttaattgcttgcagtaaccacattaattcatttatctgacaaatatttagggggatctgctatgggtcaggtgctagattagaaagttcagcaatagtgaacaaaacacgttg

SEQ ID NO: 63004 - DNA, 1370 bp, Bovine  19866880742278
  misc_feature (1)..(1): n is a, c, g, or t
nctgctctctaattattagcaagtgctgttctcaggcaggggagacggtttccgtttcctaacaacttggttaagccttcagcgcaaaaaaaaaaaaaaagcacttgcagaaagaggtgcgcaagtagccagcctagctccatgtgcatcagccagaaagtatagccctttggtacttgcaaccccccagagcacattagcaacccttctgaaaaaccttttcatctcagggttgcattattattaaattttcttgtgatgggctattttgatactaattgccgcccaaatcatggataagactaataatatatggtaataatatgcattttagcacagagaacagtgcaattttccccaaaggacaaagaggggagcaccctaagatgcttacaggatgttaagtgcacagagttcccagatcaagtaagttagtaaaatcctggttgcacaaattaaacagctttctctgctgaaacttcccagagcctttatttttctaatgtgtttcttgcctctcccaggataaatgggtgggctttctttccagtcctaaacttctttagctctttcttctttttttcccccacagagccataactaccactccccatccccctacctctgtgccttaccataatctagtcctagtttgctcaggacttccagtgttaaagtgaaagtgaaagtgtcactcagtcgtgtccgacttgtcgggatcccatggactgttgcccaaccaggctcctctgtccatggaattctccaggcaagaatcatggaatgggaatcttcccaacccagggatcaaacctgggtctcccacattgtagggcagactctttaccaagtgagccaccaaggaaccttcttccagtgttaaaactggggcaaaccaaaacaactggtcactccaccatgccctcagcacacgggctttccttagttcaccagacatttgtgttagagttggttgagtttatcttcctggatagaggacagagaacagactcaatgtcgctttggaaccccagcacctaccaaaatcctccataggtatgtcttgaataaatgaattaaatagaaagtagagagtccttccaaacagacccactccttttcttcactcaaaactactatgaaattgccatttttataggtcaaaaatggtcagatatgggaaatttcatgttttaacctaacatgtcccatcatgtcatgggaaatagatggggaaacaatggaaacagtgtcagactttatttttctgggcttcaaaatcactacagatgatgactgcagacaggaaatgaaaagacgcttactccttggaaggaaagttatgaccaacctagatagcatattcaaaa

SEQ ID NO: 63005 - DNA, 1518 bp, Bovine  19866880786201
  misc_feature (1)..(1): n is a, c, g, or t
ntcaaggcatgactccttctatctggttcccatttaatccctagaagaaaaatggagttatgagaaacccagaaacttcaaatatttattcatagcatttcaaggctgttctgctctgctgattgaatgaacagggtgaaaaatcacatgcaaagaccaaccctggggctcatcacatgctccatcaccagctctgggaaggtgctttagggttggaacacggcctcagcccaactgctccaggatctgctagagagtggtgacatctttagtaacccgctgcccatcaagaaaggacatggctgcagttccttcctaaggctagttaaagtttgccaaggccacatctcactgtcctacaagttgctggacctggctgcatcatttgtagatctctgggcagagtcatgccctgttcctggacccagacaggtaatgcctagagcatggtgggggcggaggcattagaaagtactcggtatgtttccatctcagactatacacagtctgttctcttgtgagccctgttttggcttggcttcctacattgaaatgaaataaaatggccctaattatgctgcataatagaagttgaatttcagtctttgaagcctggagggttttccccttacataaaatggaatccaacatccttagccctgtggcttgcagactggtcgagatacatccaaacttcacattctctatttaaaacttagtttttaagaataaactttcatttaaaaagaaaagtgtttgctgcctaaaagtaagatagaaaatccttgttttcaaccatcggtgttactcagggatggaggattttgcagttgagaaaataaacacataaaaataattttcacaggagaaaggcctgagactgtagtattgagattctcctttccaattaataagtgccagttctctggactacattgggctgataataggtaggtgcgtaagataacactgctaaatcatttcagaaataactatgagatagaagtttgtaaactgaagagtcattttattctattctccttgtatctacatctccctcccacaaatggacctaatttaaagattctctgtaacaaatcagaaaatagaagagaagccactgccaaaggaaggttattaggtaatgaagataaaataaaagtgacatgatattgtacactaaaggagaagaatatagtttattttaaaaacatctgacatactgcatttgtataaagccaagtatagctaggttgacagtcttgacacttaaaatgaaattatatccatagtgaggctaagtattactccaatgtataactccaccaagaactggcttgagtccaaataaaaagaattatttttaatgtgttgacccatagtcgacattcagtggacattcctggacttgaactgtggccagtgttctgaggccataaccctacctgctcatcctccacctcaccctcctctgccacccttccttcatcacagcctcatcactatgtgctccgctgg

SEQ ID NO: 63006 - DNA, 815 bp, Bovine  19866880942629
  misc_feature (1)..(1): n is a, c, g, or t
natttttttgctctttctccccccaccccaccccgccccagtgtttcaaagatctaagtcattaagcagggactacattttatgggtaaacatctagacaggaaggatgcagtctttgaccagggacatatatataagcaaactcatgcacaagagaatattacagagtaacatatctgaaagctgtcttagggaactgctttacagtatacaagaggcttatttcaggaatcctcaaaataaggaaacaggaattattaggggcattggattttggctaatattcatgatcagctatgccacataactgaacaccaccgccctctcccaccccccaactgtggccaaagatttgtatttttacaaacatggcttagacgtctccctaatgcctgaaaacacagccaacagtcagggcttcaaggccctgggacaaactctttcccctgtttaaagaccccctgaaatgctgcttcctccataaaaccttccctaacaaagtggaaatgggaaacatatgttctcaaacttcacttgttgttcagtcgcttagtcgtgtccaactctttgcgaccccatggactgcagcacacaagacctccctgtccttcactatctcccagagtttgctcaagcttattgccattgagttggttatgccatacaaccatcttgttctctgtcacctccttcttctcctgctctcaatctttcccaccatcagggtcttttccagtgagtcagctctttgtatcaagtgaccaaactatgggagaattcagtttcagcatcactccttccaatgaatatttctg

SEQ ID NO: 63007 - DNA, 1259 bp, Bovine  19866880947061
  misc_feature (1)..(1): n is a, c, g, or t
ntccagaagccttgcagcaattacagaagcaattccaatctcctccctgtcatattccacatgacagaatggaagatgcctgggtcgctgagtcacccactgaaagagaaatgcccaggaaaactcctggttccaaaaaggcatttacacaagcaagaaataaagtatgtgctaattccctgaggtttcaggtttgttccttatactgactaaagcaattgggcactgggctaggcatgtgaaaaggagagaaataatacaaagccctgctttaatttattgaaatcaaagaaaagtgaagataaacatataaattatgggtaatagtcttttataaaaatgttttcttagattagtttaaactacctcaattcacattcagatctccctgctcactagtaatgaaggcattctatttggttgaaagccttccattagtttaaaagctccaattgttgaaccatcaacgtctataagaatgtaataaaggacagaataactaagtgttatgtaagcggaaactatagccatattaacattcatgagtttacccaccacagtaccattcagtcaatttagaaatacaaatacaataataaaaatttcaacttacaaagaaaccaaatgcttcccctccttcccctccccactggcccccaaacaacaactaagtctggaatatcagtttcttttatgacatctcaatttggctctaattattacaggaagaaatactattagagggttaccaaacacagcaaatgcaatttgttgggaactggaattgtaacttacatgctattgatataaatttctcccaagggttacccttaaaagagaaaatatatttatctgccaacacaacccaaagaaacataagtatcttactgttcaaaaggaaaaattccttttagaaatccccatgtgtttattttagcatcacttaatgaaaattttgtaaactaatagaggcaatatggtaacgtgctgcgagtatgttttcacccataaagatccatttatataagctaacactgcttaacccctcaaagcataacttctctctccttagaaagctacacattaattcaaatttattcacttcagaaggtctaggcaaatagaattcagataaactcatctagtgatagagctgcctgtagtttggagtggaataaaatgagaatgtctattagcttttcaactgctccagagaatgaatgccatgtacaattttcggaaaaagatgtaaggctggg

SEQ ID NO: 63008 - DNA, 1782 bp, Bovine  19866881010220
  misc_feature (1)..(1): n is a, c, g, or t
ntagctgcctcagtacctctggggtggttttggaaagctcaggaatccctctctcctctttggggtgtgggggtggggggcagatgccagtctggagagcagaattcctgagctgagtgaagagtgagggcttatccctttaagaatgccagccctgaaataatcttaagtgatttggaaggaaggttttgttctttctttttcctaaactgctttgttccctttgactttcaaatgattttacaaagcccctcccatctgtttttgccttcctttgagcctttaagaggagcaggggttttcctgaaaccacaggcaactgggaaaggagttaaatcccactgctcttagaggaggggtctcgacagtctcttcccaccccaccggcactctggctctgtcattctttatcccatagaaccacttaaggtgggggcttagggtggcaaggggctgttcgaaggggaagtgacagggagtagccatactggggagggcgggggagtggtgcagcagttcatttttattgaagaccttctgtgttccaggccagtggaccagagcccagaagtatggagctgacatgatagctccaaggagatctcagagagcaaataacagattacagataaaaagtgagaagaccagtaattagacatattctgaagagacaaacaaaggccagagacaagagtaatggggtggccaagggagccctctttaagcagagtgcatatagggaaaggagctgggtaggaagggtagaggaacagtagtttcaaaggccctgatgaggagaagttgtgtgtgtgtgtgtgtgtgtgtgtgtgagaagctgggtaaagagcagctggctagagcctggtgggctggggctgtgtcagagctggtggggtactggtaggacaagtcagggccagctcctctggcctgtggttggcacagtaggagttgggattgtgctgcaaggccagtggggagtcattgcaggctcctgagcagaggagagacatgctctggttgtcctcagaagcttcctctggctactgtatgggagtcagtctatgaggcgtggacatgggctgggcatgcagcttgggtaccagctctcttcaccataaataatgtgagtggatgtccatgaaggtagtcgactttttaaaattcctatggaagtccccagctgctcctgtttcttactgcttgttcacttcagggcttagtcgggtggttacatttctctgttccctccctccctgactaaagtcacatttggtctgaacgttttgggtgagtttgtgtcgttgctgtattttctcaagggtgatcaatcctacagctgtcttgggaaaatagcaggaccattcatttactcgtggtcagtcagtggtatgacagggaaagacattcctagtcaccatggtgagagctcatgcaggccctcctcactgctgaagggagagtcaaaacggttcactgtctcccagtttatttttaattacttctgctggtactagacatcctgtgattcctgcaagaacacgatgagacaagttaggaaccaagtctagtgatgcgtgcctgctgccagccatcgcaaaagcgttttttgtcggggactcagaacagctgtgtgggcccctcccctgctgctaccagtgctgtttttctgtgtgggctccggtggggaccttggcctccgcccagacactactgtcttcagaaggcaggtgggcagtcagtgcacattcccgagtgacccccacaccctcctgaaaatgg

SEQ ID NO: 63009 - DNA, 1018 bp, Bovine  19866881079934
  misc_feature (1)..(1): n is a, c, g, or t
naaggaaggggatttgtggagccgggcctgttgctgtaccctgagggagagagagtggagtctggaatagggccagagcagtggagatggggaattagacttgaggcatattttagagatagggccagaagaacatgctggtggattagcgatggggtgggttgaggaaatgatggctgtcaaggataattcttaagtttttggcccagttggacagtggcgtcatcggctgaaatggaaaggaccccatgggggaggaatgggtttggccaaggaaatcaggagttggctttggatgagttcagtctgagaatcctgctagtcatccctgtggaggtgtcaggtatacagttggctatgagtctgtagctctggggagaagccagctttttgtaacttttcagaactttgattatgataagcaaggccaagtgaggatgatccctcagctccatctccttccaaatgtgtgactgtttttccttctcactccccctctatactgagaatctgtctctcccatccccctctttctatttattccctctcttctcttggccctattttggaaagcccaaatcagggatttttactgttggctttgaggatcagaatgaaaacacagacaaccgagaaaaactcctcccaagagaggctgtctttactgcacatttagtacaggaacccaaaataggaatagtactatactgtgaattgctcatgcgggtatccccttgatctagaaccatggagttctctcctcttcctttcaacatggcgacacatctcttggtttgtcctctgtggagtttgtctctgtaagtcccttcatgcagagccaaaggtttatctactagagaagagatgaaatgttttctttcctattcagacactgtttacagtcatggtttatggagggatggtaactgtggatgcttgctgtcatccagcaatcttctttaaagcatgtttttcccactgtgcctccaagaggagccacctggaagccttgcataaa

SEQ ID NO: 63010 - DNA, 666 bp, Bovine  19866881083368
  misc_feature (1)..(1): n is a, c, g, or t
ntctctatgaaaagacttgaaaaatgatgtaattcttacatttggtatttaatatatggataatgttaattccattccagattagaaaattgcttttcaaaacactgcacgctgtaatggcaattacaaacaccatgacactaaaccacagcttaaaagtctcactgtagaaaaatagataaatatgtctcctaagtattcaatctttttccgcatgcctataatctcagtcccttccctgtgctgttggcatagctattatgtcttattttatttattgactgactgccttttcattgttcttagagtatcagccttactttatatgcgtggattcttgtgcatgcttccttaaccagcaataaagggaacagttactgtgctgcaaagcaagaaaaactggctttaaattaagtgacgttcttcaaatggtcttgcctctgtgtacagcagagcgtctcagctttggcacggtgggcgtatgggccgtgtaattctaccactacatatggtagtgggggctgttctgtgcattctaggaagtttagcagaatgcctggtttctacccaccagaggccagtagctcttattccctccctggccccaggttttgacagccccacatgtctctggacagtcctcagcaatggggaactgttggcata

SEQ ID NO: 63011 - DNA, 676 bp, Bovine  19866881084286
  misc_feature (1)..(1): n is a, c, g, or t
ngtcaccattaatcctttttggagccccataaggagagtgatcttccattctaagggttattatcacagcaaagctaacgattcttgagttctcactatgcaccagatgctgtgcttgatccaactttatcatcccagcttttgcaatgaagccgagggaggttaaacactgaattctaaccctgagtccaccattattctgtattgcctcttgattttttcagtcgactgaaggaacaggaaaggggtggactaatcttccaagcagtgctaagacaaacctaagagacagaagacaaggagccccgaaggctgtagctgggacttgctggatggagataaaggaaaggagttgcaaagtcagcctgggctgcccgtgcagggtaggactgggacatttttgccaaagatatgcaggagaatattgtgtctatgggatagtagcatggatcctagcgtcctgagtgctcagtatcccccaaatggtctggtgccctggggaaggaccctactcacggtgtggaggtggcggagacccagcagtgtgcaaggtctgactgtacgtaccctgtgaaaatacaaagtcttccatctatcagttaggacttggtcctaggatcagaagcttctctaggtagtccaagggacttgaatacagggaatcagaagcttttat

SEQ ID NO: 63012 - DNA, 1606 bp, Bovine  19866881107851
  misc_feature (1)..(1): n is a, c, g, or t
ntatgactttgttaagtctgagcctcttttgttcttttcttttttttccttctttttctcaaagtttcttttctgccagaaatatttctgctttgctttttcccttattaggagctgctgcagcctgcattgctcagatttacaactgctagtcaaagttaagggaggtgaaaacgtaggcatggttttctcatcggaggtaaacttcaggtttttaatccaatgtagttattacatttgatcaatttctctggtgctctcaggctagttttatcttgtcttatttattctaacaccaatgtgcttttaggcaaacacacgagtaccaagccacctcataaagtctgtctggcaggggcaagcacagataacgtttccagttttgaagaagacatagccatgtatccggagaaggaaatggcaacctactccagtaatcttgcctggagaattccatgaacagaggcgcctggcaggctgcagtccatggggttgcaaagagtcaggcatgactgagcaactatcacccactcacactagccatgtatcaggatgaacagaagtaaaagaaatgtgaaacagtaccttgggcacctgtgaccttgccggctatctcatcatcctgcactttggagcacacatttgtggaagtcaagtgtggggattcaggtttttctgtcatcgatccgccctcgccaggtgtttagtgctcctgcacacctggagcagtgaatgacttgctgtgtcgggcttccagaaagaggtgtacattctctcaaggatcctttgtttctggactgtcattattccggatctctcattacagataccaactcatggctttttctttatccaagtatacagcctctgtcagaagtgagtggtgcttatttcaggggtccccatcttttgcagtcacagtgcttgtcaaaacagcctcccaaactgagatccacagtgtcctccagacagagacttttcacagcttgcatgttccctgggacactctgattggacttagagatttgctatggccgagactgagaaaaaatgaaatagatatcgaaaatgccagcctatgaattagcgtatgagagtccccctcccccactactcttttagtgtgatttttatacaagagacataatggcctttgcttcatctccagtggctgcagtgaggcttttgtgtatcatggagcgagagggaaagttcctcatgtcaggatcctggcaatatcgatagaatcttcatcagccctctctggtccattaagcaaaagtgaacttctccttcaagagaagaacatggagaagaaggggaggatgcttgatttccctgagtatttagtagccagcacatttagctggtggtccctgaaatgcgaagccagcctcagagactttttcctgacagtccgacctggacctcagctcaccctctgcaggtgaggcatctgctcagctgatgtattttaagggatttctctgtgtagccagcgtgtctacttttcagggagaaagtcattttacaggcataactttgcaaagggtgcaggggtgtatttaacaaatggtataacacttggttgggtgctcattccaag

SEQ ID NO: 63013 - DNA, 940 bp, Bovine  19866881124451
  misc_feature (1)..(1): n is a, c, g, or t
ntactcatttttaaataatttggcaactctaatctaaatacttcctgtagtgagtaaaatgacctattgggcaattgccaaatttgaaaattattagtttttccaatgccctggggaaataattgcttgtcagtctgacccaattaaattctggcctctttacatagggatagtcttaatataaattttgaaacttttaaactgcagaatcaaatcttttattgcctctcttaccctgaatcagtgtgatagatatgagtgaaaaattttattgatgttaatttaaattctaaaacctatactttatgaacactgataccagtgtaaagagatattttagtccatctttcatgtgggaacaaaagatacttttattatgcaaattgcttttgtaagagtaggttgtaaggcctgaatgggggaggctggaattttaaaatatcctcctctaaaattcatttagagactacaaaattgtttaccagaaaaaaaaaaaaactcagttatatcactggatcaaatgtatagatatctttcacaaagatacgccttcacataattgtggaaaaggagaagctgataatcttacataggtcaacaacgattcttttcattttaaggttttgttctgttggctgcacagatgtttttaatttttggggtgtgtttatatgtttgcaagtttctgaggctgtgctgatgaatggagtttttattgaatttatatgtagctttcagatagtaaaaatgtgcttaagcttcttcatcttgccccctacccccaatctgggtcttatctgaggaaatttattctactgtcttagtatccttcacatttccctaatctgtgcctctatatgctactataattaaaatatttgaaaagggaaaaatgacatttaggaatttagtggcaggaccacaagacactggatttatt

SEQ ID NO: 63014 - DNA, 551 bp, Bovine  19866881124738
  misc_feature (1)..(1): n is a, c, g, or t
ncaaaggacatttaagattagtccctgcacagaaaatgtgaaatgccccgaagtctcacagctccagtatgaaagcagtctgatgggagttttcccagatttgacacacctaaaaatatacatgacaataccagtcacaaggagtgaaagttttctacactagcaataataaaagtcaagtttccattctattccagggcggtggttctcccccagtgcttttataaaaggcaaatggctgggtcccactgatactgatttaattagcctgggagcatcctcagctttaggactgtaatagttcccagattattctactgggcaccccatgggcaggaccactgccaaaaaagaatgagtcatctttctattttttccatagaaaatgatattacaaaaccatcatcatgtgaaaagcagatcaatgagctttcagccaaaaactgtagggaaaaaaaaaaagagagatttgggaacatggaacatgttaggcaatgaattaaaataataataacagtaataataactttatgttattttctggattttgt

SEQ ID NO: 63015 - DNA, 643 bp, Bovine  19866881136503
  misc_feature (1)..(1): n is a, c, g, or t
natgctctctaaagcttcctgggcaaaggttagatgcaagacaggcttaacaatgaatttcaaaattcaaagacttgcactgaattcttgagcatgaaaatgtgccatatcccaaacctgattttacataaagacttcagagaccactgagtaattaggagataacatcttgggtaaaaagaggacctctataatttgagaatatgtctgtggcttttgacaagcaacttttttttgggggtggggcatttacagaactttatttggcattattcctttgagaagttaattatatatcaaaagactcttgggtttgtggaacctgtcagaccattttgaacatggggtacaattaggcaccgcgaattgattccagtttcaaaacagcaaagacaatgaatttccttattcactcaagtaatatcacaaattagtatcaagcagcactgccatgcagtaatgggtcagtcttcaaatgacgctacagctaactgttcaccacgggggtgggttctccatggtgctggcttttctgctgtcctctgtaacattcctagtatctgtaactagctcagtcactgtgaaaaaaagccccagtctcatcccttggtggggcgatgtattcagaacagatatctctcat

SEQ ID NO: 63016 - DNA, 1698 bp, Bovine  19866881160525
  misc_feature (1)..(1): n is a, c, g, or t
nctggatgttgacaggaggggaacctaagtttgaattttttttgctgtaaattagtgcggtgaaaaaaaaaatactgatatgattgatatggttccttggagaaggaaaaaactattttgctctatttgaattgaaatgctcccagagtaaagctatccagaactgtgtgttttatgtagtttaaaatagaggacaagggcctttgtaagcatacttgatgccataaaatttagggtaactggcccagcaatatgtggttctcccttgctcccaattgttaaacgggaaagagggcttgtatgtcaaattgggtttggtttggagacagtttctttgttgagatcagcttagtccctgttgtgaactctgcctctctattaacaagtcatggaccatgtgacatttgaaatgagatgaggtggccactgacaggcctcttagatgttggtttatgttaaggccagggaagcactgggtatgactgttttttacactacactgacacctctcttctcgaaaaggaaaggttgttatttcccacgagacttgtgatcatttgaagtgcaaagacttcagattctaatttgccagtgcatttgctgtggaatcgtcttttgccacattgcagtagaatgcaccactgcgcaccagggatctgcctttccagtccatgccacccaatgagcaaatgtcccttctcaaatgtcccagggaaacactggatcttagaatttgctccatccctgtgatgcgccatgcctagcagcctcccatttgagccctgatccccatcaagccaagtcaggtcagggattctagagcctcctctagtgccttcccgcccaaaactgaccaccaagtgctcatcgatggtggatggctaggaggactcaagaacacagaggaataaaactggctcccaagcagtgttgattattaaaatttccattgatgtgtataaaatatttatgagactggcagtagcaatttagaagactgcaataatacctttagtctgatggagagaggttcaattagtgctgggaggaaaaaaaagtactacagtaacccagtcctttaacatgtctgtcacctcttagctgttaaacagtgttgatctttttctctttctctccagacttgatttcatcatttccccccatcacttttcccaatgattagttgaatcagagtgattttatcatactcatcccctatttgaattactctccactatgcaattatcctatcacagaaaacccatttttctccccgtcagatgtctgaagtaaatgtgaaacccaaagtggcctgcccattacataacctctgtcatctggtgggtaatggattatatgtgattttttttttccaggctagcaaattacaaataaccttagctttaataattgccattaacataatggggccatcattatggtagcattttgtaactaatattttctagcactgtttaatgccattggtagtttaaataattttttcgtttccactcagagacttgatgtaggttgttttaatataaagccacataggtttgatgcagcgatgctgctctttgcttttgtgtataaagattacacccaaagaatcatttcccagcttctttgttcaaacatatttgtgctaccaagccctcggttaatgttgctgagcactttatcaagttttaagtc

SEQ ID NO: 63017 - DNA, 930 bp, Bovine  19866881244263
  misc_feature (1)..(1): n is a, c, g, or t
ncgtgctgcggttctggggtcgcaaagagtcggacacgactgagcgactgaatggaactgaactgaatatcagtgttcactgtgtcagttatcatacttacattgcctttctaaacacagccatagacagctgcttgagataaagtactgaaactattttacagtgagttgagaactttagctgtgatttgttggttaaaactttactgagatataaaattttgatttcaagccaagtttttctgagcaaaactattctaaatagggacagagctggaatgaaatccttaccccatactcttattaatgtggtaacaatatggtattagtataaagagatttttaattactagtgatggttctaatacttatgcattaaaagacactgaacacaaattcctaatgcccatagttaataattgttactccagtggctgccttataaaaggttcagtgaatgtgagttgaatgcaatccaattgaatttagaagcagggagaaggcagatctgaatttaaatatacttatgaccaaaacaattaagaattttctggcctgagtttaagccgtaataaaaaccagcttctttcccagtgtgtataggtattcaatacacaggagaaaaactgagagagctccaccataacacttgtgtgcggtgatttttaacattttctccaaatctaaaggggccacaaaatctcctaagatattatgtcatccataactttatcatgaataaggtaaattcctttttattatgtgatttcattcaaagttcagtgaaaaccccacttgccaaaaaccaattagacaacagccttaattaatcagaattcttttccagacataattctttataggaaaaatggggaataacaacaaagcatactgaacagagaagccattacacacacacacacacacaca

SEQ ID NO: 63018 - DNA, 2395 bp, Bovine  19866881252195
  misc_feature (1)..(1): n is a, c, g, or t
nttccatgtctcatctcaatgtcacctccacagagaagcttccctgctctctgaccaaaggagccacacaccttccctcacttcccatcacaccccgtatttcagtttcctctgatcacttatcactcttgagaaaggtctgtgtgttcagcctctcccacacgatcccttgtgaattcctgtgactttgctgctgcaccgagggagtggttgatagatacttctcggtagattttgatggcgtttgaaggatgctgatgactaaatatctgggtaccaattttctacaataagtgagaagtgcaggtgccacatgtttacccatcaaacacttactgagtctttgcttcatcacatgcaaaatttgaatctcatgtaattggttaagttctcctttctttccgcccctgcctctgctggactgcaaacattcatgagatgttcctcacgtcaggcactgtgctagctgatggagacagagaagcaggtacaacagcatctctgcccacaaggagctcattgctacaggccaagaggagttatgtgctcgcgggggaggcatctgcttttcttgaggaaggcaccctgagatgctggagggcttcccagaagaggtggcatgcacaccaatttcatccacagcctactgtgagggacatttctttccagactcagcaggggtcccacacacttcctgagatctctgtcctcatgctggaccaagcactgcttttgatttctgtctctggtctcagaaccatgcattctgctggccccaacctgctggggtgtagcgggtgggaacctgtcatcgtttatataactctgtggcttctaagactggaatcccatctccagtcttcagctctgttatctgctcagactgctgggaactgaacgagactggccagtaggtggcgcacgggcaccgccgtgtgcccgctccctgagcacattgtcaaaacacaatccttttatgtcgggtctgaatccatcccgttttattttaaaagaaagaatcatcggatgcttagtatatgtatctgctcagaggagtgtgttcttggagaaaaaataaacaagactgtgtgacccccatggagcgagcctggtaattttgaaatacatcctttggtgaaagagaaaacagagcctcgcgtgcttttctcttgatgaaatgctgagagcaacggttggagcctccccagtctggacacttgagtggaagactggcagccctgagcaaggaatgcttacacctcgtgagcttcaggatgaagcaggttagaggggtgcctgcctttctgtcctgcaaacctcaggaactctatagctgcttggtccccaagttctgtggccgggtgtgtacaggggcacctagggcatagataggatttagcagagagtgggttagcagtgacagtgcagctgttacgtagagttttaagaaccatgctgtgtgcttatcatctttgtgtgttttgcctcattaagtcttcgtagcatcctgtgtgttagttcttgttttagagagattaactgatgcctaggccaaggactgtgtcaatcagaaagcaaatttgactcagtcttttttatttatttattttttgactcagtcttcagagggaaaaaaaaagacaactatggacagtgtggttttccatcaagttaaacctcttcaattgaacagacttccttaattctgaagcagtgttataaggctcttttataaaatgagagttgggcggtgggcctctcttggcttctgcagacaattttcctctttgcttctgctgtctgctcctgcacaccacctgcatgggcactcagggtggcatctttgatcttggccttggatggagtttagctggtggggaactcacacccagaagaaacgagaggagagtgcagtggattgtatattcagccctgtgtcccctggcactggctgcacccagtctaaagccacattagccttttgttctctgtgggctgctgtgattgttccttcctctgtcccttcatgcagagtggaagagaagggccccactgcttgtgacttcagggcactacaccatttcttatagttccctacacctgccccactcttacaataggccctttattaaaacttccttaattagccagcttgacgatgccatatgcttcctgctggggtcctgactgatacaaaggtaagagttagatggaaggtttgtttctcttaagtgcttactagaaaaaaaaagggggggggggataaataaaggaaaaagaagaaagggaagaaggaagaatggaagaaaagaggaagaattaaaaggaaaaagatggaggaaggaaggaagaaaaacaaaaagcaagaggaaaaggccctccatcctgtccttca

SEQ ID NO: 63019 - DNA, 752 bp, Bovine  19866881294082
  misc_feature (1)..(1): n is a, c, g, or t
ncctgggcactgtgtatccagtctggagaagaccgtgacttttccaatggtgtgcttgtctactgtttatttatatgctggccagagaccacaggcaagtcatgagacatggttggcccaccctgagtgggtggaagagacatcctcctggtcactacaattcaatgtgtgtcagccggtgcccattttcaggaggctgttacagagcaagacgaaaaacaaggttatccggagaatggtatttagtcattaccttttaaatctggtgattatgaaccttcttttttaaagtatattgagtagacataagataaaacagaattgctcatatttgatctgaaggctgacatggatgcagcatcatgaaggcagtgacctcaaaagaacctgtatgtctccaaaagcagagaggcctcctcagcacttccccacatttcactggctctgactcacccgtcatgtcactggatgattaggttcggccactttcttctgtgtgttctcgacaaattaagtagacattgtttactgctttaaaattaaaaagcccattttaattggggaagaaaccttgttttggcagatgaagaggaatatgtgagcaggcttgtcccccaaccagtgtgcctccaacggcacatgggatacagccaactggcagtaatttgggatttcagtgaaatccttgtgctgaattgaaatttatctgaaaagaaaggtgtgcaccttttgcagtttattatcaaggacta

SEQ ID NO: 63020 - DNA, 1806 bp, Bovine  19866881301981
  misc_feature (1)..(1): n is a, c, g, or t
nacaggggaaagatccagacagccaattttctttgcatttttgcaaatgagtgagtctgacccaaagctccaagcaacatgaggtcaaaagggcatgctggctgaacaaatgaaatcattgccccaagaggaagtactctgtttccaacacttcaacacagaaacagtacagtgggtgaaaccatgtgggatcttaatcaaatcctcaaaaggaaagacagaggaaaaaccaccatgccttgaaaactgagtatgaccatccaatttcaagaagccagttcttcattgacactctttttattcaagatttgatgtaagatgaatggataaaaatgatgtgattgatatctatctatctatatacacacacacagaatggaatccttgttgtttagtccttaagttatgtctgactcctctgcaaccccatggactgtagcctgccaggctcctctgtccattggatttcccaggtgagactactggagtggattgccactgccttctccaggggatatttccaacccaggaatccaaccctcgtctcctgcattggcaggcagattctttactgctgagctaccgtcgaagcccagtggaatactactcagtcataaaaaagaatgaaattttgccatttgtagcaacatgggtatacttggaaagcattatgctaaaagtgaaatgagtcaaacagagaaagacaaaaactatatgacatcacttatatgtggaatctacaaaatacaacaaattagtaaatataacaaaaaagaagaagattcacagatatagataatgaactagtggtttccagtagggagagggaaggagtggggcaagacaggtgtggggaagtgggaggtacaaactattgggtgtaaagtgacagtcaaagtgttacccactcagtcatctatgactctttgtgaccccatgggctgtagcccaccaggctcctctgtccagggattctccaggcaagaatactggagtgggctgccatttccttctccaggggatcttcctgacccagggatcaaaccttggagtctcccacactgcaggcagattctttaccatttgagccaccagggaagccccagttgggtataaaataggctcaaagatgtgttgtgcagcactaggaatatagcccatatgttgtaataactgtaaatggaaagtgaccatttaaaattaagtatttttttttaaagatttgatgtccaaagggaaagcctgtttgttctggagagaagataccacacaggattctgcctgggaggggttagatgcaagaagcccaccccacagggctctggaggctcaagctgggctccttctttcctggcaagcagtgaactccaggatattgctcaaagacagaatcgatactgaaaacatttccaagttggtctggaacaaaatttccacagaaggtatctgaaatagaatagctcaccaaaggatctatattaacgggtaggtggatttctgtaactgaacccaggataacctcaaagctgcaactggaagagacaccctctagagagccaaatagaagcccacagaaatagcaagccagggggctcctaataacatcccccagcccctgcaaagaatcacagagctgtaagcaggcagactgcaggaagcagagattacagacaacacaaagacaggacagtctcggcgcggcacggtggagctttgatgcctccagccctggctggcaatttctttctgaaatagcgcagagccttttaaaattatatgttgcttctccccagcctcaaagaactt

SEQ ID NO: 63021 - DNA, 1457 bp, Bovine  19866881328702
  misc_feature (1)..(1): n is a, c, g, or t
ngaaaagactctgatgttgggagggattgggggcaggaggagaaggggacggcagaggatgagatggctggatggcatcactgactcgatggatgtgagtctgagtgaactccgggagttggtgatggacagggaggcctggtgtgctgcaattcatggggtcgcgaagagtcagacacgactgagcaactgaactgaactgaactgaactgagctgatagagggggactaagtatacaagccaattctttttttcacatgaatttagctggtagactccttacctctaaacatgccaggtgcaaagcaaagtttcccctctccttggacattctatgtgtggaatggagcctttctcgtctaatctaaagcttttatagcacataccttcatgatacaggatagggaatcttacatagtctgtattctgatctccatatttggcctcagcatcctggtaacatttctcaaacacatggaaccttccacttgctatcacactggccatagcagtgctgagataagcagggctacttaacccgaagagcatggagactgggaatcactgccagatttaatggccattagcacatctctctggaaaagctgatgagtgcattaatatcacaggaagttttttgagttttttttcccctcctaaagcactggtgttacagtcacctggcaagcctactattttatcagacaatcctgtgtctggatatttctgtgtctcgggactttaatgctgtatttataatgtaggaaagtctgccctctgctgcaggctcaggataagcaacccctttgccagttcaaaagacatggctgatggcatactggaaaaaatacatatgtatgtatagcttttatttttcttctttccttttgtttctaaattagccagctttggatttaatgggcaggattctaatacagcatcactctaggtgttttaagactaccattttggatgctgctcagttactatggagacaggtgctgaaggcacttggtgtggaggagaaaatcaccgctggtgtatgggaccaaagaggtccacactggccccgcagtggaatctaggagagagaggccaggcagggcagatctcccatcactgcggggccagatgggcttcagcagttttcctgctaagttgttttccctctgcgctgcatttcagggacgctggggtgtcctggggtgtccgcccgtaccacccaggaaggctgccccaactctaagggggagtgggctctgaccatattgggccaccggccttctactcccttctctcaggttttcaattaacagacagtcacggtcagttttatgacatcagctccactccagatgaagaggaagggaagtggttccctcagaagccgctgtaaacgatagcagattcacagttggatcctgttatggaaagttcactatgtttggccctcgag

SEQ ID NO: 63022 - DNA, 797 bp, Bovine  19866881344398
  misc_feature (1)..(1): n is a, c, g, or t
ncggtggatcgagcctggtatggcagcctgggcttgcaaggaagcactccacgctctcaggggtgggtgttctgggaaggcttcctagggcaagcaggggtgagtccatctaaacggacatgccctgagaagataagagagaagcagataaggggaaggcagaagatgcatggagagtgtggagggggagcatgtgtggagtcttaaaaactgattgagtggaaaaataggggaagggagaggcaggtggagctcatagcactccctggaagagtggagagtcacaggagatgaaactggagagggaggcagacattttcaacaaattataaacttttcaccaaaatcttaacttcctttctcctaacatgcaatcaaagctaaaaaaaatacatatggaaagtaaattttatattaagttcttatgttttgcatttggaaggcaaaaactgaattatggccattggggcctgagaataatgggttttgccttggcatgtgcttgttcgttcagggttggtatttcatataacaggacagatgctaatgtatttttttgctttgttgtttcagcacttcagggagcatctggacaaactttttgccaaaggaatcggaatgctggatatagctttgaatgaagccttcaacattctcagtgatgtaagctcctctttgatttgcctttctcgcctctaagagaatagatgggatttttcgtgggccagcattattgttagtcaggcaggggataagagggtaaggctggggaaccaggtctagtttgggaggccaac

SEQ ID NO: 63023 - DNA, 848 bp, Bovine  19866881661760
  misc_feature (1)..(1): n is a, c, g, or t
ntaaaacagcgtattcctttggcgtatccttgtccatgcaagtcatccttgttcaagccaaaataactgttttatcatgctttttggggaggagggttctgttccccttttccatcccgctaatcacctttgttctcttgttctttaagttccaagtgtgacatgactgtgtctgtagccctggactttgctgtgtcccgtgcttgtcactcttgttgtgtagtcactaagtcgtgtccaactcttttgtgaccccgtagactgtagcccaccaggctcctctttccgtgggattctccaggcaagaatactggagtgggttgtcatttccttctccaaggggatcttcccaacccagggatcaaacccacgtctcctgtatcggcagatggattctttaccactgagccgtctgggaaacaacacccttgttaggcctgccttgatttgcgtttctcactgttgccctggctggtggttagtgactcttcacctgctggttggtccgcagcaccatgtggttctcacgtcttcccatttagtgaagctcctttcccttctcttctatagaattaccctttatgactatcaagccatgtgcagggccaacaaggagagcagtgacggcgcccacggtcttctggatgtaagtacagtacagtcactcagaagacagctgtgtgttttttcctgtctctgtgtgtgcatatagttttccttggacccatcaagtttatgtttcaaaataatgaatatttaaatgtgcttcctgatttcatcggttaagaaaagttatttctgttaaatccaaatctggtgatttccggaatgacaaacagacctgaagc

SEQ ID NO: 63024 - DNA, 1248 bp, Bovine  19866881737899
  misc_feature (1)..(1): n is a, c, g, or t
ngcatggaaggaagcgcttttagcaggagcggtctcaccttcacaaagggttcagtcaatcagaagtaaactcggactggagatgtaactcggaccctgaacagagtccccgatatccggctcagagacggcactgacaggtccagggccgcgccccaccaccgggtgcctcagactcaagatccgtgcctctggcgactctgcgacccctacgagcccgggacaggaaggtcgctcctcaagtgactctgaggagcctgggacacgacgccggccctcaggcaacttccagaccctgaggagctcaggcacgacgggtgccctcaggtgactccgcaacctcgaaaagccaggaacaggatagccgaccctcaggtgacttcctgaccccaaggagcccggggcagggcggccaccctctgtcgactccaaggaaccctctacaggacagtagccagaggagggattggagacaaaatggtggagaaggaccttacgctcatcgcaagattatctcgcgagaacaccagaaaacaaaacaaaatgtattttaccaaagtaaaaatggcacattaatcttttcgatattatataaagcttaaatcaagtacatcatttttaaagatgatcaccaatctactagtgcctctcttaatgactgttaaattacccctttaatggataattaatgcatttaatatctctcactattatgatttcttttatgcaaatttagaatgataatagctaacaaacacaatactccctttatcataatttagccatctaaatgcccttgctaggaaagacaggtcaccttaaatgctttagtaataattcaattcaatctttctttttaaacaaataaatatgcattaattatacattgatttttcaaagacttgtcccatctcccagggagtttcactgaaaatcaacaagaggtcatcctgatttcctaaagcaaaatttacttaggatgattttcataactgaaaattgtaagtcttcatgttccttatttggaggctgataaagacaaatcacttatcctaaggagtatcataaaacacaaattagtaattaaaatcccctacatgtcagcttccaaattatttttccaccatatttttggaagtaacccacaagaaagttaagggggtaaaaaagatttacttagaaaccaacagattttccatactcaaagagcattagaagcagtaaagggaatgattcctcccctcttcg

SEQ ID NO: 63025 - DNA, 1665 bp, Bovine  19866880257556
  misc_feature (1)..(1): n is a, c, g, or t
ntatattccccatgaacaagaatcagctttgagagccagagcagaaggatggcccgtttctatttgcttctctgctttaacagtctgcttctggttggaaaaggaattaaccacattcagtaaagtggaaagataaaaatcacattaataactgcaatattgagactataaggaattttgaagtttgtagaaatgtagaagaaatatctgatgaatgaaaggcacttcccctaaatatttggtcttcctctacagttccagatttccagctccccagattcttggaatttgctaaatgttgagagtgatcgtttagtcaaggctatggtttttcagtagtcatgcatggatgtgagagttggactatagaggaaactgagcaccaaagaattgatgcttttgaactgtggtgttgggagaagacccttgagagtcccttggactgcaaggagatccaaccagtccattctgaaggagatcagtcctgggtgttcattggaaggactgatgctgaagctgaaactccagtactttggccacctcatgtgaagagttgactcggaaaagaccctgatgctgggagggattgggggcaggaggagaaggggacgatagaggatgagatggttggatggcatcactgactcaatgagcatgagtttgagtaagctctaggagttggtgatggacagggaggcctgagtccatggggttgcaaagagttggacatgtctgagctgagcgattgaactgaactgagagtaataatggtgttttgatatgttaatgaggtgacttttgaaaagcatccagggataagagccactagtatctgaagttgggtggtgagggggatgaagagtgaggaggattcttgtgtgactgaacttgtggaatctgatattatgtctagatagtaagtgtcagaactgagttgaattctcagacactctgctggtgtctgagaattactttttggtgtgagggaaactgcgcccccccgccccaacattggaaattgagtctcagaacactgaaaaaataacatattatgccccctttgctaaatacttatgattttcctcatatgatgcagtcttcatccttctctgccctatattatgcccagaacaataactttatattctgccttgacctgccctgccttttgtcttcaggttgggagccagtcagtggttgacacaagtgagaaatcagaggttggagttgaagtaaggcaaggttttcattttcccatctccccagctacctctgccagaggtcacagctcctgtctagcagccctcctgtgcaatcaaagctgctgcttactattctagtaacttctccctccttgtgtgtcttcacatctagggatggtgacattctcatatcctgccacctctccagtggcacaccatcccttgtttcccttaacttaaaaaaaaaaataatcccttaattaaagtttcttcagttgtcctggtaagtatggcatttacttttcttcagaccattactgataaactcattatatctgtatgattttgtatctgcatgaagtattttttgattagattagaactccttaaaatcagggattctaattcttaaaattctcttatccttttcctccactacaaagcacaatacactatatacaga

SEQ ID NO: 63026 - DNA, 674 bp, Bovine  19866880366595
  misc_feature (1)..(1): n is a, c, g, or t
nctttacgtgaatgaaaatggggcttttcttttggcctggctacttttactctttcatactctctgtgtcctccccgctgcccctcagaaaaccctcgggggcacagaaaccccaggctccccaggctccccaggctatttctccttctgtgtgccaaaacccagcccgctcgctgttgtggacacatggtccagtcccaacatcagagatgtgctctcagcccacgaactccacacctcagaagaaatcctgccccctccccaccccccagccctgcctgtgtcctctagggcagtgcctgtgtctggccttggagccaagaggcagcttctcagagaaagctggacgtggcgagtaggtgacgctgccctcggcaggactgccaaggctttcctaaaggccacagcaaccgagtctgcccgcgagaacattttggtgagctcagtttgtttgctaccgagaacctccttgtcctcacagtctatttttaccacgcagtgacgctgaacactctgctgtcattaaagtgaatgatatatagaaccaactctccatgagctatcactgtacggggaaaggaaccctggattcagaatcagaaatcaggagcttgacccctggttttgaccttggtgtgaccttgaggaagccatttaaccctgctgagtctcag

SEQ ID NO: 63027 - DNA, 1130 bp, Bovine  19866880391919
  misc_feature (1)..(1): n is a, c, g, or t
naattgccgtttgtcccgtttagcctgcaacctcggtcctttcccttcccccaccaacttttctgggactcaagttgttgtgtttctcctactcccttcgacgagggagcacaattatatttctacttcgtccgcatttgtggaaagaggaatgggtgttagcccccttacgctgcgtccgggaccactcttcagagcccatgtctttgcgtatttgtggggaacggtgcagtatcgtgttgaatttgtacgcattctatgcacagttatatgcacataaaatgtaaaacaccgggcggatgtcgatgtcaatattttaacagaatcttagaaggggcggggaacaacttaaagttttgtattaagtgccaagatttcaactgtgcaaaacagtccgggggaacagctgttgtcggaagaattttgcgcgcgcgcgcgcacacacacacacaaacacacacactcaggctacgctcactgcttggtttagcgcttcagaaactttccagccaggatttgtaaaacttttcgggaggtgctcctgctgaccagctagggctggggagtagatttgggtcagagcgccggcaaatcggaagggggcggcggatcgtaaagagatgaggggcggcggcaggcccatgagcttggggacccaacttgaggcccaggaaggagcttgggggctggaaaactggccgatccaaggagagacagctgtcgcttacattttctctttcggcagtgacagttcaatttccatgctcccgaggctaataataacgcgattagcgggtgacctgcagagacaaagttttatgaattctccgtgttcttgcggccggttacggtatttgggtttagtgctggggaattatttttattagtcgatgaaaagaaaattaaaaggagatttatttcatccgctcaagcctttccctgtatttggatgcgggtgcctgtccacgcggacccctgtgtgggcaatccagaaaggaacgcgtggctaatgtgtgtttcccatctctggacagaccctatttcctcaccgcacttatttgttgtcaaaatctcctttgggccttcacacagtttagtggaagttcttgcaggtcttaggacagctcata

SEQ ID NO: 63028 - DNA, 3822 bp, Bovine  19866880410738
  misc_feature (1)..(1): n is a, c, g, or t
ntggtgttggagaagactcttgacagtcccttggactgcaaggagatccaaccagtccattctgaaggagatcagccctgggatttctttggaaggaatgatgctaaagctgaaactccagtactttggccacctcatgcagagttgactcattggaaaagactgatgctgggagggattaggggcaagaggagaaggggacaacagaggatgagatggctggatggcatcacggactcgatggacgtgagtttgagtgaactctgggagttggtgatggacagggaggcctggtgtgctgcaattcatggggtcgcaaagagtcagacatgactgagcaactgaattgaactgaactgaactgataccaaatattgccacagaaagaaagaaagaaagaaagtaaagttgttcagtcgtgtccaactctttgtgaccccatggactgtagcctaccaggcttctctgtccatgggattttccaagcaagaatactggaatgggttgccatttccttttccagatcttcccaacccagggattgaacccgggtctcccacactgtaggcagacgctttaccatctgagccaccagggaagtccaaatattgccatagaccaaagggaactcttcttttggtggaacataagttggaatgccagtttggagagcaatctggcaatactcccttggaatattttttccagtagtcacatacagatatgagagttgggcaacaaagaaagctgagtgccaaagaattgatgcttttgaactgtggtattgaagaagactcttgagagttccttggattgcaaggagatcaaaccagtcaatcctaaagggaaacggtcctgaatattcattggaaggactgatgctgaagctgaaactccaatactttggccacctgatgctaagaactgactcattggaaaagaccctgatgctggaaaagattgaagacagaaggagaaggggacgacagaggatgagatgattggatggcatcaccaacttgatggacatgagtttgagaatctgatggataaggaagcatggcgtgctgcagtccatgggcctgcaaagagtcggtcactactgagtgactgaactgaactgagctggcaataattcactaacgttgatgtcatatatcctcatgattccactcttgggtatgtacacctagaaaagcctttcagaggtgaacaaaaagcatatgtaagtatgtccactgtagtattattcacagtaacaaaaagttagaagaaatcttaatatcttttgccaggaaaataacaatagattaaacaaattgtgatacagccagacaatggaatatcatccagccatcaaaatgattaaatctcaaacacataattaatgctgcatacaaaaatatagattcaggaagatatgtgcagcataaggctatttatgtaaagttctaaaacatacaaaataaataatatggattgttatggccaaatcatatgcaataaaaatgtaaacaggtacatgggaatgatgaatattaaattcagcatagtggttccctctggagaggctttcagaggtgcacaaaaagcatatgtaagtgtgcccattgtaataatattcacagtaacaaaaagttggaaaaaatctaaatatctttagccaggcaagcaacaatagataaataaattgtgatagagccagacaatggaatatcatacagcagtcaaaatgattaaatttcctgcctgcaacgagggagacccaggttcaattcctgggtcgggaagatcccctggagaagaaaatggcaacccactccagtattcttgcttggagaattccatggacagaagagcctggtgggctacagtccatggtgtcacaaagagtcggacatgatcgagtgactaacactttcacacacattttctggggaggcagaaagcagaatgagactagagagagcttaaaaagttttgactatacctgtaatgttttacttcttaacccccaaaaactgcatgcaagtatgccaaaaggttagcattcaaagagcagccatccatactcatactcttctcaatgtttgaaatatttctcgataacaaactcttgtgaaaatattttgtcattgggaatgaagagaggcacagtcactatatttgatcttcatcttacaaatgcactccatccttaaatcaagaagcctggattggggacagtgtgtgtgtggtgcggtaaggtgagagagaaagttaacatctgtcaggaatcatatgtatacgtcatgttatttaaatatccttattgtagacattataaagggggttcaaagagcttcagtaacttgcctagtatgtcacaacgagaagagatcacagtgagattcaaactgtatctggcttcagagcccatactcattgccctgatagtaaaaaagctcttcttggaggtgtaattaagatatgacctaactctgtgctccaggatggaagcaacacaaatacaatagcttctcatcgaatcacatatgagtatagatctaggcaaggaagtggtactagcagaaacttttagagaaggaaataacatgaggagtttgggtattttaataattttcctaacttctctttattatttattccatgggacatttagaacctctgcctctccctggaaactctggaagtgatgccaattttacaaatagattcctcaagaccattaagttatatagaggtttgtttgcttcctttatgagttgaacgtatacctgttgtcagtagcctaacaacttgagagtttaacaaatataaatacatacttaaacacaattccaaaattatgaggataaatgaaaacacaagagattctcggtcctagtttaggatttggctttgtatctttaagacaagcaccatgggtcaggtacttttgtttgtatttactgagccaagattcatgtagtcagttccgttggccctcattcggaaatgggttccttcatagtcccccttcctgtattactattattgatttttgtttcctgggaaaccaaacctcgctctaattagagaatgaggtcacattctgaagttgcagatttcattctttgccctggactcttccctggactgtttcggaccctctgtaacaggaggtctgatggtcaaagttgtccttttctcttagccttggcagaaagccaatgcctaaagctatgaactccagcttttatcttccatctgcagggtgactcaatcccaagcaaagtaacaactaaagacgtggagacatgcacctcagagacagctgtgggaatcagattggatctgcactcaagcctgctagaaataaaagaccactgacttgggcatttggatggaaagctctgccaagcacacacacaggcaggcgtcttctctctccctctctcactcacacacacacacaaatgcatgcacataggcacaccttttagaggagaggctccgaaaaattccccacatatggcaaacatattttaggggaagcaccatgactagaggccagtgggaaagaaagaaaaagaaaataatgagaaaaatcttcaataagtctcaattgttccagtcagactgctgagaaagaatgcaaaggactggagataaaaataattgataaaatcagcatcccaacatagctaaattctttcgctatttcaaacaattactagaacttactctggtagacaacaatagcccggggaactggcctctatatttatccgtgaagtactttgcttaacacagtggatgaacatgaaaagaacacttaca

SEQ ID NO: 63029 - DNA, 3081 bp, Bovine  19866880458416
  misc_feature (1)..(1): n is a, c, g, or t
nacctaaggagatcctaaaggaaataatgctggagctgagctctgaaggctgtgtacagaataggcagagagcagtaggagctagaaaggaaggtctccaggccagggacatagcaagtgcaaaggccctggggctagagaagaggaaggcagctagagagcagaaaacaccttgttgctaattggtaagaagttggtctactggatgtatgtgtgtgtatgcgtgcatgagtgtgtgctcagtcatgtccaactctctgtggccccatagactcctgtgtgccaggctcctctgcccctggaattttccaagcacaaatactcaagtggggtgccatttcctactccaggggctcttcccaagctagggatggaacttgcttctcttgagtctcccgcattagcagatggattctttagcactagctctagtaccacctgggaaagccctgtctacttgatacacgcaattgttttgtcacttgcaggagatttgttgaaatatcttcttggctgccttcattcttcttgcttcctctttttattctatcataattaagaatatttcttagttgttttgtataacatggaatggaatctagatattcagacttaaaatatgaagctgagacaacgtttctatgaaccctgacaaaattcaaaggaaaaatttcttattaaggattaaggcatgtcaaaccacttgtccatcttttgtgtggctatgattggatttaaacagatacactgttttaaagacaaatattcctgtatcaaataaagtcctgtaagataactcttagccataaatttgatgtgtgttttccagtatgatcaatgttagagacaagctggaagaaaggaatggtagcataaattaggaggagatgaagccttctgaatgctcactgaggagatgatatcttcttcccacttttcctaataagttatcaaacttgaagtcatagacatgatagctatttgcagcctcgtaataacccttccaaaggaaacctgggtggtgtcaggtaattgtcatttgaatctaatactttttcaccatcttgccaagtcattttgacgtgtcctgcttggtgaaaggagaatcgtaaatgccttttgcgatccgtcactgttggaaatcaccgaagtggtattcctctgactgtgtttatctagcaaccagagttgtgttgttggtgtgaaagtcgccccacatgaacccatcagtcatcaggcaggatcttttagcctcaccgtcagggctgagattcagtaaacatcttaaattctcccctggaattatgagagtttctgtaaaagaaccacacacacacacacacctatatgaaagatacacacaacaatatgaaaaccaagcccatactttgctctgcttatctagcaagggcaataggtctgcaaaatattgtaaaaaattaagaatatgacatttccaacattatttcatgatcatctatataataataaataccagatatcttctggatagactacaccatgcaagtggttgtgttgataacattaaataattcttacctgtatcctatatcttctctcaaaaatcacttgtgctcatcatctaactacattacaggcctgctcaaaagtcatttaaatcatgtttctctcttccttaaagctcttcaggggtgcttataacatataggttacaagataaagtctgaatgtcttagcatggtgccagggctccttgtcttacttctttataaatattgcttatattttctcctttttaagatgttcatttcactttttgccttttccaccctggtagcccatttattgcttgtttgcagtagtgtgcatcaaatatcggtcacttcccatgaacaacatatgtgggcatatcatgcccagagagaaggcactatatcattgattccccccccccctgtattttcatagtactttgcacactgtaggtgtgtgttgggtaaccataggtgacaacaaagaccacgataatggttagcaatttagtatactgtgtagaaatacttaatagtagtaagtcaacatcagccaaaatttcttttccgttttttctctatttgagtgtcatgcatcagtaatattgtgtgtgttcagtcatgtccaactctttgcaaccccatggactgtagcccactaggcttgctttgtccatggaatttcccaggcaagaatactggagtgagttgccatttcctcctccaggggatcttccaacccagggtttgaactcgtgtctcttgtgtctcctgcattgataggtggattctttaccactgcgccatctggggatattcatatgaatgtaattatttggaaaagttattttccactgaaatactcataaaactttaatgcgtatattgaaaataacgaatatccttagtgcagttcatatattggtgactttggtcactagatggcataccacaagctcctgctgggcagctacacaagctgacgcatcatttgaaaaaggcctgcgaagacacagggcagtttgctttggacaaattacatctgaagggattttcagtgtttgtttcaaagtgaaaattagacttagaatacatagttaaatatataacaaatgtgagctgtaaggaatcatttattcaacagataattattttaaagagaaactaggtactaaacgctgtgtcaggcccggaggaagacagcaagatgctaagacttgagcctggttgaagctgagcagagaagctaagtgtataagcctcactctactttccaattggcactgaaaaaataaacctaacaaaacagagagtagattgtttaactcctgaagaagaaagtagaagaataataggtggatggaacctataactacactggaaaccttcagtgtagttaaatgtcagtgaaggagttttttacatttggagaaggcaatggcaccccactccagtactcttgcctggaaaatctcatggacggaggagcctggaaggctgcagtccacggggttgctgagggtcggacacgactgagggacttcactttcacttttcattttcatgt

SEQ ID NO: 63030 - DNA, 796 bp, Bovine  19866880508614
  misc_feature (1)..(1): n is a, c, g, or t
ntaaaatgaggataacaatccttatgcttgatacaggtttgtgaagatgaactatggttatagtttaccaaacacttcttcatatgttaaattaggaaaatattagaaatccacaagaattaagagacttctgggctcacataaactctcttgtggatgaagaaggagttaacctgcctggcagtgcacaggggtctgatgggtctggtcagccaatataagcagatggctgtgatgtcattcttgtaacatgattccttgctggggtgcaccggtggggcatattggagcctcacagaggagcccctctctagcctgcccacatagttcaatttactctcaataaaaatgcaataaaaggctcacttgccttcagactgttgaatgcttgtgactccagattatttggaatagaaatcctgactgacaggatttgggagaagaagatggatgaaatatccttaaagcaaaaaagcaggaaatgaaggaaataaagtggttgtattttaccaaactggatggtagttcaaagaccctgcaagattttggaagtgtataagccagggctaaaataatctctagtagcaaatgatgttgtgttcctaatacaaggtggtggaatcaaaccctttcttctaaagattcacatgactttggggaagctgggcaacactaactgccacctcttcattatcgtaaaaagtctaaacttcctgagtctcaagattggccagttcgagggcatgctaatgcttctcccatattatggcattatccagagtgtttagctctggca

SEQ ID NO: 63031 - DNA, 1193 bp, Bovine  19866880651412
  misc_feature (1)..(1): n is a, c, g, or t
ngataaaagcattataggaaaacacagattggaggtgagacatacaggaaactggaaatcagtgtacttgcccatggctggaaggactaagtgactggagcatcacatcacacagaacccgtagcagaggatctcaatcataggtggtgagtgcaatgtgtcttcttcatttggataaatattgagcgaattggttctgataccagtagactccactccactaaaaggtctcagaacccctgctgtgtgatggctgttccttcctgcttcacattttcaggatgggctcctctgtctttaaattttacaagccattatttgaactttgttattgattttatggacattctctcatgttatgggagagctaaggggatttggggtgttctctcttcctcagaaagttaccatttccctaaagataggagccatgattttcgtttcttcagtcttcatgcatagcatccagtgcggattctggcattcagtgaaaattcagtgcgttaaccgccaaaattaaatcaggggcaccaattacacctggccagcggacgggggagcctggtgggctgccatctatggggtcgcacagagtcggacacgactgaagtgatttagcagcagcagcagcagccttaagacctagacttctcttataaattcataaatttcttgaccaatcagccagaaatgcccctacaagagtttctctgagtttattgccctcagaggataatatgaattatatggtacgaataataagaattattctactaaacgatatgatttatttcagcattttgaaatgcgtcctgtgtttctgtctgaattctcctgacttgacagtgagttcctggagcacaagaactctgtctgataaacacagtctgatacataacagacagttgctaaatgttagatgtgtaataaatgtaatttcacaagaggaaaaaaaaaaactttcatgcttgcttaattacttaaaatgactcaaaatagcatagagattcttttttacccatttgaaacctcctgggactagtcagttctagaggaaaaaaagggaaagaggaaggtagaggagatggggttatttgactcacatgtccttgatcatccaattcattgttggtcagcttgagtttgtcaaaactgaccacctgtctcatccaagtatctccagaagctagaga

SEQ ID NO: 63032 - DNA, 1591 bp, Bovine  19866880767607
  misc_feature (1)..(1): n is a, c, g, or t
ntatgtatatactactgcataaaatagataactaataaggacctactctataataaggactatagggaattctactcaatactctgtaatggcctacgtgggaaaagaatctaaaagaatggttacatgtataacagatccactttgctgtatacctgaaactaacacagcattgtaaaccaattatactccgataaaaggttttggggaaaaaattaccttttctttataaaaatctttggaaaatggcagtggttatttgtgagcatgtcatttaatttacactaccgctgctgtgctatagataccagctatcttccttttttttgcttaacaatatagttttaagatataatcttatttttatgcatatattcaccttgtggcttctggtttctgctaagtactacatcatctgcatccaccttagattaatactccctcagggtcaggacccagactgctatcatctccctgctaccacaaacaacactataataaagagtgctttgagctcctatttcttctctatccaataatagaaagcctttaaggaaatattcaacgcattgatagattccctaactaagaaaacatgcagaatcctactgaaaattaagtcatatggctatttttcttactatgcaaataattatccttaatatgtttgtggtataagtttcatgttcggacttatatacatttgacttccataaagataaaacatccatatgaaacaatttggacattcttcaagctcagtgggattagtactttgctctctttcatttaaactgtctcaagtaatcagctttcttctttgagatactgtatcccaggccagtagatatgacttcttggaagtcctaacatttggcttacatttacctttccttaaattgatctcaaaagagtgatctcttcaggccaaattcctccctaaagaaattagcagtgtgtaaggttagctaaaatcacagattcataataagaactctgtaactatttgggttcaggaatagacaatagtagatgaaggtaagacagctttgcagatgtccctacatctataaccaggggctgaaattttatgataggtccttaggaaaaagtaatgttgagtctattcatttttttgtgataaagataatttaaagcctggtaagtagactgattcaattacaatgtgttgggggaatacaacatcttaattaaccaatgtttactgaatatttattatatttgaggcattatgataagcaatgggatagaagaatgtggaatgtaaacattaataaaatatttatacttgtaagattattagtagagggagaggttcttgatatgggaataactaacagaggaaggtaagactacagaaacccgattcaacaaatattgagttccaaccaaatagggctatcgttttaagtcctcatcaacacaaatgactttggtgtccgccctcacaatctgcaagaggtggaaaacaagaaaataaatgtgattaagtcttatggaaactatgatggaaagaatgcagaaagagacaaaaaaagtcaggagagggagatccataaaaagaaagtat

SEQ ID NO: 63033 - DNA, 1269 bp, Bovine  19866880787377
  misc_feature (1)..(1): n is a, c, g, or t
ntgctttgcaagggctgtctctagttgcggagagcggggctactgttccttgcggtgcacgggcttctcactgaggtggtttttcttgctgtggagcacaggctgtagtcatgagagcttcaggagttgtgctcaccagccttagagcacgtgggctttagtagctgtggcacatgggctgagttcctccgtggcatgtggaatcattctgggctaggggtggaacccatgacttctgcattggcaggcagattcttatccattgccaccaccagggaagtcctcccattcttatttgaatgaaaggagaggtctatgacaagtattcgtggcttgtagccccatcactttctccttcccctcagtgggaaccagggtgatggatgtgattgctgagtctggaactcttcaggacggcttgcctgcagagagtatgcaatctgggctcttcccattgcatggtaagcccagcagaggaggcctgcaggaagtcaactcatttcagggggttccaacacactctttcagccttcgtacctgtgctgtcatcttcaaatacttttatcaatagtaaaactggcgttttggtctccatgacatcaggctcctaggtctttctcagaaatttattctgagttcaaatgaggacaaggggtgataaccgttgggcgttccagaaccccagtgggaatcccagtgagttcactgtgttagccctgtgacatcatcagagcccataatggttcctcctgcttctttaggaagcatcattcacatgctacagtgtgagaaggtcactgcccttcgacctttacttatggagctcctacttttcattcccatgtaattatgtccctgaatagaagtgtctaccaaagtgtgtgtgtgtgttcatgttatggagaagagtagtagacatctagtccttttgcagtgaaaacactgacagattttgcttccaggcattgtctctgcaatgggagggagattgtttatttctgttgttcttccttctagatttctcagaaattctgtagcccaaatacagctttgggtggaagcatcaatatgtatttacctttagcaggcccagcccagggtgcaatatccagcatcccctctgggagattcctcataaggaggaggcagtaacaccttcttgttgctgagggaaaacagatgcccttagcttgagttaagttttgtcttgtgatctgtgctcctgggctctgtttgttccctgctagaataagctcctgcagaggggct

SEQ ID NO: 63034 - DNA, 2516 bp, Bovine  19866880871389
  misc_feature (1)..(1): n is a, c, g, or t
nttgcctgattgactattttgactaaacccatcagcattcagaaaacttagatcatggcatctggtcctatcacttcatgggaaatagatggggaaataggggaaacagtgtcagactttatttttctgggctccaaaatcactgcagatggtgactgcaaccatgagattaaaagatgcttactccttggaaggaaagttatgcccaacctagatagcatattcaaaagcagagacattactttgccaacaaaggtccgtctagtcaaggctatggtttttctagtggtcatgtatggatgtgagagttggactgtgaagaaagctgagcactggagaattgatgcttttgaactgtggtgttggagaagactcttgagagtcccttggactgcaaggagatccaaccggtccatcctaaagaaatcagtactgaatattcattgaaaggactgatgctaaagctgaaactccaatactttggccacctcatgagaagaattgactcattggaaaagaccctgatgctgggagggattgagggcaggaggagaaagggacgacagaggttgagatggctggatggcatcaccgacttgatggacaggagtttgggtgaactctgggagttggtgatggacagggaggcctggcgtgctgcaattcatggggtcacaaagagtcggacacgacagagtgactgaactgaactgaactgaaaatgactttataattcagtcaagttgctggcttttcaccaaaaaagatcaccagtgtcatattgctaatattttatatttgtgtgacagtttgttttctcagagcattgtctgtcgtaggatggaaaatcacaataatctcatttgattctctcaaaaccatacaaaatggagccagtagtcaccgtattttggagatggggagacgaatggcccatgatcacagccaggtgtgagcagagccctgggagaaagccattgattttccatgagcatcctccccccagactcagtaccctctcttcccttaccctgggttggaagacgagctggaggcaggtaggatgcggctttacactctgagggcctttgaatgtacactgaggctcctctggttctacagggctgagctggcctgtaagtacatggtagtgatgtggagagtttccttcattctttttgaggagtcactgtttctgggcccagaatatctgcctgtctgtttccttagctgctgcccagtaggctcaggagcacctgctctgtactatttgttaaattcctgctgaatgacagtgatcagtaggtacctccttctggggatgggcttctgttacctgtacacctgttaaatcactgacttcttggcaaatgtgtttgtaggttttcccagacaggctgagtcaaagcctaagaatcacaaggtaggttctgtatttttcctcttaaaagtaccaggctcacctctgcatcttagaggtcatagttgtcctgcaagattccattccttaatagaatgtaacagttgttacttatttttctttttttcttacaaattaaaaatactcaaataacttgtacacatattaaaaaattcaaatagcataagaagtagtcactgaaatgcactaagtgaaaattaatctcccatcgctagtgtcctggtttatcactgtagggtcagtcactgttaccactttgttttgtatcattccaggtagaggtataatgtatatgagttgttatatgaatgattatatgattataatcatatgattattcattatatgaatcattatatacacttacatacatatgtttatatacaaacctttaaaatcaaaacacagattttggcataatacacccagtactttggactttatgaagttagtttcaaactgttatactggagattgttaaatagacatacttataggttttccccttcctgctgttttaaaagtcccatagtattccagtgtgtggatttatcatcatttttacccaaactactttaatggacctttacattgttttcagtcattttcttctgtaaataaagctcctagactatgtgaggggggcattttgatagcatttatggaataaattctagaagtagagttgtgtggttgaagttacatcatttaaaattctgatggatgttccaaaattgccctccataaaaggttgtgcaatttacacttccacccacaggacatgacagcctagtttcccacccacttgccaacagtatattagaaaatgtttccatctttgctaactaatatccttgtctttgaaaactgtttgcaaattgatcttgtcataaattcttttcagctctccccacaacttccctattttttcaaggtacagaacttaagtttatagggctttagggcaattccttcttcccttaaaataggcagagggtttcatttaatctctcaggcttccctgttcctgcatttattaccaatcattactttaacttattcttttaggatcctg

SEQ ID NO: 63035 - DNA, 835 bp, Bovine  19866880890980
  misc_feature (1)..(1): n is a, c, g, or t
ncctgcaatgcaggtgacctgggtttgatccctgggttgggaagaccccatggaaaaggacatggctacccactctagtactcttgcctgggaaatcctatgatagaggagaccagcaggctacagtccatggggttacaagtgtcagacacgacttagcaactaaattcaccaccacgaccctacaagtagaacttttgattatcttttctcagaaatatgtgattatctccatttcacagaaccaaagactcaaatccaggcctttaaaaatatgtctagggtatgttccttgtatgctgtctgcccttgtatagcagaaaaagcactggatatggcccaaagactgtagcttctctaaaagcaaaacacactaataaaattctgcttctgtgggggagagtcaattgaaatcaaataagagtacatttcattctgtcatctcctgacctataaaagtgagttagaagactggactcctggacagttgttgcctctgggccctacaaaagtctctgttcacttctcattgttgcagatttctgaatcttgtcttcaggccagcttccttctctcttgatatcacaacagcattccattctgtacttggacagtctgtgaaatctgtcttctcttagaacagatgatagagctcaggtttcaaaattcaataaatcttgtcctgtgagattcttgaagtgggcattcaggaaagcagaagccaaaaatagatgttcttcaattaagcctacagtgaaggtgttagttactcagttgtgtccgactccttgagatcccatggactgttgcccgccaaggctccactgtccttgga

SEQ ID NO: 63036 - DNA, 1579 bp, Bovine  19866880898623
  misc_feature (1)..(1): n is a, c, g, or t
ncagagcccacactcagaccctttgattccactgcttctctgctgtgctaagattcatcacttggtgttagccttccagacttagaatctgaggttgactttgtactgatctagccctgcctgatcactgtggatccagtaataccgcatccttatgcttctctcttccttttttcaataaatacacagctaaagtcaggcaccattctagggaacagcaggaaaaaaaagatcacaaatgagtatggtccctgctatcactgggaaaagagacaaacgaggagttaggatacaatgtggtaagcgatctgatcaggaaagcagaggaactcagagcaataaatttggtcagcaaaggcttccttgaccaaaatacctctgaaactgagacctgccagacagggaggcatgctatgcccatcttagctctgtctttgtccaccacttgtacaagagtggcagacaatctattgggtttgtttttaactttttaagttgagtagcattagagttcaaggaatataagaattcccctggtctctaagaatttcacaaaaacactgagataaagggaaattccacagaggaatcatagacctcagcttggaattgctacctggggaaaggaatgcaatacacattttctagaaagatcttgggcccattgagggaaaggctgtgtggtgcggttttattctataccgcattgggctatactttttctgcaataaaaccatagcacttggtgtgtcagactgagtctaattcagagatgtaactatgacctcagccatagaagaggactagaaaaataaccacaggttgaccttgaaaagagcagtactgattcaggcatggaataaggtttagcttacaacagcttgttagaaccacttaacattataaagaaattctagttcaggatacacagtcttcaaagatagcacctgaggatttagacacactaaatatttgagccttggtctaattccagggtcagtgttaggatgagatggaccggctttaggttcatggggatttcaaacgcacggcctgttactaagagtctaattatataagaaactccatattaacataaagctctagattaattggcagggcttcaaaaccgatgttattattgaactctttcctaattatacaagtttatcatttcacaaagttcttttactttccttcttctttctctccctcttttctccttttaagtaatagtacataaaaatatatcccataagttgaatgcttagtatggggtgggccagaaagtatgtgtgggtttttcctggaatgaacttttcggccaacctaatatttgccacccattgtaacaggagctaaggctccctttattacataaatcacttaattattctatggagtagatattatttcactgattttaaagatgaggaaactgagatttaaaggaggataattaacatgttcattataaatggacacacagatcaccacacaaatggaaattgtctgaactaggatttaaacccattttgtctgaactctcaagtctgtgctattactgtctgtggttgag

SEQ ID NO: 63037 - DNA, 1103 bp, Bovine  19866880941959
  misc_feature (1)..(1): n is a, c, g, or t
ntgttcttgatatgtatttccttgcatttgtccctcaatttaatgtcatcaacccatcatgaaatctataggagaggaattgccattttatatctgaggaacatgaggctcagagagtactgttagcttgtacagtatctctccataagtaagaagcaaatccaatatcaaaacctttactccttattcctaaatagtgcttttttcatgaacacatagagagcatgtttgaaaccccagcatgtttgagaccccaagcattcttattttgaagatgagtacagattgaactgaactgaactgaactagaaatataggacttcccaggtggctcagtggtaaagaaccctcttgtctaggaaatcccatggaaaaaggaacatagtgggctacagtccttggggtcaaagaagagctggacacaacttagtgaataaacaacaactggaaatacagacctgaactactgatactgtttatatcagcaaatcaactaatagctgctagatttaaatctggattcagccaaacttgatcacatttgctgctcagaatccccaaagcgggtcccaagttttgtctccttatgcttacctcagaaatacctcaaagtatattctgcctgactacaagagcagttggcctgagaattccctggcagtccagtggttgactccaagcttttactgcaggggtcacagtttcgatccctggttggggaactaagatcccacgtgctatgtggcacaaccgaaaaaaaagtagttggcctgatgagttggattttcccattaagtggaagcttctcatctcacatctgcttcagtctaagtagtagcaagtctctctaaaacctagcttgtctgcacttccttttcccacatctgaaaatggaaatgataattgtgattcaccacaccagggcctgattgattttgtaacagaaattgattgtaagttttttgtcagtgagtaccatgatcaccatttacacatgagaaatgagcatgctgggcaaagaatctttactcgcgtttcttaaagagaaggaaatagaagtggtctttttatcagagtagatattaatacacctaacactgcct

SEQ ID NO: 63038 - DNA, 2311 bp, Bovine  19866880965742
  misc_feature (1)..(1): n is a, c, g, or t
nttagaatctatactctcctgacctctaacaagttcccccattgtaggttgcagtttttaatgaacaaagtgtgttgtagttgttgactctccccggtcacatccttttcaggcatatctatcctacctgcataccaggtggcaaggataaggcagaatcatgtttaagctgaaatttgaggacccaaagctataaattagcaatgcaagtataaggagagatctggaaatagaaataaataggcatagaaagaaatataggtgtcatgatgatttgagagaccattttgtcttggcactgattagatttcctataaagactttacagcagtttctcttcttaacatctcaggagttcattgttgaaactttagaagcaaaaccttctttgcttggaacagtttgaacagctcctagttcctgaaatgtggctgaagatatgactcccatgggaagggggtaaagggaaataaaagcgctctgtaggttttgtgtttggtattgctgctgctggtggcatccctgaggcatctgggggagcaggctgaaccagtgagcaaactgctgtgctttcctgttttcagagaagactgcattgcttctcaagctgggctttcaggccaccttgcttcatgaatcatggccccacagcttgtttctctttctctgaccctcaatactccacaccccctctcatcagtaattttgtttttctagatgatgagaaactgccagatggatcccttgctttgctcgatccctggatcattggtctacctgctgcttctgccggtacttgccgctgggactccactgtctaaaaggactgccaaggtgcatttgtcagagcatggctcattatcttacaaactaaaggcaggtttatgtcctaaaacctaagcgttgaaactgcctttatgagtcctgttgagctaaaaaacactcatggaatctgtctgcaacatctcattattcaagaagaatttataatgatctactggttacccttttcctgtgattcttcagtctcattgctgagaaatcatttttgcagtctcagtctgagtccattttctgggaccagccttgtcaacgtagggagagagtaaccgagctcaagaaacccatcccttgcattttctgctctgaccttacagttgagttctagcatctagactcatgctttgttctgagaaccagtccccaccatatgctcctgattcaatggcatcgtaagcataggattcacttttgacctcaatgccatgtgcctttgggcatgttcttctttagaattcccttacatataccctttttctcacttgattcacagaatagtctcattgaaatcaattattttacacttaaaatccattttcaatgtagctgggacttgaacaaagcccttataactccataatcaatgctttttaagcaacatgtcttttctgttttagcataaacctgttctgaaacatgtggaaatagagattaatatgaagaagatctaaataagctttactggtattttagaatttttagtctacacatatagttttttttcattgttgataccattctataaaaaaatttcataacctgaaaatttgcattcagtgaatttgaatggtcttttggttctgttttctttttttaaatactgccactgttgattttgatcatcatattaaatcggtcctaagactataccaaaaaaaaaaaaaaaaggaggaaagaaagggaaggagggaggaaggaagggaaggagaaagagaggaagagagggaggaaggcaatagactctcccagatataatagaaaggaactatcagagcaggatattcctgagccaggtttcttgagccggacactgcagactagaggaaactttgtagaaaatttgtagataggcagactagaggaaaatctgtagataggcacacaaacaaaacattacaatggttccctgggcttggtttagaaactatctgattccctccttaagctatgtaaaattcgaatacctctttcacagtagccagtgcaaggaaacatctctagtacaatcccagtgcctactctgagacagtgtatagtatggtacatgaaacaaccaaatgaagcaaggcattacttcctgagcaggtatgctcatgttagggaaacctgtgcccaagaatagcagcagagttcttcttcatcaatctcatttacctaaaatgccaacctaaaaggtgagaagaacagccaatttttgtggtttaattggaaaggtcttcaaactgccccccaatcccaagcctacaagtct

SEQ ID NO: 63039 - DNA, 883 bp, Bovine  19866880989149
  misc_feature (1)..(1): n is a, c, g, or t
nagaaatgaggggcaactgattctggggggtggagccggtgggagggtggtccaccaactcagtttaccagtgcttaagttgctttcctcagtcttcatttttttcaaatccatagaatttttccagctatttctgagaatggcagaaaaaatgttagaagcaaaaataacttgtatttcttttaaattcagtaatgccatagaactcttttggcaggagagccctgggcgttcacacaagcaacaataggttatatcaaacacaaagactagaaatcactgatccgggacatctgaacatgtgatattaatctaaaaacttttcaagagctttatggaagctcttaattctagctataaaaaaaaattttttttttggtcttatgttgctattactgttactttctacaactgcaataaaacttccctcattccaacaaagtaaaggatgtcagttcagttcagttcagtcgctcagtcgtgtccgactctgcgaccccatgaattgcagctcgccaggcctccctgtccatcaccaactcccggatgagtcaaatgatagctaagttgtattaggaggaaaaaataaaaattattttttaagttaacaggattacagaatcttatagctaaaggggcctcaggttatttaagcctctctcgtatttcatgaaccaggaaccaaggcctcctcagtggctacgaaccaactttaaaactttttttttcaccatttatatgtctgcctttaaaaccaatatcctcggttccaacattaataacaaagcttgcactagaatctagtctaatttaagttagtgtagcccacttcctatcttaatacatggatataatctagaatacaagggcttgtgtccaatgt

SEQ ID NO: 63040 - DNA, 1354 bp, Bovine  19866881014142
  misc_feature (1)..(1): n is a, c, g, or t
naaaagtgatagtaccatagataatattctatagatagctgtttaaaattaattttatttatcctatagttggctttgtactactttatagtatgatgcactataatttttatccagttctctacagataaacattaagattgcttttattttatacatttgttttgaaaatccagacaaagtttaaataaaaatttaaaaatatgtattttggctacttgtatgcattaaatcttagaaaactcaggttctagcctttatgggttgaatctgctggaaaatctattgtatattccaaagatagactcttagtgatttatcaagccttctccagatctctcataatcctcaaatgagcaaggctcactcaacagctgccaccagccctggtttccccaaaagggtcgtcttgtgggcttcagttaacctgactgtgaacaaattaggttctggctccaaaaacctccccctctcttccacagatgcacagaacaggacaggttctccctgcctctaaccatacatagacaattttagcaacagcctgcctggcatctgtttcaccaggttcttaatctcagcaccattagtaattgacaccataaataagatcaccggtgagtgcctggaatcttgggatgggccaggaatttgacctggagatgctgggggatctgacaagagcagtcttgtggtaaattaatatctgtggcaaaaaaagggtgactctagcacatagctgagtagacacgcaggtttcccagtctggaggtgctccataaataagataaagtttcctgacctatctctgggattatttgtagccatggttacagcatgtgatagctacaagtgctttctgtaactaggggagtggggcttctaacttcaggcttttggccagaggttgcaaacttctggtatgttgtcagtaaacatgtagaatgctaaatagtaaaaataaataatttgccaacatttaaaaattgggaggtttggcataaaattctgaacttctggtatctttggggggaaaagcaaagatttggcaccaccaagaccacagtttcatgtgggggccagacagggctgccatcttcagtagggttgtgagcgctccaatttgacagatcttcctctggtcttcttccctagcctgtaactgcaggcctctggctaggatgtgatgccattgacaaccccaggtgttctgtggctactcatggctaagcagatgagctaaccactcacacagtgttaattagtggcaaactttgggcctcccaactctcaaatatttattctttcatttacctagagggcaaaaatgctaacattaagattcactcaatga

SEQ ID NO: 63041 - DNA, 2007 bp, Bovine  19866881020143
  misc_feature (1)..(1): n is a, c, g, or t
ntgacatcctattggtagtttgaaattctatatttacctcctggaaatttgcagattctactgactaatgcttttgtcctctttggagactttattttaccctgctcctctgaagaagatgactatagcattaagccatgggagtggtgaagtgaaactgtttccagaaattttagccccaaatgtatcatactagtttttgtgactgaatgagctgtaagacattccacagttagagagctcccattgacaagcacttagtatctatcttgtatccctcacaaagcacattttatggaaactgtgtcaatgtttgcacactcaaaacaagacagtgtctcaactcccggtacttgctcatcttctctgaatttctcacaggctcttgggtggaaagaggattctgcaaatctagttgtcaaatcttcagggactgattatacgggtcatggataaaacaggctctctttcctcatcttcctcatcaccttctggcctttttactgctcattagcacctccaccagagacccgggattgggaaggaatgagtgggtgtggaacgctcatcagaccttctggctccttgccagctgctcatgtaggttttgttgggaggagtaacttagagacaaagtaatggatccctagcatgggtgattttattcaactaactacccactttggcctcacccactcccaacacagatcattaagtgttggttgcattagcttattctgctccatgatgttttattcacttcagtacattccactggtggctggtttagttaactgtggatctggccaagcattgtgcaggatcagagtggagagaagattcgaattaaataatgttcacaaattagaccttgaaaaaagtgaaagtgttagtcgcttgtcgtgtctgactctttgcaaccctatggacttttgtccactaggcttctcttccatgggattttctgggcaagaatactggagtgggtagacattcccttctctaggggatcttccaacccagcgattgaacctgggtcttctgcattgcaggcagattctttatggtctgagccaccagggaagtccaaggagagaagattcaaatttaatagtgttcacaaatgtgatcttaggatgagtaaaaggcaactgtgctgaaatttcagggacgtctcagctgcttccccttaatgcttcttgcaattgtactctaaggatgtatagtaaaccctccacataattatattattaaaagtaaaaacattagtcaaatctttggttatggatgtttacttggctatgaatttacctctttcattaagggatttgtttatcttgctttggaatttcaagcaagagaaatatggtgagctatagtccatgggattgcaaagagttggacatgactgagcacatgtgtgcgtgcgtgttagcatttgtagagctaataagtagagtgcatctatgtacagtaatggagggccacattttagacatagtgaagacagtcttctctatgaagagatgcttaaacagagacccaagaaatgaggagagaccaccccatgggaaaagctgggggaagagcatgaagaatgagggacaagcaagctcaggaactctggagtgagttgtacgtgctgaggagctgaaagaaggctagtgtgtatgatggaggaggagtagcaggaacctctgttggagaagtacttggggatgagggtaaaagacagacatgttatacagggcttcacagaccatggcagggaatttagacttagtgttctaagtgcaataggaaaggattgcagagttttaagttggggagtgtgatgaaatatacattttaaagtccactctggctgctgcatggagaatgcctggtagggacaggagtggaaataaggaggcaaattaggtggctatgttgagagcttctagatgagagaggatggtgagctgcaccatgatggtagcagtgatgttaaagacaggggatagattc

SEQ ID NO: 63042 - DNA, 3199 bp, Bovine  19866881021387
  misc_feature (1)..(1): n is a, c, g, or t
ntcctaaaaagaggttataatgggctactcttctctttcctcttggagttgtcttttcttctgatcagtgcttctgatttccccaggattagagcaggtggggagaaggaagaggtgagggaaataggaagtctggggtggtccagagtcagcagcctgtggacctgtagatatttaaatgactcttcctttactggatgcttcttgaaagtcgtcattaggcttttctcaccttaagttctcctgtgcattaatacttggcttctcgtgtggcctctgggcatccaggagtctacctttggcttccctgctccttaggtcctcttgtccctccaggaagttctctctaatcatctggtttgtaggaaatgcacagtctttgccctgactctgggagcatacgcaattcctgtaccttagccgcctactccgtttcagccagcctctgcttgtttatatttttaagatgtggttcaaacatcgaaccattatgtcccccagagttcacaggaattatattaagatcttgaatgggtctcttcaaaatccctctttctggatttgggtttaggaaggtggtattctcacccctctctccctcgacggggcagggtggaagacacattgtaccagtctctccaaagaaatctcttcaaatacgtacctcttgaccttttatatccttaatgtgggtaagtaattgaccctgtaagagtttctgaacatctcctttgccaactgtacaaactggaatgaatcgtttccttggtgtcttagcatcaagttccattttaccatcttgttgtatttgtcaaatagccaccacagtgtctggcatagaaaagcactcaatagatgttcattcccttgtttccagggaaactagcaaagcataattacagataaataattaaattagtcaaacgttttgagatattccagatggaaacaccaaagaaggtgtaaagcaccattcttagagcaattttcatcctctctcttcattctgggcagctggcagtcttcttatatggagtgctgacacattcatgatgtgtctttctctgggaccaattttgatgacaggcaaatacaatttgacattattcagagctgtaaaattcctcctttctccaagaagcatgtacatcaaactgatcatctcagcttttttgttgcttttaatattttagaagtatggcaggtaaactgaatttttagtgtgtatcatttatgcaacttacctggaaaattagcctatcactatacatgtgatatgggagaagtcaatggcacctcactccagtgttcttgactggagaatcccagggatgggggagcctggtgggctcccatctatggggttgcacagagttggacacgactgaaatgacttagcagcagcagcgtatatgtgatatatcatgatttaattgaccccagatgagtaaattacattgttttacaatgactctatgataggtaatctctgggcaatgaatggttgaattgatctaagtttactggtgagatggctaagataaagtttaaggtctgtaagtcgcctgatacatgaattgggtgggtcagtcagggcttgatttgatcttttaagagggtcaatctgttagttttctgggcatttaagagaaactggaccctattgacctctgcttctatcaaagctgtcagcacaaactcaacgctcttcatgcctccacaggaaataggaaacataaaaatctgaatggtcaaccaatcaggctttctcatatgaggattatttctctacacagattgatggagttccatctatagaactgcaacagtggcttaccaagatgttaacaaaactttagcctcagtcataatttatatgtgcatataattctggaagcttattaatgaggaggctttattttcctctctatcttatcttcgatcatcagtatccatgctaaagattctttgttttcatggatcaaatggttggattagaacaacaggatcagagtctatataaatcttttctttaaagcttttgaaatatactgcccaattgttctctacaatggttgataaataagatatgcttcctctaagggggataaaagtgcctggtttttcaggattttaggaatactggtaaattctgttggcccttgactttgggagctcccatgcaatcttacacttgacattgctccttctgttgtgataactcaggaactgatatcagcaactgctttctatactcatgacctcgcttttgattcatgtattaaggtttggtatgatgttaagattttattttttggaccaccaatctatccttcatctcatttagtcaatcttatctcaatcttgtacacttattgtgattgatatgtacatcatggccaagatagactagaattgagattctagaaagattatcataggatgaagactttatgaataagacagagactcacttctcaggcctggtttatatattggatggctgattccctggtggctcagtgataaagaacctgcctaccaatgcaggagatgcgggtttgatccctgagttgcgaacaaactctggagaaggaaatggcaacacaaatccagtattcttgcctgagaaatcccatggacagaagagcccggtgggttacagtccatggggtcgcaaaaagagttggacacaacttagcaattaagcaatagcaaaatatcttggattagttacagaggttaatgaaagcttaaaaaagttcaaagctccttaaatttccctgtggtcaaaatcagtcccagagcttagagaaggactgaaccttttgaaaatgggagggagatgcaattggctctctggtggagataaagggcaagaattttaaaggcacaatttccccaagtttgttttgtggccgtcctcctctctgtaaaatctcaccttatccacactcatcatttcaaatatcagtttgtgccaacgactcttaaatgtatatctctagccctgaccttctccaaactccagctgatttaacaacttctgatgaatatatacataaattttcatgttttgaaacttccagtgtcaatatcagatctaatcccttgaatctattgctgggagaaatatcaataacctcagatattcagatgacaccaccctcatggcagaaagtgcagaagaactaaagag

SEQ ID NO: 63043 - DNA, 1489 bp, Bovine  19866881114926
  misc_feature (1)..(1): n is a, c, g, or t
nttttgagactgagagccccacagtgggacattctgccaacctcatgggattccccacctggccaaagcatctttccattctgggcacgagactgcaggattccccctcccccaatttcatgactctgaatgcagaatggatccaatattttctgtgctagccgtggaggtcattgtacctatgagatcgatcagttttctttgcaccttcaacttgcttaaagcattggggatagtgagctcagcatgcaattttcaaatgttttttccaaatcagatttctgcaaacaaggtaactcataggcacatgtggatacccactcagagggtggctgcctctccaatttccctctgaccatgatgtcaggaacttttatctttcaatctccaggatttactgtagggctcagcataagataagtgttcaggaaatgtgtgctgatgaactgattgctagctaaggggtcacttggtaaaaacagaaatcacagaagttcttgtcaaccgagctaaaacttaaaaaaaaaaatccccaagggacccttgtctattgaatgttaaagcatatatcaattctgtggtcaaattttacctctactatacaaagaaaataattagtgcttcaatgaaaagaatatcatgtttaccggaatcccaagtagtttaatttcgatgagggaagatggatggactcagaaaatataacttttttttctcctttggaaagtgaaaaacttgttagactgtattggtcatggtcactggtcttaaggtttttgtcataatggttttgatcagcctactccgaatttccagaggaatttgagagtttgaaatataaatgcttctgatttgagggaataaagacactgaaaagtgcaatcagattggagttatggacagagacagcagagaggggtgttgacaacagaagactgagtttgatgataatgataaagcctgattaagttctttccatctgccaaacaccattctaaatgtctgatttgaaatatgtgatttaatgctcacaacaatgtatgaggaaggaaccatcatcttctctattttccaatgaggaaaccaaggcacagagatgttataacttgcctaaggccacacagcagggacaggatttgatcccaagcagtaaaactccagaatctatgtttatatcccctgcccaagttgcttgcactgctcctcagctctgtgttattgagaaggcattctgaacctttctgagccttagtactcaggataggaataataatgatctaatactgcttgcaaatgtaggagatgtaagggatgcgggtttgtttcctgggtcgggaagatcccttggagtaggaaatggcaacccactccagtattcttgaatggagaatcccatggacagaggagcctggcaggcttcagtctatggggcctcaaggagttggacatgactgagcacacacacacacaataataataataataattg

SEQ ID NO: 63044 - DNA, 1139 bp, Bovine  19866881165848
  misc_feature (1)..(1): n is a, c, g, or t
nttgttgtgtggcagaaactgacagcattgtaaagcagttatcctccaattaaaaaaacatttttcttaaagccatgttctaatggagaatagtgttcaaaatttcttccccagtttggcctagtatttattttaagcaagattcctgggattcttctccatccttcattagccttcaaaaatattataagtggatcctccatacgcttctttgtgcctagcgttgtagtttattgttttccttaaatctttgtgcattcaggatttccaagtatctgcaaatatgagttaaaattcatcttatttgaactatttttttttacttcctaatttatcagtcatttgcctgaattgtgcaagaggtctaagagtttagttcattattttctgttgccgggtcattactcactgacttatttagaaaaaaaatttttttttccagtgtcttctcacttcatgacaatcataaatgaaaaatcttcattctttttacactgttatgcttgcattaagtcattctggtttttttcctgccaagtattttttctccaagtcttgactggggctgggtctacatgacaccaaaacatccaaatgagaaagaaaaattcagttgaaccactcagatgtttatccaccaaatccagatgtttggcaagtggggatgatatttttggataatgagtgattcctctacagtcaacattttcatcttaatgctttaataaagacacagcttgactatgtgcacgcactctgtaaagaatggtagtttctgataggctcaattcctgtatgaaaagaacctctgcccactggtctaggttgagatgaagtatcttcctatatggatacaatgggcttattaccatgaagaattgtggattacgaagtgggcatctgtcccagaataaataaatccagatggcaaggaaaaaaaaaaaaaaaatcaagggagaaagaatcaggaacttgaatcttcttcagctgtagaatcatggtaaatacttctagatatcctccacactattcaattctttaagtctgcatactttgcctaacttattccttaatataattaaatgaaaaacacacactttgcatttagacactgacattctgcaagatttgaaatgctg

SEQ ID NO: 63045 - DNA, 1095 bp, Bovine  19866881265113
  misc_feature (1)..(1): n is a, c, g, or t
nagacattacaaacctggtacctcagaaaagagagtccagtggatcaaactcttgccctccagtagactgcggatgctcacccttctgtggagtcggaggttcctcttctgtgctccagacaaccggctaccacctagaggatgctgataccctctttttctcaccatcttctgcccccagaccccttcagaggcatagcaggctggaaggagcagcctaccagtgccctagtcaccataggggaggtaaggagcaaatttctgccccctctgaacagaaacagtctgccccagtctgaaagacccaggaaaacaaggacaaagattcttcctcgttccgtttctccttcctcatctcccacctctcccctcatactcttcctagcatttgaaagtccaggaggtccttgaagggagctgcttctaaaggctttgctttgctttttcaggaaggagagggggacaggggcaggaaaggagtatttttaaagctcctctaaagccaaactgccaaagaaattgtgacagctgtttgggacaacctgtaatgttccagaccccacccccagcccctcaggagggacagtaactgctctttaaacgagatgacagcagtcaggactgaggaggtggggggcagtctaacttgtttctaacctgagcggctagaaaaatgtcaaactgaggctgcatctggagtagcctctgttgctgctctgtggtgaataggttagaggaacaggcctgacccacagcaaagtgaggccttggatttaggagcaggacacttctgatcttccgtttcctcacctgtctgccccacctacatcagagactaaggccccagggagtctgcgacttgctagctagcgctttacagtttataaagaatgagagtggtgacaacccaaaggctagtcagggacctccgcagcctgccgcctgccgccttcttgaagttctccaggggccgctttttgaaccgcctttaaaaatcgaaaccaaaccccaactcaacagtgttgaatcagctgctcactctacctgacccgccccccctccatgtatctacagccgcgatgctaacgatcacct

SEQ ID NO: 63046 - DNA, 1762 bp, Bovine  19866881268956
  misc_feature (1)..(1): n is a, c, g, or t
ncctagaccttggaagcagttaccagtgaactgcacacaatagtccctgctaataagcaactctaccccagaaagccaaatttcctgtagcaagggggttagtaccactagggctgatgttcggggtgtgcataccagtagtttattatagtcagcacccaggactcaccagttgttaaatatttctaatatcacctccgggtgtttccattagcttccctgttaaggaaatattttggtttttacaacctgtactgttcattggaatcactttactctcactgcgttcccacctaaagatcatgacagatcattagaattggtaagatgaaaatttctcttagtttcattgttttttaacaccatgattttcagggttttgttttaatgtgatgttaagggggcattacagttttgtcaatagcacagtatgagacttctggaaagtttccacaaacagtttgatgttaactaatataatgtcatgatattttctgaccttccccatgaaatctggaatttatctgatttggagtctagaaaatcttagacttttatattaataaaatggaaaagaaacagtggcagtgcaggattgtttcaagggacagtggggaagtggattcaccttattcctgcctaagccgggactgtggaggcaagccagccagaagacggccagatttgctaaaagggactgagtcaggatgttgttacaggtggcttcagatcaccctttgcttgcttttaagatttcttaatttagcattataattaggttcatgtcagatttgtttctctcctctcttttcaccctacaggcaaagactgccaaggagaaacataatggaaccgtggggctgctcacatacccagtgctccaggcagctgacattctgctgtacaagtaaggagcagagttcaccccagccctaaatgtagtcatgctgacaagagagtgtcacctgactctagaaaatttggcccacggggaaggatggttacagcaaggggcaggcacatgaatccatttgcatctattccccagtaataatgctaaatcaaaccagtcagtcctaaatgaaatcaaccctgaatagtctttggaaggactgatgctgaaactgaagctccaatactttggccacctcattggaaaagatcctgatgctgggaaagattgagggcaggaggagaaggggacgacagaggatgagacagtcggttggcatcaccaactcatcaactcaatggacataagtttgagcagattctgggaaatagtgaaggacagagaagcctggcattttgcagtccatgggtcataaagagtcagagacgactgagcaactgaacaacaacaaatagaagtatgtttaaatgtgaaactaataattttaagaagtagcatttaaatagcacttactatggattgcaagcagtcataagtaatttacatacattaacccatttaatcctcacaacagccttaagaatctgtactgtcagcatcctcattttacagatgtgcaaaccagagcacagagtggttagtaacttgcctggggtcaggtgacagcaaggcctggacctaggatttgcgcctataaagtttacgtacagagtctgtgttcttaacagtatgggatatagtgttcacttcaagagttttgaatattgatttctcagataatctagcctcccaagaaatgctattccatagcacttgctgcagctatgcagatgctctctatctgctcta

SEQ ID NO: 63047 - DNA, 931 bp, Bovine  19866881307094
  misc_feature (1)..(1): n is a, c, g, or t
nacagaaacattagtgctactttttaaataagtaaagaaagattcagtaacttggctagacttgtacatttgccattagtctgtagtttcttctagttgggaacccagtggaacctcttaactctaaatgtgcccaaggaagtggcatgccccttcttgactactctggattctgtttgtctcctgcatgtcccattatcttagtcttcacatctccttccctgcttcctttcttccttaagtgctcttataataattcccttaaaggtcttagtttgtgcatgcagggtgttccttaggctgatttctccccaccttcatttcctgcagcccactctgtccagcaccgtgtgcctatgttactaggtaaagggattgtactgtggggcagcacttggtctctttaacatgatgactctgtgtctgttctcatcgactatgtgttctccctgtgtgacgaatgttctcttttcactctgtcaactgggggggactttggaaatttttttggctgggaagagtcaacttttccctgtaattgagctgaaaacagattgcctattgctagcatgtaacaaacacccccatagacagtcaacctggaggctttactgttaatcatttaagccctcatatgttaactttcaacagttctgctatattggccaggctgggattatcttatttctccaggaaggaaactggctcagagcattagtgacttatcctcggatatgagattcaacattatgacaaaagtttatgtaaggcctgctttgtgaaaggcacagggggaaatgcaatgtgcctataatgtagaggaagacacacacatatcgggctcagtctcagtcgtgtctgactctttgccaccctatgactgtagcccaccaaacttcctctgtccatggggattttccaggcaagaata

SEQ ID NO: 63048 - DNA, 785 bp, Bovine  19866881405368
  misc_feature (1)..(1): n is a, c, g, or t
nctgctttttggtgacacagaactctactcaaggattcatactcaaagaaaaagtgttggccttgcatcaaaagaagtggcacataaatagtcattcacatgttttaaattataataaaatgcataagctatgtgtatatcattttttatgatttctcactttaactggcttttttgaccaacacattaactactggtcccgaccacattggataaagatgactttcagtgaactactttatatagcagttaataaagttgggggtgctcttcctttcttaaggtggtacaaaccagactttgaaagtatatatatattttttaaaaaaggccactcagaagcaatcagtatttatgctttaagttaagtatggtacatgaaatttcctacaactttttctggcacataaaacactgaaatagatggataaggcaatgcacatcaacgtctaccagtatctcaactgccttctacttaagataaagatctttaccaccattcttctgcctttacttgttctcctctctctccatcttctgtcttgcatgcctgccttcattttaaaaaaaaaaattccttcacccattttctcaccctccactccatatgccttttttttaacaatgaaaaattgttaaaatttacatttctgatctataaatactaaatatttgatatatcacctatagagcaattctaaaagttgagaaccaacaaataatagtattacaaaatgatgtgactgatgctccctatagcaaataaaattagaggatgcccaatt

SEQ ID NO: 63049 - DNA, 1145 bp, Bovine  19866881413736
  misc_feature (1)..(1): n is a, c, g, or t
ntgttatggagagctgggtgtaacggttcccccagcctgcgtgggcgaattggttccggatgttaacattttttccttggggcttgactacattcttctttttctttgcctgtctgttttcctgcccaaattgttaggcctgtacagctgtgtggctcattgctggtgagtgttgagaatgacagatctggctttaaggcaggggcaatttgggggcatgtgtgtaggtagacttttgagatgttttcatccagcatctttcctaaactttgaggatttttttttcaatccatcatcttgccagctgagtaccaaccctatactgtattggatggcctctgttggggaatgagtatgaaattctgtagaaagcagacggtccttcatatcctagaagcagaagaaaccagccagtgtgggaaactaagataacagatggaagccaaagaggcagccttgtacagtggagaagagcatggggtgccggttagggaggctggaccagtggacgtggttctgactgtgtagcctgaagttagtgacttacttctgtgcctccagtgcatccgtgtacaatgagggcagtgacacatgctgcagagctgctgtgagagttaagtgagataacaaatgcaaagtgcttggcacagtgccaggcctatggaaagtgctcagtgtttccatgctcatggttatactgttggtaagctgagaactcagaaactctccagtgttcttatgagaaaccttttggtgagtgtcggacagcattgtcccgaactacccttcttagcttatctccactgcttgccctattccctttacacaggctgactttttaaaaaatgacatacacattgtataagtttaagttatacagtgtgttgatctgatacatctatatactgaaacatgatgaccgccttttgtggtgagagcatttaagatctggtctcagcagctttaaggtacatagtggagtgttgttgaatataatcgcaatgctgtgtgttaggtctccaggactcatttaccttctctctacaagtttgcaccctttgactaacatctaaattccccaccccacccctgctactcaccattctactctgtttctatgaattcagctttttaaaaatgcaacg

SEQ ID NO: 63050 - DNA, 1418 bp, Bovine  19866881445859
  misc_feature (1)..(1): n is a, c, g, or t
naaatatgacaaaatgtcaacaatattcacccttggtgttgggaacatgagttctgttatactatttcctttgttttgctgaatttaaattttttcaaaaacatttacttaacaagtacagcatagcatgatacaaaaaaaaaaaaaaatacagtttctaggtattgatcaaatccattcaagcaattagctaattcaataaatcttagatcaaacgtctaaagtgtcccttgggattttactatttcccatataaatgttatcttcccaggaatcaggtacttttaagttttggtttaggcacttgtaagactgttcagacacaaattcccatttatcattttctctcaaaaactagcaatttcatgctgagttatctttattagactcttatcatccccatcacaaatccccttaacaggggccttgtttggggatctgattttaattaaaagaaattttatcaataaactttcattcactctcttcaactggtctgcctcctgttggtacttatgtttgccaacgaatatctatctgtaggcatttggatttttctatactttttcttagtccaatacttccaaagctaaataagtagctatttaagtctactccagactgaaaagtcacctccctctaagttctattgcttaatttatacatgtgtatgtgtaaacatatgttttgttttgttttgttttttatctatagtagtgaattagtctgctttttctagcttatgttgggtaacagccctaaataagcggctcacagcaatggtttctttttcattgacttcacatattagtagctgtaggctggcgtgtgtgtgtgtgtgcgtgcgtgctcagtcatgtctgactctttgtgaccctacagactgtagcccaccaggctctgcctatacgattttccaggcaagaatactggagtgggttgccatcttctccttcaagggatcttcccaacccagggaacaaactcgcatctcttgtgtctccagctttggcaggtggattctttaccactggtgccacctgggaacccacctgggaagtttactctgctttatttaccttctcaatttaggacctaaattgagttaggaggaaggaaaaagagcaagagagttagaacaaacatggagtggcttgtaaaggttctgcctgggcatggtgtgtatcatgctcactcattttccattggctaaaacaagtcatgtggacaagcccaacatcactggagtatgaccagatgtttctcctactgatgcaccgcctgctggtcacatggcagtgaacgaggacatataatcctcagacagtaggggttagcaaactgctgctcataggccaaatctgtggttttagatatgttcacattgagattttctgacagatctcaaagagagatgt

SEQ ID NO: 63051 - DNA, 1446 bp, Bovine  19866881924870
  misc_feature (1)..(1): n is a, c, g, or t
nccttaaaatagtcatctcagagtccagatcaacagtcgaggtaaaaataaaatttattcctttgtaaagtacatttccaaatcatagttacataaaatatttaggctagccagataaattatttcatctgttaatcagaatgtacactcaagttacctaagtgcatagtgagtacgttatttcaattaagtcaggtcctccattcagaaatataatgtcttttgaagatcagaaaatacttctgtgttttcaaagttctttcattcttggcaatttgtgacttcctgccttcaaaaaataaccattaggaactcatttgaatgacctggatagatgttttggctatcagatgtctcttgtgaacaatattgtaatgagggaagttttaggaagtcaggaacataaatgaaaagttacgcataactaaggaagttaaaagagaaaactttgggaacctgcactaagccagttacaagtcactggagaaccgcatgtgactccgagtcgaaccaacatatctattgctttccaaaagagagtctaaccatcagttcacagggtcactcattttctctctctgacctgtttcatatagacaagctggatactgtaacactaagttctcagagaaagctcagtttagcttagagagattccagttctcaattcatgcaaaacaatagcaataataaaatagtttctttctaatagtttctaatagatagtattaatatactacataatatatggcatattatgtttatgtcaattttgtggatgaggaaattaagactaagaaaaactaaaaacaacatggcctatgaagttggtcttctgcttcctgaatcaatgatcaggtctccccaagatcatactacattcatccttggccaaagcagtcagcaattctgtaacacccttcaactgttttggctggccatccttacaactgaaatggcttaaatgtttgatctcagccaaatcacataactgggcttccctgttggctcagtggtaaagaatctgcctgctgatgcaggagacacaagttcgatccctgagtcaggaagatcccttggagaaggaaatggcaacccatgcagtattcttgcctggaaaatcccatggatagaggagcctggagggctacagtccatgggaaggcaaaagagttagacataacttagcaactgaacaacaacaagtcacatgactattctggtccctattttccttaatctttatagcacagcacatgagcatataattagggatactataaagtcccctttaagtttaatgtttaataaaggatttgtagtacagcttaaagaacaccaagtctaacagcagcaacccaaccatgataaactggattcagttaacatgtataggaaaagcctgtattatgtgttctttgacttaatttcaaaattagatattat

SEQ ID NO: 63052 - DNA, 863 bp, Bovine  19866881980201
  misc_feature (1)..(1): n is a, c, g, or t
ncttgttatttatttgagaatcatcattttctgccttgtgttagagctaattctaaatgatttgggctccatctctggggagcaatttctcaatggcagggatcctaacaggtgattagtgcttagtattccctagaatgcttcagttgtgcctttcactaaattcttagtgactgtatgtaaaaaccaaatgaatatagttgtagttttactgagaatttttgctatgaaatagactaattttccatagaacgtattattacatatctaatttagtacactgactcagacattctagataagtttgcccttaaaatatacaaagcaggaaggcaaagtctgacatgagagtcagcttgcaaagggttgtttgccttatccctcaacattataaaaggtcccagtggattagcacttaaaatgttttgcatttaaagcactctaatactttttaaaaagaggccttggctatgataccacatggttaaaagataggaaaataactatgtaaaccacatgtgaatattaactgctatgaacactggaatgaaatttgacagaatacattatgttctcgctcccaaattaaggacccatatctcatcttctgcagctcaaatatgccttgaagatgcaagatgctagaatcccagggcatttcagggtcgtttcattctcagaacagccccttatcctgtattctaccaagtgcagtgctttcagatgctttaacattttgtgtcatatgtttctgaatcataaacattgcttttgtaacaaaatgactaagagggtctgttttttaaaaataggttcgatgcacgatactggatgcttggggctagtgcactgggacgacccag

SEQ ID NO: 63053 - DNA, 1730 bp, Bovine  19866880458608
  misc_feature (1)..(1): n is a, c, g, or t
naactggtgggggactgaatggtaggtgatgtatagtgatggtgtgaggtcaaccagtgcactctttcaaccagattatatttttgcagcaagaatggtttgagaatctggttccctgagcccctctctcctttcaaagaaggactgtttatccctgaaagacctgtctccttttccatgtgtcccctccctcagtcctctttggcagcttctctctctccttccagccctccctgatggagctctggacacggccctccgtggagatgaggcgggcagtgaggaggacctgtatgaggatgtgcacagctccagccaccactacagccacactggagggggcggcgagcagttggccatcaacgaggtacagtcggggctgcgtgggtggacagggctgggacgcatggcctttctaggggagcaacttcagcacattcatgcaggcccggacagccacagactgcgttccaagcagatgacagtggcacagtgtgcacttggcacggtttcagcctgtggctctcactttggaatgtggtgtccacgagcagagcttgtcaaatccgaggtccctcctctctgcctttatggggccttcacggaatccagaatataggtgttgtccccagcacctatgatataacccctgtaacatcatcctcagtgggagatctgcttgggaggaaggaggacaggggttagccccttacatgatttaaaatagccatgaagtaatgatttcttcaaaatccattattcataaggattaagcatccaaataaattgatttttccaatatttgaagcctttctttaagtgcttctaataagctgttttgagtagaaggggctccaaaatgatgtcatcttaagcataattcacagaaaatatcttgcttttccttgatgactcagctgcccttcccagtgttggggcccaaccctggtgggaggccgtgtatggcgggggagaacctcccaccccttggatcagaactcctccctgcagtggctagacacacagatctgagcaggtagccctgtgagcactgatttactgaactgaaaaataggatgaccatgtggttgcaggaggacagactgaaataacaaacgtgagtaacgtggcatgtggtaggttcttggtctccaatgatgaggatgataatgaggaagaaacagtaacgtaaagctttccagggctctgaaaaggtgtggggttatctgattggccatcagtgcagccttgttacagctttcctgtctgctttttatagccttctcctacctgatggtggaatctggccggtcacgttgtgctgctagttggggatgtgccttttcgacccttgacaaattgtccactctcagatgctttggatgaggaaagctaagagccagaagtgctccagaagaacaaataatctctgatgtggggcaggaggggccacgttttgatagaaatgaaggcaattaggactatgaattgtataggacctattttgactgcttagagaatttgtttcctgtttgggtcaaaggtcctgcctggtgtttgaggttactgagaggacagggtggtgatgttgagtttatgtttagaaccctcagtgcttccaaggttctggtcttccccggaccctgtgagagcccccgggatggagggggatggcaaagcgcaccgcagaggagggccagggccagctgcagagcccctccggtgacgca

SEQ ID NO: 63054 - DNA, 2615 bp, Bovine  19866881131028
  misc_feature (1)..(1): n is a, c, g, or t
nccctcccccttggttgagggcaattctagtcttgtttctgcggatgtggaataggttacgaaagcacttcttgggtcgtttcagggaaatcctcttccttgggatactcttggccacagctggtacgaagggcatctggggcacaaagtggcggtagtcaatcatgcgctggctgctgggggtccctgggaaacttgcactgcccaccagctgccctgtagctgtggctgccctgtcagccctgggcacactgtcgtgattcttgctcttccgaaccagtttgaaggtggtgccacagagagctgcaggccctccattggtgtctggctgggcttcccgatcagagcatctgttgtatccttgggtgctgggactgacctgggggcccctctcactgtggggcagctgctgccctcccagtgagattgcatcctctgtggtcagggcagtcgctgctgggtcttggaggtttctcatggtcagtctgcaggctagatttgatgaaggtcttgcctctcttcagctccatgctgcagtgtcaccgctgctatgggggaaagcaggagacactcaatatctaggatggaggcttgtggttctagaaaacctgaccccataccccgccccctgccccactcacacaggcatgggagctgagctctgacatctgagctcggatcctctgtggaggcaaggggagggggagataggaacagtcccacccccacacttactgctccagcctttgtagataactgatactcagagaaattaagtcacatgcttaaaggcacagagttggagccaaaatgagagcagacagggtctgatgttcgtgtactgtgagatcttgtgactcactaaagaatcctttcaaagcttgtctgggcaagttagcctaccatatccaggccttattggatataccaatagcaccatatccttagggtatcacggcccttctgagtggatgaagcagagaagtcaataagtaagttgcttccttcatgtaagcaacaaagctgaaaggaaatctgcttccagggctgggtgccatgggtcatcagtggaaggggaagacccatggcccttcaggattgctttacccatcaggcaagcaaggcacaactaagcatttcatgatgcacacagagcttgagcagaagaagagagacagcaatgtggcagaaagcaaaagagaggagacaagcatgagaccaggaatagacagactggccatacacagctcatcatgtgctggaggatcaggcaagtgttgtcttttgtgcatatcctaactgacaggcattgctacctggagtgccatccagagaaagtttctgatgcccagtctgagctcaatgggaaagaatgctggaatcgcttattgatgtcttccctggacttgagagggggggaagtggtaagagtgttaacaagttgatcattgttggcacagttggggagtctggccttaccctgagtcaataaagagctatagaagtcttctgagggagcaggtggaagcaatggcataatgaatttggtggtctgagaccatttatctgatgtctgagtggaggatggactaaagcatgagagaggttctgaacagaggggactcacaagaggcagtaaaatggaccagatgtaaggagataaggtctagatggaggctgtaactataagcaaaataaagagagtaaagccttacgagctttcaaaggaagaaacatcaggattcagcaactgaagaaagaaagacaaacagtctagaaacctgaggcctgaatacatgccattagggggataaacactgaggcctggatgcaagccgttagggggatcaaaaaagagggaaagctgaagtggagaggatgagaagtgaatgaaggcaaggaagtgacctgtgaaaagagctggtttgggggagagaagcagtggtctagtttaaatgtattacctttggggtgagtttggaaacccatgagaacacatgaaaagaaggcagtactgtgtccgtaatcaaaggatgtcaccatcatcagtgattgcagcactccaggaggagccactgagccctgaggaaagtcaggatgtgaaaacacagggtacttgccccagatagcatatcaaaggaatgatttcagtgagcccagactcttgcatcttcccatacctagaaaagcaccaaattccttaacttgggatatctggttttctttcattaacaataatcatttgacactaatactacctgccccttgttgcaaatcctctatatagcctggttcccactctcgattccttggagcagttctctaatggttacttgagatgctgcctcctgggcttgaagtcctaaaaatttccacggaataaaaggtaactctttaaaaaaaaaactaaaagaaggcaggggtgaagagcacccccttaagccaatccctccatcctggtttactggacctcacaggtatccagctctcaggctccatctgtctcactgtctccacatgtccttggcagtgagggactgccagttggtcttctggcagttgaccagggagagagtatagagcttgggcgatttcttggttctccatagggagca

SEQ ID NO: 63055 - DNA, 787 bp, Bovine  19866881499658
  misc_feature (1)..(1): n is a, c, g, or t
nagtcattggagactgagtgtgctgggacctgccgggtcagccgtagtagcgtttagctaattgtctagagcattaacccctggagaagcgaatggcaacccactccagtattcttacttggagaatcccatggacagaggagcctggtcggctacagtccatggggctgcaaagagtcggacacgactgagtgactaagcatacatactagcgcacaaagaagaaagtcccggttggagacacgaggcctgcagcaccggctgtggaacctccatgatgtgactacacagctgcatctgcaaatgtctgtgggtgaccagggagggggcgcatagctgtaggcaggcattcttgggactgcatacactggcacactggtggggtgggtggggggtgacaggagctggggagtgggcagttagcagggtacctgtttggaaggtaggatgtgctccaggatatatgttgagggaaaaggctggagctgctgctgtatagcccatggggaaaccagctagataaccattcctttggaatttgcatggggaaccccagaagaacccaggctataaacaggattggtgacttcaggcccctgggctggcggttgcgcttggcaagggcctgccacggaggcctgctcccatgagaggctgagtcacaaggtctgtgccctgccttgcctgggctccccgcgcactctctctttctttttcttgcagtctcatctctaaacctttgcttttatccctcctctccctccctccccacttatacttttaaatc

SEQ ID NO: 63056 - DNA, 746 bp, Bovine  19866880458626
  misc_feature (1)..(1): n is a, c, g, or t
ncttatttaagatgactgaggtgaagggcagggtgctggacacagtgggcacagatgcaaaccttgttgaacattgtaagccatggcattcctagtcatgctggaaggaagccagcctgccaggctagcacgctgtggttttgtccctttgtgtttaacatcctccccatcccagatgatatcatcttcccaatgcagctgtgtcaccatcaggaagttttcatcagccagaagatcggtgccactgctttcctcaggtatcctgtattcctacagaagtaggggaagaacaacaaatccctgaatggtcactggtcagagttcccatttcaaatcccacagcagataaatcagatacatcaaatgtggtcctgacttgagagacacacacctgataatgaaggaatacctgcctcctcccactcttagtctggcacaacactcatttcacaaacaagaatccttgcaatagggccaagttgccagggcgatataccacaccaaacaaaaggtttagacacctcaatctcccaccaaagaaaccctactcagtgtctccccaattgaaaagtaaagtaatactgatagggctctgggcacagtgattcctttcttacataccgtgttgcttacatccgccattctacatttcatcacaggttcctgttccatctttcttagtttgaagccatagtcaaacccactgccatcttcagggacacccagcatatcataccacagtcgag

SEQ ID NO: 63057 - DNA, 3619 bp, Bovine  19866880529042
  misc_feature (1)..(1): n is a, c, g, or t
nttaagtaggtacaccccccatattacactgttagattattctggatctgaatgtatgcgtccctctaccactgtgttgtatgtttttgtaatattaattgagtggaaggagtaagtcccacgcatgttcttttctgaccctgagttctgtgcctgtcccaaccctcgtgctctgtccacctgacgtcatgctatgagccccggaaggaagtcaatgtgagaatatgggggaagggcggacccaagtgctccccattgctcaggtccagtcacccctaactccccacaagtaacccaggtttcgccggagggggggggtctcctgtttctaagatgggcagccatgtccccagagccaccttcccattttcactcatccacaccctcagcagttggcagacatcacagaatcacaaggtaggatccagtgcctcctccagcgactccaacattttgagatgtcctgtcctgaggtttggtgaactgcatccctccccttctatgttttgggaacgtgacaacaccccttgaataaaggagatccaacccttgctttggctcactcaatgccttacagaatctggaccagtctctacttccattactccctgattcacatctttctgcctcaaggggcattatccctgatgacttttattcacacacagagatgcccaggcaccaacttggaatgtgcatcataccctcttttgtgaaataaaaccatggtctttcaggaagggagtcaggcagaacctaccctcacttcactcaaatacaaatgtgtccctctgagtcgcaggctggcacagccctggggtcttggctgagagaaggaagtcctccccaaacttcagggcgggggcgggggggggaattgaacatggatttcagacttagtcttgtgtgccctaacaagtagtctgggagactgagctgggacactctgggaaacatcatttgcaggaaaatctatgtcatggggctggtggaacagtatttgatggagaccctgtaagaacacagacttaccaaccatacttgtcatagagcctgacgggcctgtttccactcaagggcagagagacatccaggctgcaggagtgtaggctggtcagctggctagggcagggaggccatgaaagctccaaggactggaccatccatctctagctgtcagggtgcactctgccccagattggcaccagacgcctctcctgacttccagctcggcaactaacctcagcttttctcctgtgctccctgtacctttgctcctgctccccagttcactgggtccaagattcatcctcatgccctttactgaccccgaggaaggggaagcaaaagttttggtgcctgagtctcggggatgagtgctaaagaggagagggggagagtatgcaggttcctgcttgcaaggtggcaccggggggtggggtagagactccactgagagggtagggactgggaatggggaagatgagcacacctgtgcctgctaccacctacttaagtaaacatgcaggcaaggtcatcgatggcaagccaggggagggatcgagggtgctctgacaggaaagcagagtggtcagggtaagcaggacagtgagtgcagtgagggaagggtgaaagactggagctctgtaagggggtcacgagttccttctgacagggaggcagaatggcagcaatgaatggaaactgctaaaccccagaggagggtgtttagagaactagaagagggccttcagggaaaagggaggacgtgccaatgtggccagacagagcccacacagaacacagactgggggcgctccgctggcctgacggcctggatggtagcagaggctgacccagagtccccaccacagattccagaggtactgttctggaaaatgctctgaggtggaacagcttcccaccaggcctcgtcccactcccttaacccctaccccgcagagagagggcagaacacagaatatgagaagtcctttaatcaaaaactgctgtggcaaaaccaatacaatattgtaaagtaaaataaattaattaattttttaaaaaaacaactgctgtgagactggggcagagagggggcaaaacaaggggcagaggatgccctggtggaggcagaacaagaggcaacaagcttggccacagctcgccggtcccggaggtaacagctgctcctcttgcaggaagatactgggctcaacctgtgaaacagcagtcagggaagagcctcaagccagggccagcccacagccctgctcaacagccgacgttgtgggaaggggtatggaatgtgtaacactcacttcaaaggatccggaacttctcagccaggtactgcatggaggctgcaacagggagaggcataaacaggtgctccagacagacggacacagaagcctgtccccctgtccccgtggggaaccacctagccctgcaacctgaaacccacgtacccccagccctgatgcaaagaaagagctctgggcctgatcgggccccactaccggaattaaatgtggagccatttcctaaaaggaaacaaaatgtgccagcagctctcaagcttggggccacgcccaaaccattcaaaaattgtctcgcaaaatatccaccaagaaccttagaggccacaccagatcaacaaggcatctctacaagtcctatcagaaggaactctctaggactcgaatggctggcggagtgtgcacgcagtccacacagtacgttgttacttgtccgcacgccccaggggcaggcttgctaggttctcctccccacaggaatgctgatccctgcgaggtcccctgcacttgcagcccaccccaccccaagggcccaccccgcttctgcactgagaacccgctgctctctgtccctggttcctcataccaagttgctccttaaggtcgtctatttctttctgtagcaccagacactaggccagcagacacaggaggaagagaaatggttagtatacacccgcctcccctctcctcctcctctcctctcccctgggccctccatcccaaagccaggtgtccagactggcaagggaaagactttcctcagtggaaaggaggtgggctccctccctggggtgtgggatggggacgggggggagggggcccacaacatatcagttgaacttggacccagatcccaccatggggtttgggtgtgcatttccaggagtcagaagaagcattacccgaggacagccctgccttctgggtggctgctgccgccttttcagtcttgggtgatggtcagctggtttctggtcacctgacagggaaaagacacacaatccagcttcccaggctcccagtgaggtggaaagggccaagcagggtctaacgtgaggtgaggcagtaccaccctctgctagcatcaagcctcccctgctctgcctggcaggcagcccaaaccttctctctgggcctgcccctcctattccgcaggggcagccacttcaccacgatggtctccaaagactgtggttctgggttcgagcttcccagagcggcagccacagccagcacctgggagagcaatgtgggcgaacagcacttcacagaaaaggctattagcctgcaggtct

SEQ ID NO: 63058 - DNA, 2359 bp, Bovine  19866880665174
  misc_feature (1)..(1): n is a, c, g, or t
ncctcagacagaaactgagaccattgatgtgctcgactgggtgtgctccccccttccactggcacagaagcagtaagtgggtatgcacagcccttcaagcccttcccttgttctttgtagggagcaaagctgaaagaattttcctgaaatgttagcctccaccccgcagtgagtgcccctgcttttgtttctagtcttgtggcccaagtgaaggctccacactggttcgtggcattgatagggtcaataggaagaatgtcctgttttttaaatgctcattgattgatgaaatgaaacaagagtcattttctggggccacccctctgcctaaagataacataacttttcccattataaatactgttccatcttctaaccttgttgttcagaattccagctattaaaatttgcctccctttttaaggatggacctgaaacagaaattgaggaaacatttctgttgagactttaccttaaatgactgagcgtgtaaagggtcttctcgtgcttatttgggatttttcatctctttaaactacatgtgctttattgctaattcttggacaccatcagaagacattttgaaaaaaaaattgttttgcccatgattctaggaccattctaaaggagatcggtcctgggtgttctttggaaggactgatgctaaagctgaaactccaatactttggccacctcatgcgaagagttgactcgttggaaaagactctgatgctcggagggattgggggcaggaggagaaggggacgacagaggatgagatggctggatggcatcaccaactcgatggacatgagtttgggtgagctccgggagttggggatggacagggaggcctggcgcggtgcagttcatggggtcgcaaagagtcggacacgactgagcgactgaactgaactgaactaggacccaaatgcctcagctgatttttcccgcatggttcctgccccagaatcacagatgtacagaatactagagctagataatctcatgtagaaatctaacaggtctactcctgaggggtgtacaaatgaggaatctgagagtagagggacagtgccatgtccaggccagcaggcagttcaactctacctgttcagtccccactttgctgttcgttaggacagaagcacctgcatcgcctcacactcagaactctcgtggatgtatgttgaagctggtgcagcttcttcccaacctcctgactaatttgaaacaatgaaatcggtcccatttactgtcagttatagctagagccttgttcactcacttgagcatcccaggtgaagcactccccttcactgcatccacagaatctctagtgttttggggtcaccttggattgctgacctaacagccctaacataaggcagagtaaggtagggcaagcacttgatgaggaatcaggagacctacctctctcctaacctgacgaaaagcactttccctttctgaacctcttgtttctccatcgggaaaagaggaaggtgacctagaacagtggctctcaacctggattccaagaacttcctgaaattgtgtgcagagttgtgggaggtaatgtatacagtcttcttgggagggtgtatagagctttcaatagattctcaaaggagtcctattatgggctgaattgtgtggccctcaaatgcctatcttaaagccctaaccctcaatgtgactgaatttggagatggagcctttagagaggtaattagggttaactgagggagctggtaaagaatctgcctgcaatataggttttgattcccgtgtcgggaagtacccctgcagaagggatacgctacccaatctagtattcttgggcttccctggtggctagatggtaacgaacccacctgcaatgtggcacacctgagttccatccctgtgttgggaagttcccctggaggagggcatggcaacccactccaggattcttgcctggagaattcccatggagagaggagcctggtgtgccacagttcatggggtcaccaagagtcggacacaactgagtgaccaagcacaacacatacagaggtgtaagagtggggccctaatcccaaaggatctgacatccttataagaggaggagttaccagacctcttgcgcgcggtctctctctgtctccatacacacacacaggaaatgtcatgtgaggaaacagagggaaggtggccaactgcaatacaagaggagtgcctacaccaggagttgaactcgctggcaccttgatcttggacttctagtttcccgaactatgagaaactaaatgtcttttgtttaagccatccagcctgtggtattttgggttttggcaactcgaacagactaaca

SEQ ID NO: 63059 - DNA, 1134 bp, Bovine  19866881166541
  misc_feature (1)..(1): n is a, c, g, or t
ncctggcatcctaatttctctcctgagctactcagaagcattaaatactgaatgtcgacaacaggaataaagaccctctctatatcacagattcctggcctctttgatttcaatgataatgcactcatatagcaaaaaggtttctttttaaaattatataccagtttgaaaaaaagaaaaaaattacataccagtttgaattgacaaacaccacactccagactccccagtgatacacacacatgcagacactcttttgtccttttctttcctttgtactatcttcacaatattcaacatacagaccacttacatctggaactgccatcattttctgggtgacaatgttgtccagaataaaagaaaatgccacttggtcatcatcatccagcaaggggttgattgctttctctaaacgagccaatttatcttctttctgacatgaaacaaagcaaaggaaacataaaggctttcctgaggtataatcatcatagagtattaaggacaattaatatttctcttgtcctaaaaagtctaactttgaattgtaaactcatctgttccagacaaaaattcagataagaaataatactccagtaaaaggatcaaaagagatgtgtcaaccattcttataggtattctatcttctagtcttgtagatcatcaaaaatatacacccttgggcaacaacagcttagttcccacaacaaaaacatcttcaccaaattaagttttaatatcacactgtttttgctgtaaaactatcactgaaaacactgaacacattattgttgattagtaacttttatacaagggaatctaacccaataaattcattttagactacactacgaaaaagtctgtatatcaattgctccatgtcttaacccactaaaaatcttcttaaaaattatttttggctgcactgggtctctgttgctgtgcatgggcttctcattgcaatggcttctcctgttgtggagcatgggctctagagcttgggctcagcagctgaggtacacgggcttagttgccctgtggcatgtggaatcttccccctctagggatcgaaccctgtgtcccctgcattgacagttggtttcttaaccactggaccaccagggaagaccatgc

SEQ ID NO: 63060 - DNA, 810 bp, Bovine  19866880459113
  misc_feature (1)..(1): n is a, c, g, or t
ncccttggaaggagagaaagaatttaggccagggctgggaccccctgggtgaaccaggtgcttttcctctgaacatctgactttcccattcacagccctggtctgtccctttaaacttaaattcggtaacattccaaacccaggaaatattaaaaaggtctaaaaattaatttccaagttttcttctttaaaaccaacaggggggcagggggagtagagtttgctcaaaactgagaaaatttcgtgtttttaaaggttagttggtctaacagtgtagtatcttaatgcctctgcccaacaacttcatcagaactgcacacgttaaaaaatagaaatgttcagggcatccaggtacctcccagggtgaggggaacaccgctcacttcacacactcccatactatttgaatggttttataatttgaaaagtatataaaccttttacaagtctggcaacactgagcatgtactgttttaacccaaataaaacgtatacggatctttaactgggaatataaataaaacctgacatttaaactcaactgctgagagggagggttccatctacgcccctgccaggagggaaacgggggcggattcgaggcgccctctcccgcctcctccccgttgacactaaacttcccagtgagttggttccctctttccattcccgagattgggattcagatctcttttacctcaatccattttttgaaagaatctgctagaaacattcagccctgaatgtgggaaaactttcagaagagtccattcaaagcctttaaaaaaggaaggcaaagaatacggcccg

SEQ ID NO: 63061 - DNA, 2890 bp, Bovine  19866880904423
  misc_feature (1)..(1): n is a, c, g, or t
nttccagatagcacgggcctgtagctaagaaagcccaggtgtcttttaccttaggtggtggccaggcagagaggaacaggggaggggtgagaaggcatgggtcctcccccttggtggtcacagacagaagtcagtttcctcatctgttaaaagcagttcataaagtggcctctgtctgccccacagggtagatatgaggttcagtggagtaatctatagaaaaatctttgattctcaaaacactgcattcatgcagagtgatcttattttttattatgtttacaatctctaattgccctgaaagttacaaaccagaaagcctacctcaaatacccgttctccatgacacattttttcctttactctcactgctagtagtattaataatttctatctcccctaagaccttaaagtggtttctttttttaatttgcttgtttccccatcctagggaggattacctgcttggctattggagaaaaaatctattgttctccgttcttcggatccaggtgagttgttagagatgttggaagagaatttaagaaagttcagatactttatatccaaagggtcagatacaatatttcaaaggctggggtactcctgggtgaatgcttctgaaagtttagtaaaagtgtgggtgtccatcattctccaccagacgctgaatgtgtaggaaagaaggattgttcggacaactcaactagatcttgtcgatgccttggtaactctttgagttagcactgggccctgtttgcggttgactgattgacttgagtgctttctctgcctccattctcagtctgtgacttgatggggatgactcccagctaaccagacgggcagacgtagcttctctggtggcgtcactggatctctcttcatctacttttacagagtgatctgtgagtgataggtttttccccttatctagctataaaccctgaccggtctgcaggccccgattcgctgtatttatttttgctggcgtatggttgacttacagtgtggtggtattttctgctgtacagcgcaatgaatcacatatgcatatttttgagattctttttctatgtaggtcactgcaggggactcagtagagttcctagctgcttttctgtcttctgaagacttcatttcgcttggggatgaagctggtcataagagcagctaacaacgattaaatctgctgtataaaaggctagtacgaaaaaaaataaataaataaaaggctagtacgttatgctctgtgtggcttttcttcttagcgtattacccacacgttttaactcttagtatattattagtattttcccatgtactagctcatttaatacttacagcagctttgtgaactgcatacttatccccatttgacagtgtaaatgtatagttgattagaacttaattttttaaaaactcagctgtgacagagaaggacccatcactcagtcattcaacaaacacgggcagatgcctcctgtgctgcaggcttgtggccctagcggcaggggctgatatcaggctgatcctctgaaggctccgctgagcggacaactccaggcaggacagcttttatcagacttgcggtgcacgtgacacccccgtttcagaaagtagtggttgaatcagtctgttcgatctctgctgccagccccaggataacagggtgcatggtgcctctttgtagtaaaaaggtgtgtgatggtgttaaacctggctgttttccagattaccttgcggctgtggacaagtggctgggggtccttctgcccaagatgagacccctcctctataagaatggaggcccgattataacagtgcaggtaatcatggagcccgggctggtagggggagatttccatttatccacacagtatacgggagtgaagcagatgggagccacatgtgactctttctttctttctttttttctttttaatttttagaactgaagtgtagttgatttgctatgttatgtaagtttcaggagtccagcaacatcattcggttttatatacagatatagattcttttccaatataggttattacaagatgttgaatatagttccctgggctctacagtaaggtccttgctgtttatcttcctatgtctatctctaagaggcaatgccacagacggtactttgatttaaattgcattttgagggggctttaccatttttgaatgctctctgtgtgagactctgtgctggccgccctacagatgccattcagttatcccagccaccatcgccaaagaggttaagtggcttggccaaggtcacgcagctggcaggtggcagtaaggattgcagcctggcccctctctgctcccacagcgccttctggctgcagggacgcagcccggaccgaccccgctttggtgtctgtattgcgtcggtcgtcggttcccgtgggtgtagaaagaggatgcggtgagctggggccactgtgttttctcctcccacttcctgccctcaccttccttcttccatgtgtttttccctttgcagtgactggtagaaggaggagtctgtcatgtggcaagggtgttccaagagaaagatcagttcacttgacctgcagtgatttttgatatttgtaaaatgacttaggtcaaacaaaaccatgtctgttggtcatttgcaagggttctcttactgcagagagtatgttatgtaaaactggctgtgtcccggaccagcatgggatgtgtgcagcgctccctaggggaatgtgggccagcacttggggccagcactgttcactgttcatagggatggtcactgtggggaaggagcctggccccttctgtgcacttaagacccaggctgtaaggggctccgtggcggtccagtgtttaggactctgcactgtccctg

SEQ ID NO: 63062 - DNA, 1404 bp, Bovine  19866880922189
  misc_feature (1)..(1): n is a, c, g, or t
nggcctgggctcccctccgaggcagagacacgcgcacctggagtgggggaccagctgcatctctctgtgcagaggttttgttgctcagaacgggaatagcatggtctggtatcccacttgagtattcttgcctgggaaatcccatggacagaggagcctggcaggccacagtccacagtgtcgcagagagtcggacacaactgaaatgccttagcatgcacagtgccgtgggagaggtttgtcatgggcttgggtgtcgcttctttagacagttaactacttcttccaaccttgaactttgtcagcagaaatcataaaatgaatatcagcttaaaaaggcaaagggaagtaacagtgattgaggatttgctgtgtgcaggacaaacgacatggatgatgccatttctccaagtcagccgaatacagctgataaaactgaaatttgccgaggcatgtgcttttggacagaaatccagctgagatttaaagataagggtgtttgtaggtggccgtagctcctctcagctcctaggggaacatgccttgttgggtagatccctgaaacctagtttgtctttgtggttctgctggggtgattctatggcccagggttacagaatccccccccccaataactatctctcctcatctcttctgtttgtttcaaaatgactaattgagaaggaagttggggtggctggccactctggtttctgcattgctgatgtggattgctgataacttttcaaagataaagtatgagaaaatccagcagcagattcctgggacagatggttagggagaatccccttcatttttctgattgtaggaccactggggcctgtctgtagttttagccctaaaattaaagttttaaaactaaactaagttctaggagaccaaaatggctccagggaaccaggaaaccctgaaaccataagtctggggtcaccagagagacctttgtgatggcaatgggtagctttgtatttaaatttgtgtcccttgctgcaggcagccagggaaactggtcagagttttggttactttacctccttcagggtattcctgataaaatttttggttaggaggacacagggcttggaggctcttccatttttattgaaaaacatttttcaaaaagtaagtatatcgcttatgaccttaacacacatactttcatttttcctaagccttacacaggcatatataatttttacacagtagaagtttgtgtccatgtaattatgtatttttttgttttttggccacgccgtgcggcttgcaggatctcagttccccaaccaggtattgaaccccagccctgtcagtggaagcccggaatcctaaccactaggccacaagggaactcgatatatatatatatatatatatatatatata

SEQ ID NO: 63063 - DNA, 1132 bp, Bovine  19866881104484
  misc_feature (1)..(1): n is a, c, g, or t
nctacatggacctttgttgacaagtaatgtctatgctttttaatacattttctagatttgtcaactttcttccaaggagtgagtgtcttttaatttcatggctgtatcaccatattcaccatctgcactgattttggagcccaagaatataaagtctgacactgtttccattgtttccccatatatttgccatgaagtgatgggaccggatgccatgatcttagttttgtgaatgttgagctttaagccaggtttttgactctcctctttcacctttaagaggctctttagttcctcttcacttcctaccataagggtgatgtcatcttcatatctgagtttattgatatttctcccagcaatcttgattccttcttgtgcttcatccagcctagcattttgcatgatgtactttgcatataagtaagcagggtaacaatatacagccttgacatactcctttcccaattttgaaccagtccgttgttctatgtctggttctaaatgttgcttcttgacctgaatacagatttctcaggacgcaggtaaggtggtctgttactcccatctctttaaggacctttgtttggaattacatatggtggtcaatgcagacccccatggagaagcccacatataaacactaatttgaaggaaaagaagaggttagtcattcagatatctggaacaaatattgcttttagaagaaagaacatcaggagtaatcatcctaaggcagaggcattcatgagatcctagacctagtgggaatggcctgggagaaaattaatgagattaagggagagggaggaggggaactgtgcagacaaactgtgcagagaaagtacaaaccttctctgtggaccatagcaatacatttggaagactgttagctaacacaggagcttttgaacacttttctgttggtccttcatatctcattgcctgtcatgcctaaggcctgaagtatatcacttaagatttaaaataaaaaaatatagacaggggagaaagcctaccccaaacaaaaactcacctgaaaagtttcaaatctgtcttagcttaaataaatatgtaggatcctttcaaagacaaatatatgttgattacctctcaacaagtattaagagta

SEQ ID NO: 63064 - DNA, 854 bp, Bovine  19866881830080
  misc_feature (1)..(1): n is a, c, g, or t
ntccctcccctaacaaatatcagggaacctggctctttcatttcctcatctgctcccgaggctcacagaatgttttgccaacctggccctaatccacatgtctgaatttctgacacagtgccctggatatttacttaagtgtcctttgcctaattaaacgatggaagtttctcttctcttttgactgttattatcattgcctgttggttcatgagcgtaggacaactctgcagaagctccatggttatcgcatgttatagttaagctgatgggagaacaagtgtcaccaaaacaggaaattgcccatcatctcaaaaacctttgggtgagataattgccttgatgcccatagttggcatggaggtggggggcgggggggcaattgtcccaaagactgatgagattctcagcacatttagcttgaagatggagagattttatgagacatgctagagatagagggattgtgtgggacatgctttctttaagtgggaatggaaaagaagaattctcccctcccattttccataataacagcaatcaaagaaagaaagaaagaaaataaattttgtaagtgtcaagagttgaggacgaaacaaagttcttgaatttcagactctgcaacagagggattcataggaccctgatagaaggatgttaactaaaattttagaaaccaatgcctgattgaaattaaaaggtgtttatttggggtttgttaaggctgtagcctgggagacacagactcgagaagcaccggagtttgttctgctggactacaaaatgagagaggctgataaaggaaaaacccatgggttacactgagtttcaggagtggtttatcaagcattaga

SEQ ID NO: 63065 - DNA, 967 bp, Bovine  19866880539706
  misc_feature (1)..(1): n is a, c, g, or t
ntaaacttctttttattaggactcatgcagagtctgccatgttctcatgctgtctctcagtagctggcctctcagagcttcagattattgatcattctgcacatcagaaattaagttaaaattcctctgcttcactgtgctattattcatgttaggtttcaattcagcatttccaactgtgtttcactatatggaaagtattatctatattaatttgtggactatttattagtaactaatatacttaaaatgagcccatagagtttaagtgttcaactagttttgaatatatcactgtataatttaaagattaggatatattcagaaatgttaagtgatttgaagtaagtttgagtagtgaaagtttgtgaaaagatagaaaatacatcaggttttgtaactcctgatttaaaaagtttttcagtttactataatatatcagtacatgtatttattgagtgtggccatgaaattaaaagacgcttactccttgggagggaaagttatgaccaacctagatagcatattcaaaagcagagacattacttcgccaacaaaggtccgtctagtcaaggctatggtttttccagtggtcatgtatggatgtgagagttggactgtgaagaaggctgagcaccaaagaattgatgcttttgaactgtggtgttgcagaagactcttgagagtcccttggactgcacggagatccaaccagtccatttgaaaggagatccgtcctgggtgttctttggaaggaatgatgctaaagctgaaactccagtactttggccacctcatgtaaagagttaacacattggaaaagactctgatgctgggagggattaggggcaggaggaaaaggggacaacagaggatgagatggctggatggcatcactgactcgatggacgtaagtttgagtaactccgggagttggtgaggacagggaggccggcacgcgcaattc

SEQ ID NO: 63066 - DNA, 5440 bp, Bovine  19866880852231
  misc_feature (1)..(1): n is a, c, g, or t
ntgtggtgaggaaatggttggaaagaaaatgtccatggaatatattctttgtaaggttttttgtcaggaagcaaaagagagaagtagggtctatgctttaatggagatgtgaaagccctttaggatgagagtttcatggatggaggagtccgtttactgactccatggtctccctgccctgccatttcccactcagccccactgtgagatcgctccagagtctaagactcattcccagttcttccccacccagtccctattccagtgggtcaagtcggagcgttctcacccagaacccaaggctccagccctccatccactcgagcgtcccccctgttcccgctccgtctgcgccagcacatctggggtcccagcacagtctccatcattgctctctctgcacctttacacacgcacttccttgcatttctccagcagccctaacaccacttcacattccatctggcccctccccacccaggacctgtcttgacttcctggcgtgctgtgggtgcttcctgctgtgccccactgccgccccctcccaccgctgctcaccaggggagggagtttccaagaaatcgtttgatgatccctctgggcttggaaatgaaaagagatcattctgtcgtttttgagattgcatccaagtactgcattcaggactcttttgttgaccatgatggctactccatttcttctaagggattcctgtccacagtagtagatataattgtcatctgagttaaattcacccattccagagacattactttgccaacaaaggtccgtctagtcaaggctatgatttttccagtggtcatgtatggatgtgagagttggactgtgaagaaagctgagcgccgaagaactgatgcttttgaactgtggtgttggagaagactcttgagagtcccttggactgcaaggagatccaaccagtacatcccgaaggagatcagtcctgggtgttctttggaaggattgaaagctgaaactccagtactttggccacctcatgcgaagagctgactctttggaaaaaagtctgatgctgggagggattgagggcaggagaagaaggggactacagaggatgagatggctggatggcatcaccaacttgatggacatgagtttgagtaaactccaggagttggtgatggacagggtggcctggtatgctgtgattcatggggtcgcaaagagttggacacgactgagcaactgaactcaactgaactgggcaactgaacaaaacaacattttatctgatattctttaagtagttacttcagattgttattagaatgcttacatttatacataaaccagcatttcatatagttactcattaaggctgaaattttatctgagaaaattgaaaaaaaatatgaattttgccttagatacagatgacacttttttctactaattgcataaagtgataacactgagtcaaatagtttataaaaaatatgaagcaatcaacagaaccatcaatcacaaaatagcaaatatactgtaatactcgtaatttctataaaatcaaaagtattttacataaaatgtttactttcaaacagtagttcagttcagtctctcagttatgtcctactcttcacaactccatggactgcagcacgccaggcttcattgtccatcatagactcctggagtttgctcaaactcatgcccactgagttggtgataccacccaactgtttcatcctctgttgtccccttctcctcctgccctcaatctttcccagaatcatggtcttctctaatgagtcaatcctttgcatcgagaggccataatattggagtttcagctgcatcatcagtccttccaatgaatattcaggattgatttcctttaagatggactggttggatctccttgcagtccaagggactctcaagcatcttctccaacaccacagttcaaaagcatcaattctttggggctcagcttactttatagcccaactctcatatctgtacatgactactggaaaaaccatagctttgactagatggacatttgttggcaaagtaatgtctctgctttttaatatgatgtcaaattttgttacagatttacttccaaaggagcaagcatcttttaatgtcatggctgcagtcaccatctgcagtgattttggagcctaagaaaatgaagtctctcactttttccattgtttcctcatctacttgtcatgaagtgatgggagcagatgctatgatcttagttttttgaacattgagtttttagccagcttttttcactctcctcttttactttcaacacgaggctcttcagttcttctttgctttctgtgagggtggtttcatttgcatgtctgaggttattgatttttcttccttcaatcttaattccagcttgtgcttcatccagtctggcattttgcatgaggtactctgcatataagttaaataaagaggttgacaaccttgatgtaaacctttcccaatttggaaccagtccgttgttccatatctggttctaactgttgcttcttgacctgcacacagatttctcaggaggcagataaggtggtcaggtattcccaacttttgaagaattttccacagctttttgtgttgcatgcagtcagaactttagcacagtcaatgaagaagaagtagatgttaaagagtagaatgctgtcctagttaatgctatttccttccagtttttttataagaatagattttattagatttcttgtgtttgtgcttagttgcttcagtcaagtaccactctttgcgacactgtagactgttgcctaaaggctcctctgtccatgggattctccaggcaagaatattggaatgtgttgccatgccctcctccaggggacctttctgacccagggattaaacctgtgtctcttacatctcttgcattggccggtaggttcttaacattagtaccacctggggagaactgttagatttcttgtgagtaatgtaataatctgaaaattaattgtggttgaaagcaaaaggcaaaggaacttaaggcaaagaaaaaataacttaggagatgcaaggactagtttcttttcctttcttctagggtttcagtggttgaaacattctgattttgtagacttgttatgagaacagtgatgtttataatgcctaccctaggacatggttggccctcaactaatattaactgtatttgaattctaaagctgtctttacatagactttcaagaaagttattaattcaggtacttcctgagtggttcagtggttaacactctgcctcccaatgcaagaggtctgaaattcatccttgggcagggattaaaacctgtgtggtgtggctgaaaaaagaaaataactgatccatacacattgagtgatcattaattttgaaagattaggggaaaaaaaaaagttgaatctgaaactttaagtcctctaatgacatactttgttttgtctatttcattttaacctaacaaataaaggaaatccttaaagattgtgatcagagaaattaaaatatgaccgttttaatctgccataatttaacatatttaaccttacatcattggcaattgattatctgtatatgtgaatgcattcgtatgagtgtaatgatgaagagcatttgatataagttccttaaaattcaactagtctggatagaaggcaaacatttcccttcctttcagctgttttttggggggttatatgatcctgactgcttttctgtattgaattttgtgatttgtatgtgataataagtctctcagtatgctcaactggataattctcttttttcctgacagttcacacaaatagcaataaacttatctgatgcctgctgctttctttatgtcatttggaaatgagttactgttatattttcagcataaattgaattctgtccttttaaacatggatttgagtagtcttgtacttcagtttgtttgttttttttctcttatgttacagaatattacttagtccaatgtgacacactgtaggaagagtaccatttaaatcctgttgctattgtggaatctgggatttgtttccatggacacagagccaagctaacagtaaggattttacagcctaacattgactgaggactgggaacctaaacagtctctattaaaatgaagtgactataaattaagcaagcattgtgtatattacacaaaaactaatttatcaaatttcctctacagaaacattgaaaacgattattagagcttcaagaatttttttaaagcagaaaataccactactttccccaatcctaataactatagattaatcattttgatgcgtgatactagcacaaacatatgataatgaattagatataatgaaagacggcatatttattaatctagaataaaactggtccattggcttgagtgtgtgtgtgtccatcactctgtcttatctgactctatgtgatgccatggactgtagcccaccaggctcctctgtccacagaatttcccaggcaggaaaactaatgatttcctcctccaggagatcttcctgattcagggatccaactggtgtctcttgcattggcagataggttctttaccattagcgccacctagagtaaaactaggcggtgatgtaacaagcatctctagaaacaacattctctgactgtatgtctatttaaaaaaataaagaaaagaacaaaatgttgatataaagtgaaaatatttaatgaaccagttaaattgtataaaagtgctacattaagaagattgattttttcttcattttatttcagtggaaatattgctttccaatgtgggtttttgtgagggtccttgggcttcccttttggttcagtcggtaaagaatcaactgcagtgcaggagacctgggttcgatccctgggttgggaacatcctctggagaagggaaaggctaccaattccggtattctgacctgcagaattccatggactgcatagtccatgaggttgcaaagaatcagacacgactgagcgactttcacttcaccaggttaaaattcttgtgttcttagaagattagtaaagattcacatctttactaatgtgaatctgccttgcttaatgtttcactcagccatcaacctattcattcattctggagagttgcaggtaggctgagatttatggcataaagtttacttcaccaatgatgattaagtaaagaaagtgaagttcctcagtcatgtccgactctttgcgaccctatggactgtagcctatcaggctcttccgtccatgggattttccaggcaagagtactgggggtgcgttgccatttccttctccagggatctttccgacgcagggatcgaacccgggtctccctcaactgtaggcagatgctttaccgtttgagccaccagggaagtaccctatcaata

SEQ ID NO: 63067 - DNA, 1497 bp, Bovine  19866881066481
  misc_feature (1)..(1): n is a, c, g, or t
ntgacttggctatccccaggtacttttcaaattttgcattacctatacagtcctagtagtgtatggaaaatgccacacctgcagacagttaccttaaggagttttcaagtctgttctccacaaattgctagctgaaatcaattgacagagatctctcatttctttgggtttgaaatgtgtcactgcaagcaattgttctatttgctgttaagtactttctttgtggaactcagcactgcttattgacatcctttccttgggtaaattctgcacttcaagcagatctcttgtcagtaagtaggttcatgatttagcttcattgcacttttttttttttaaagtatgtgaagcattttaaaagttaatgctcaaggttaatacaaatatttaggtcatttaagatataaagctgagaaagatgtcatcataatgactgtgggaaataatgtatctgatattcaaacttcatgcagtatttcatcgtgaatctaatcatagcaacattttacccaaaataataagcaaatataaatttctgccttaactaaataaatgaaatagcagactgtatttttatatgaatgtataaccaggagatctcaacaatgtagagatgaataacccattgtgtagatgttataagcctctcttttgttaatttctgtatagttcactaagaagtgaaaaggtcctgtggtcagtaagatgcaaccttacgatagtcacagaacttaagtgtggcatctgagactgttttgtgtttgcatgcttgggcttccaggtggtactaatggtaaagaacacagctgccagtgcaggagacataagagacatgggttcaatacctgggtcaggaagatccgcttaaggagggtatggcaaccacactccagtattcttgcctagagaatcccatgaacagaggagtctgctgggctatggtccatagggtcacaaagagttggacacaactgaagcagcttcatgcaggcaggagcttgaagcaattaaaataagtatcaagaaatgaataaatatttaaaaaataaaattttgtactatacacctgcaatttttaatgctactgtgttacatttatttgaataactattattttgttggacagaggaataaagtttcaataaagactgcaggagaatatgtttagcctcatatggttggagtatgcaaagaaaaagtaacaaacctcatcagctctggtttcattataatattaagctgggtttccagttcaacactaaatagaatattgtatctgggagtataagattgggaattaagaaacagtgaaaaaaagctatttaaatggaagaagaggtctgtattataagaaatggaaagccatgcatgacttttattttttaaagatgtaataaaaattttgcttcactaatttcactgaaaagctcaaattaaatatatgtacaattacacaataatgtctaaaatttctaatatagtaaaaattacattttt

SEQ ID NO: 63068 - DNA, 778 bp, Bovine  19866881149751
  misc_feature (1)..(1): n is a, c, g, or t
nctaattgatatctataggacacttatcccaaaacaatgaatttcacttttttctcaagcacacatggaaccttctccaggatagatcacatcctgggccataaagctagccttggtaagttttggtgtctttactgttaatttgaagaattttttgtatattctaagtaaagttttttttctgttagacatattcaattctgttcaattctgttgcctatgttttaaatttatgtaaattttatggagttctaatatcaataatttttgtttttgagaaacttgaaaatcgttaataaatatatagagaagtttaagaatacacaaagagcccagtagatatttttaaaagaagctaatataagacatgcctatagtatactatagcatgccatatgttttaagatttagcatgtttgacaacacactaataaaccaactgaaagaatagaaagctgaaaaccgaccatttatagatagccttctcatatacattgaagtgttgccataaatcatttaagaaagagaatttcagtagattgcatcaggaaacctagctctttatgtagagaaaaagaaacttaatcaaatgtgtcacacaaggatggaacctagattgactgaatatttaattttgaaggctaaaccacaaagttaataaagaaaattaagaaaaactttagtgtcttagaggcagaaaagaaacttcttgcataaaacttttacagaacaaattacaaggcaaaacaataaatttagttacatcgaaattaaaaat

SEQ ID NO: 63069 - DNA, 1040 bp, Bovine  19866881196009
  misc_feature (1)..(1): n is a, c, g, or t
ntatttttagataaatttaaattagacgacggaatacagaatggactcaagaagagaggtgctaccaaggaatgaaagtgactaagtctctaatggtggagttcatcatcatttaaccttagggaatctgtgattattagtcaagagttcccgggaaaagtctgttttaagccaacaaaggaaggacaacaagtaatttgttttcttgatgggaaataggagattgctgcaggactttaaggaattagaatagaatatttggaacaagaataatatatatacaaatacaggaaggagtcgacataggctaatattaacttaaaagagagtcaagaaagttaaatgagtttgtgatgatgaaataatacatggaagcaatattgtaataaacattttcaagattagctaatagaaagattaatagggaaagggaaatgaaaataaaaagtgtcatcttaacactacaagaataattatacagtcattattgcagccaaattcccactggtttcagtgggggctttggagagaactagaagacatatgcttcagtagcgtacctagaattgcaaagtttatttaagggataaatgtagaaaaatctaggaggtaataattgatagattttaaaaaaaatacgccatgcctgtattttttagaaagcaaccttttaaaagaactgatacagagatcttatttcacaattggcatgtttaagctgagtacatttgtatgtatccctaacttttatcaattcatcaggagtctgggtctctcagcacaattcctccatccatctttgctgtgaaactggaaatggatttgtttaaattattgggcttttaatttgccacattttgtctcctgtctgagaagcctgtttattttcaggcagctgcatatgttggcgtgattgatgagagccgccacagtcaagcaagcagccctgggcggccagtttacccttccctgctagggtttcagctgccagttgcccccattctgtgacagcttctccttctcctcaccttgtcatcaag

SEQ ID NO: 63070 - DNA, 2496 bp, Bovine  19866881278223
  misc_feature (1)..(1): n is a, c, g, or t
nctttttgataaagtctttatttctaaattattcattttgcagcaaaaatcacagtgttctgtatggcttaaaggcatgcatatttatttatcctgtgtagctgccacattttaattgagacatatgggaagtttctgattgggcacttaatagtcctaacagcttgctattcttgagaagttcaattacagtaaatatagcagtgttagtagcctagtgctggtactacctcaatggctggcacagagatactgcattttaaaaaatgaatacttaatgattttaactttatgaaggtgaaaagatgtatttcaacagtggcaatttgcattataataaatgctgttcttagaggtgggtgagttggagtagaaactggatagttttatattaatttcaatgtaaaacacatgactctaatggcttttaaagtaaaatgttgcctacatttttttctgatttccaaaatgtactttgaaaggtttggcctaataacaaggacgtagagcaaaaatatccatattcaagcattcaggaaacaaccaatttattttaaatctaaaactgtaggcagaaattgctggcttagtatgtatagaacaagaattttaacttgctctatgtaagaagtttagcccttgctggggaattataattagatgtaggtctcaaaataaaagcaaatcaataaataagaaggatgtcaataaataaagtatacatataatgacaatgtggggttttttcatactaatcttgctgaggaaatttgatatgaaataaatcatgatctcatacctcaaagacaatgctgtgtggcataaactttacacaatttggaatatatctgcacatatctcacctatttccctaggttgagagttccctgaatataggaactgtgctttacttatggttatatccccagcattttaggatgttttgtatctaggcattggggctccccttgtggctcagcactaaagaatccacctacatttcaggagatgccagttcaatcccagggttgggaagattctgtagaggaggaatagcaacccactccaatatttttgcttggggaatcccatggacaaaggagagtggcaagctacaatccatagactggtaaaagtgttggacgtgacttagtgtctagataacaataataacaacatctaggcattaggacagagaaggcaatggcaccccactccaatactcttgcctggaaaatccatggacgaaggagcctagtaggctgcagtccatggggtcgctaagagtcagatacgactgagcgacttcactttcactttttactttcatgcattggagaaggaaatggcaacctactccagtgttcttgcctggggaatcccagggatggggaagcctggtgggctgccgtctatggggtcgcacagagttggacacgactgaagcgacttagcagcagcagcagtagcagcaggcattagaaggtattgaaaacatccttaccttaaatggcttatgcagttttggtactatgattttgaataagctctctagtattaaatattcactatctatgtaagtatctagagtatttggctggggcagagggtattgatgagcactgttgaacatccatcatatattgttgttgcattattgcttcgattcactcatgtagccaacattcattcattggatggacattaaacgagattttggggaagcagaaatttacaaaaccatgactaaaatttaggtgttttgttttggtgaaacaatcagacaataaactatgtgtctgcgataatcagtgctgtgattataagtaaagtgggatgaatgataatagactggggatgcttgtttaagaaaaagtgttgtagaaagcctttctgctgaaatgtcatttgagcagagacttgaatgaagtgaagaagcaaacacctacatggatattttgttcaaagtcattccaagtagagaaaacattagatacaagtgttcttgagtgagaatgtgtttgatttgttatggggaaactcaagaagacaaaaccggatggtgccgagtgaacaatgggaagaaattttggaaataaaatcacagagttggggtggccatgtcaatctatagtaaaaatataattttagccttattttagtgtcagtcttgtatttttctctgaaattggacttatcatagagtgaaatacttgaattcttgagtcaaaatagtctatctgctctcctatttcaaaacaccgtagcaaaaaaactactaaacaagagatgagtcgttaaatatgaattttgtaagacagacaaggtttttgtacaagattctattgaaaagcacaattatacttgatccagttagataaagaaagttattcatgtaaaacaaacaaataaaaaaggcaagaaaagaaaattctaatgataaaatgtaatcataaagagcagaagacacaaaggtaaaggacaagttggaaaaag

SEQ ID NO: 63071 - DNA, 835 bp, Bovine  19866881869184
  misc_feature (1)..(1): n is a, c, g, or t
nactgaggaaatcccatgagagaaacctgtagtctaaattagcttataaaatgaaagtacttatacctaatatacatcactagagggatgaatatctttcttaaatttggaaattaaaaaaaaaaaagaaaaaagttatgtatgtaggttaatgtcaagagagtatatggtgaagcataacattttctctacattgcatgtttttttctaagtaaatttaaaattgtttttgagtgactggattatacctacacaaggcagagtattttacaatagctggtagtggagatgattttttccaaatgaggaacttctatatttcatctttaaatcagtccatcacggtatgaatgggaatcaaatccacttaaatatgtcagcatgaacatatgcttcctattttaggtgtataaagagactattgttattcttttgagaaaaatcctgctgtgaagttttctgtatatgttttagaagcatacagggcatgctgccagcaccattgtatttcaaagcctgattccctttgtaaatgctataactggccatgttaatggacttggggtggatatggatgttgagggtgttgcacagataataacggggctctgatgaattaagtctgtgtgttcctgtggggtgatggaaatagaatagaatcataatgaaatttcaaacctgcagctgtatttcacctaaaacattctgctcatagaatccgtctcttcctcaggcttctaactagcagagaggaatgtagaagataagcttctctgagacagaaaatctaattttcactgaataaagttatccatatgtatagatagatacaaaa

SEQ ID NO: 63072 - DNA, 2717 bp, Bovine  19866880298166
  misc_feature (1)..(1): n is a, c, g, or t
ntctgttgttccatgtccagttctaactgttgcttcctgacctgcatataggtttctcaagaggcaggtcaggtggcctggtattcccatctgcttcagaattttccacagtttattgggatccacatagtcaaaggctttggcataattaacaaagcaaaaatagatgtttttctggaactctcttactttttccatgatccagaggatgtttgatctctggttcctttgcgttttctaaaaccagcttgaacatctggaagttcgcggttcatgtattgctgaagtctggcttggagaattttgagcattactttactagtgtgtgagatgagtgcaattgtgtgtagtttgagcattctttggcattgcctttctttgggactggaatgaaaactgaccttttccagtcctgtggccactcctgagttttccaaatttgctggcatattgagtgcagcactttcacagcatcatctttcaggatgtgaaatagctcaactgaaattctatcacttccactagctttgttcgtagtgatgctttctaaggcccacttgacttcacattccaggatgtctggctctaggtgagtgatcacaccatcctgattatcttggtcatgaagatcttttttgtacagttcttctgtgtattcttgctacctcttcttaatatcttctgcttctgttaggtccataccatttctatcctttatcgagcccatctttgcatgaaatattcccttggtatctctaattttcttgaagagatctgtagtctttcccaatctgttgttttcctctatttctttgcattgatcgctgaggaagctcttagatgagtaataaaaaggttcaactgcacataattgtcaaaactccacatgtgacttagcactaaggcttttcttttcacagtggttggacctcctgaatgcaggaaagcctggagtcgcagaacctttaagaaaagcttgggtttccattctgcaccatccattcatgttttagtctgactgatcgcctacattaggatcacaggaaagggtgagggttaaaacaaaaatgtcctgccttgcctggtgtgagcctcacaggtgttgaaagtatatcattccccagagaccacatccacagccccccccacatccactgaggacctcttacctgccttgctctggatgcacaccatgcattcttagacctttgcttactgaacccctaagcatcaactaatcatttttgtttctctctccagggtcttagtggttctcctggagagaattttaaatgacctactttctcttacatttttgcatgttccatgtcagacctacagaaaatgctctttcatactttcccttccacactgtgggaatgcaggacagccagcatggtcatctctctttgcctcaaacaccagcaacctgccggcctagcaattgtacttctgactcctcagatggaatacaaaaccagcccactgtgtccccaactgcacggacccactgatgtacatcttaccaggcttgaaatgatggtcagggacagttaatagacactgtctgaagcttggaaatcatttaaaggaataactacatgtcatttcagatacactccaaaagcccactcaaaggttatcttatcctctaggaaaatgttcctttgtgtgattatcgtttactagtcataaagctctgattctgtgaagtaatatattaactggtaggttttttttccatctacaatttttacatcatttgcattaggtttttgaaccaatttaaccatcctggtggttccttcctttatgaattaaataaacatgtaaattctattaatatatttatagaccatcatgttcttaatttctgaaattatattttgatagtggataccaagctttcctcttctgaagcgagatgggacacatgacagagcagaaacttatcaaaagtactctttcaatatccactccactcttggttccccgaagtttattacaggcagaagtggataatcaaatcaggattataaaacagattttctatcatctcctttttacaagtcctgaaatttagctttactttgaaatggaacatctactttcctcatgcctaggcagacagtggatataacatcctattacatatgtatgggatttttcaaattgtcaaggatagccaagctttagaggcaacataaaattacaaaaagattttttaaaaacataaattagtatgatataaatgtatttagatatatcttatggactaaacttaaaaaggaaagagaagaaacttatagttaaggtgtgacattgtcctttttgtaatttttctcagcattgtaatttctggtggtcacccatgacatagaattcttcagcaaataaatttccataacacaggcaatgattactgatgtttcacaagtgtagggcatatgataaattcctgcttccttcaatgtgtagtcctttcccagttgaaaagtaaatatataagctttttcaatgggcatgtcgttttcaaccagcgtttattcaacacctgctctattgtggacactgcctaaaagtggatacaaaaaggaacaaaggctgtatctctgcctttgaggaacccattgtctattgaggaaagtaagagatcacaaataattaatatgtaatgtagcaagtactagattcacaaagtagggagagagacatgt

SEQ ID NO: 63073 - DNA, 2922 bp, Bovine  19866880423183
  misc_feature (1)..(1): n is a, c, g, or t
nggttgggaagatcccctgaagaagggcatggcaacccactccgtattcttgcctggacaatccccatggacagaggatcctggctggctacagtccacgggattgaaaagagtcgaacacaactaagcacagcacagcatgacataagtactaatattatgttcaaatagggggtgggaaaaatatagcttagaaagtatagtgacttagaactattagttcattaaactcgtccttggacccaagtccaaaccttcaatctctagagatactgatactaagtgcagggcactttgccaaattctgggcgggatacagaaatgaataagtattttctcttttccagtggtatacagtcatcgggttatgactcttgaggagtcctaaacatatacttaaagaaagcttcctcaccatccatatttatggcctctttcatttcataagatgcaaaaacatctatccagaccatctgcatttatgtgtccaccgtgtctgtaatgccagtccaattgactactacccccaccttttgtacctaactgcattatcttctagaattgcccaaattagagaattggaataatgtttgacccctccctcccactcagagcctatagctagtcacttattcttggaatctacctaggaaacctttcacaactgtgcaacttccaagttctactcctattgaaagaaagttgacttcggagacaaacaggtcttattttcactctgccacttttcagttgtatgaccttaggcaaactacacaacttctctttgagtttctatgtctttgtgcatcaaatatctgacttattggaatggtgttaactgtagagattggtatttaacatcaccagcacctatacagagtatcttagcagctattactagtactgatctattttaggtcactgctgctgctaagtcgcttcagtcgtgtccgactctgtgcgaccccatagacggcggcccaccgggctcccccgtccctgggattctccaggcaaggacactggagtggggttgccatttccttctccaatgcatcaaagtgaaaagtgaaagtgaagtcactcagtcgtgtccgactcttagcgaccccatggactgcagcccaccaggctcctccatccatgggattttccaggcaagagtactgaagtggggtgccattgccttctcccattttaggtcactggcatctcttaaaacacaatgcctagtacaaaacaagcactcaacaaataatcactaaaaaaactttggaaaaaaataaaataaattcaataaattgaaagaacaaatgacttcagactgtcatttgcagctggaacagattgtgattaatagcaagattccaacatattcaatagactaggtctattgaacttaaacagttcccccagggaattctcaaaaaggtacctgttgggttattcttcataataaacagaaatggatgatttgctataaattgattccttgacagactcatgatcacaggtgtatttatgcctatgaaatagagacaagagttatttagatgttcacatttaaagatcagtaaagaaaatatatccataatattcacaatattttttgtagacaggaaaggccatttttgtttgaggagttaacatgtggaaaaataaccattttctaaatacagaaatttggaataaatctaaaaattgaagagcagaggaaaagatattggaattcatggaataattctaacttcacactttatgcttaatgaagaagaaagccagatactagattcaatttagtgacagcagctgaaaatttcatcttttaagcagtaactttctgctcactttttatttacattagataatttactttatagtgtttgaactcctaattcctatccaggtattttgtaaatccactgagaagatgcctgaaagtcaaaatactcacactaccaaaggtgatacatcagggtcactgctgaccccttaatgattgttatctcctcttagagaactttatactaaaaacaagaggccttggccaaggcagaagagttctgaacctgaaatcaggaaatctggtttcattccaaaccctactgtttcttactaatatgaccttaggcaaactgctccacacgtgagtctgttttatcaccaacataatgagaggatcagactatgatctacaagcactcttccaattctatgtaaaagcaagtgaaaattttttctacatgaactagcaacttcatccccaacaccagctttgatttctctaaggattgtaatagcccatacaggagcccttcaggagatgacaaaacattagggagcccagtgtgcccacccagatgtcaaaatccactggcattaataatgtgggtataaatttaacaatatgactatttaaaagatatgtatcttttacatactggctaaaatccaaatagtctgaaaaattaaaatatgtttatgaggaattcattaaagttgccttcccatttctaattgaatttaaggctttttctccaattatttgttgaatattacttttatgcagcatagatactattcaaaatgccacttgttcaaggagatatagaagagcagctcctaaactgtaatgttcatacaagtcaccaggagaccttggaaaatgcagatgctggatcagtcagtctggagttgggcccgaggttctgcatttctaataagttccacagaatgatgctgatgctgctggtctatgcattatactcatagtaccaaggataagctgcaagtcactggagagcagcagttctcaacctttaatgtgcattgtcatcacttaggaaaatgtaagaaaatgctgaaggctaaatctcatcaccagagatactattcaatattttagggtgttcaatattcaat

SEQ ID NO: 63074 - DNA, 1496 bp, Bovine  19866880460529
  misc_feature (1)..(1): n is a, c, g, or t
nttgtttcaaatgaatggccactcatttataggaggctgtaaattgttgccatatataatgtagaatgggctcttatcttaagacaatactcattcagtgatttatttatttttcctttcacaaatgaactgaagaaatcattgggattaacgaagctggtgatttaccatggcacagtgacctaccaaatggcataatgatttatataaaatatattcatttgacaattcctgaagtatgagaatgaatgtttttagttttagtaaaaccaatttttacctagatttaaaattttcctttgataaaacaaccttcttaggcaaaatccatacattatttgtattttcgtatcagtatttaacttcctatcatatatacatttcagtatgctcatccaaatctcttactgagccaaacttccagggaaatggagaacaattcttcttctttaaggttgagggtataggacagcattagagacttttagaagaaggttgtgaaaaatgctacatgaaatgtgccatttcccagaaagtagtgaatcatagttttgaaactgacagtgctccatacataacaaaaaaatattgtgtttagaatgttttcaggtcctgggttgaggggagaagcagactgcagggtattaaaaatctttttttctaggctgttagctttcgttatgctattgtattttttagattatgaactaaaaaagtgcttctgacagagatgttttatagctatatatttaaatatgagggatacctctttaagaagtgggcatgaaaagtggaaacaacaatgaatctgcttcagcttgcctctatatccattgagacaatgtcaaggaaggtttcactaatccgtccagttttgtagtgagtagattggcgattgcttgtagacttaattcaaaatatggttctccttggtcagaaaaacagattgaaaagactaggacaaatggcttttatgtaatgtcctatacttctgatagtttaaaattttaaactattgtcttcaatttatgaggttagttactttaaaaattcttcaaacaagcatttctggtaaccatttcaatgccacagaattacaaagatgtaagagttattgttgattcttcttgtgtctaaaagcagtatacagcctggggaagttatttatgtatccatgtctgtctgaaaaaaaaaaaaagtatttgttttcttgtattgttggaattattttgagatttttgtggcaaagtattattaatttataatcataaaaagaagaaaaaatctgctagagattatgtctatttctgtgttaattggctttattaagactgtgtcttggactgaacaataaagagttcatgaagaagggctcttcctttttacttcatttctgccactgttatttcaatacttgtaagtgtaatgttcattctctttaaaattatgtaaaattttattttgtaacttttgaaatgaacctttattacatatga

SEQ ID NO: 63075 - DNA, 1086 bp, Bovine  19866880513841
  misc_feature (1)..(1): n is a, c, g, or t
ntggggagaaattttcaaatttcacttcttcttgaaatgtggatgttttcaaaccaagcgtctcctgggaaatttttctcttaaacttcttctattccttttaattcaatttaaatttagaagttaaattttaacagacttcatctattaatgtatttatatcatgatagagatctaccatttaacaggaaaagactaaagaagcttgcattttccatttttgttttttcatctacttaacaatgatcaaggactcgtacaaagcaaagaacaaattattctgtattgaaataaaacaattaaaatcgtcaaaacacagtgtgaatgcatgactaaacaagtacatctgccattacatcattataggatagtttgatctgcagggatctgtggcttcagaagacagccaaattagccccatgaatggttatatgtgttagtgacaagcaggaggaaattgtgccttgcactccaaaaaaattttttttggccttttgctaaattttgtcacttttaacaaatgcttgttgaatactacattacgtactatgctcaggtataaatggggcacaaatatgactaagtcacaggcttccttccaactggtagaaagtgggagctgtagccaaataaccaaaatatcatctataataggatctgttctaagagaatatgagcaatgtaaatggtggttaaacacataatgagattgtaacaatacacagagatcagagaaaagattttaagaattggatgctatttgaaatagaccctgaagcccagagagaattatcactgatagcgaggactatggagatgaggaaacatttgcaagggagaaaaggaaagccaactactggggtcaaagtaaatacaagtatggagaaagagagctactcttccggccactctgagtaattcagaaagatctaacagaagtgtaagatatataaaacagaatgatatttgagctggactgagggccactttaaatactaagccaaaaaatacaaaacaaagaaactacatagacattaaaaaacctcacagtatagaagcatctttatacatttggataaaaaaaaa

SEQ ID NO: 63076 - DNA, 1228 bp, Bovine  19866880523106
  misc_feature (1)..(1): n is a, c, g, or t
nttattttcttatgtttctctcaatattctttccggatgtggtgaaaatgcctggaaagcaatatagtcaaaagatcattcctcaaaaaaccagcagccggtgaaatcaaagcaatctcctcaaaaggattttacagtaaaaatgcttttgattaataagaaaacaaattcatactaaacaataatgtgatcaaataatctttaaaactctaaacctctagtatgtgaatgacagtctccatgatcatgtatgacagaaaatgtctactgtatttttctccatttacctgagagctgctcccctgcagaataggagacttggttttctgctggcttttactaatctcttttgtagaacaattcttccatttgggttcatctggattaacttcctttataaaccgatgggcagcatccaatacattggatagtaattgcgattttgcctataaaaaaaaagaagataggaataaaaagcccattgtcagcctaagtaatttatatatattaaatcatgttttcattattctatgactagcaaaattcaatgcattttgttcaatatttaaaaatataaattgctatttatatcagccatataatagtgacagttgccatctactgaatgcctagtttgggctcacattatcttaagtatcttaaaaacatatcttttaatcctcaagtcaactctaaagtgttaactatttttatcattgttttagtgataaagttttgagggtttaaataacttgatcgtggttacaaggtgagtgggtggcagagctgggaagtgaccccaggtgtgtataattctaataactcatactactactactactactaagtcgcttcagtcgtgtccaattctgtgcgaccccagagacggcagcccaccaggctcccccgtccctgggattctccacgcaagaacactggagtgggttgccatttccttctccactaataattcatagcctttccattatattgaccccaaatagatagatgagctattttgtgcacatcatggctaaagaactaaatgtagttgatgtagagggagtctgaataagcagtagtgagtattttcttggtgataaaatatctttagaaagtattaactactcaaagtgcacatcaggaagtgccctatcaaattccaagttctttttgtcatgcctttgctcataagataccaggaaggccctccctcctttattacctc

SEQ ID NO: 63077 - DNA, 2871 bp, Bovine  19866880634377
  misc_feature (1)..(1): n is a, c, g, or t
ntggaaaaccagagagaaggcaaagatctggggtgggtgaagtaagagaggcaaagatacatctcccacagggatctttcattctaactcttggcattttctcttgtttttcaggtgaggttggccttagttgcagaaagtactatcaatgagcaattcagatttttaaaacacacacacacaatatctctgttaccattaattttagccttaagattgagtagggcttgataaatttgacacaaatcagcagatagttctgaatttcaattaaaaaatcacatttatttactataagacatttaaatcagtatgataaagatggcttgtttttatgttaacagtcaactcaattttcaaaagagaaccaaaaaattgccaattgacaaagcactgttacttttccaaataggtttaaattttatctcatttcttaccttatcttttattttattagatatattttctattagatagtttgtattcttatatttttttttctgccaagcattatttaattaaacccattcaacaacccataaagtataattatctctattttacagataagaaaattaaagcacaagagagatttgtaggttcttttccatatacttctcctgatgtggtatagctcagacctttggactcattttggatttgaatgaatacaagtgttattacagtattcctaccaatgacctaacctgtcagactcacttggccgttacaaggattaaatgacaggtaaagaacagtttaagaaacagtcattttccagtccttctctgatgactccagtgttggagctgcatgtgagttaaagatgcagctgcggtgtaagaacagtaaaggctgtgaaccatgtgagggcctgtgttgtgttctttacctgtgtattcttatattataatcccatctccctgaaaccaaatttgttatttaaaaatagccctatgacctcaagaagttatgtaagttttttgagcctcagctttcctacttaaaaaaataaagttacactatcttaatgaaccattccatgcatcattccatgattctgaattgctaggttttaccttccttctatgaaatatgacaatctcagctgcccctttgagtaccagattgcaccatttatactttatgacaaagtaatgatcacagacaaaattcgcaagtgcacattttggtctgaatacatttctcagtcctcaccttctggcttgggaggatgcaccagcaggctcttgccagccattgagcttagaaacatgttctgcctgtgaggatcctagattttcacttcacgatggctttatcagcttccgcagctgctggataatgcaagctcctaagagtctccaagagatgcttagacacctgtcaagccaggtgcactgggacagcaattgcccaagaaatatctaggctggcataaagccaattccttctctacccgcccacccccgcccccaaaaaagctgttgtgatcacagttaattgagagcaccctttcccatctagccatttttacaggcactgaaaagacagaaaagtgtgctttttaaaaatccaaagcaaggctaagtcacaatccagaaatgaagcttactcagcctattctgaaatgttacctagttgttaatcattaatgagatgctaaatttatgaaaccttgaagtgaaagggaagactgagattttggcatcaagtttcatttgaatcaactttctggaggaaaaacagctcagtaagttggagtgcaagctgtgggggctaccccggggcatctgtgttgttctggaaaaccatactatatcatcagcatacatgtgcgcaagggagaaaacacattagactgtaagataatcgtcaagcagagaaaataaaatatgccctcaggcgtcccatttgtaattcccttgaatctgtgctcttggggctttctttcctgtacaattcttcaagttaatgcaaagcactttatgcagtctctacaaggccccacatttttgaagttttgcaggggtaatttatggcctgctaaagcaaatgccttagagaggtcaataaaaatggctcctatcaggcagtcttagtctattgcattggaggtaccttgggtgtcacattctgggtgattggtttgctgtgaagcctgaccagaaagaagtcagcaaatcctttggctatagcagtttgaaatgtgtaggtacattttttttttccagaaacagaccaaaataggcttttgctgaagcaagtctcttaatttcccttctgcggacatgaactaccctggcacatctcccacactgaataagaaaagacctgagatcagaggtgtttacttcagctgttaaaggaactgccaaatatagagatttgggctcttccttgaaattgtgtctcaactcattgttcacaaggaaataattccaaaccttccaaagcataaattaatctacctacaccaaatatctgcattcttgtctcttgtgaacatttgtgagcatgaggtcaggtcccaccactatcaccaactggcattgatgaaagaaagaacagcagtaataatctatttttgtcatcagatttctactgttataagtttacagttaactagatagataaatagaggtaaagatatagagtatatcttaggcattaatcttaattctctaagaaaaactttccagatgtttccagaaatgattcactagttgtgtatgtattagaagagttggcaggttttagttttctgacaagaaacactctgtatactagtcagggttcttcagagaaacagaaccaataagagagagagaggagagagagagggagatttataatggaaattgactcatg

SEQ ID NO: 63078 - DNA, 1304 bp, Bovine  19866880666695
  misc_feature (1)..(1): n is a, c, g, or t
ntttcaaagccactcaagctacatgatcttaaaatattttattcactaagcatccagccagttccaaacagtttcactcatcaaggtcaccagcaagttaaagactcagaattaggattaaatcagctgaagcagaaaacaggatttctgggttctttttccttttgtggtggtggtggtggtttagtctctaagtcatgtctgactcttgcaaccccatgggttgtagctcaccaggcttttctgtccatgggatttcccaggcaagaataccggagtgggtagccattccctttttcaggggattataaaactctctccttttaccttcctacagttttgcatgaagtctatcatacctgtcccagcctgtaactaggattgtcttcttaagaaccaggatgtgtgaaatatccacagctccctcttgcccaacattgagtgtgtggtgacaacagccattgaggtcccagacctttaaaagagaagttaaaatcagctttgagataagaaaagaaaatgtcttctcaatgagtacagcaacaggatgtaataggatttttacagttttttgtttatgttctgcactagggttgattcacttgagacacataataattaaagccttctcaccacttaaatttagctcgtatgtttattactctatttgtaaccttatcagtctactctgataatagttgattcaaaggcaatacatcagtgtttatttttaagggggaggcagtataaaaacatgaagagcttcattttggagtctgtcaaaatcctgtttctttctccaagtatctttctaaattttgattttcttatttatgacataggacctctatttcagggatgcttggaattgtaaacatataatacagagcttgaaacacagtcatcacgtccgaggtttcctatcttctgccaataaaacctcctgttgacagtgggtaccagacccacatccacagaagcacaagcaattctagtttacctcctcaggccgtgggatgaggatgtagaccaatcggttcactttaagagagaaagtaattagctgttaaaactaagccctgctatgaaacattattggtacatcatcaaagggcagatggcactttctatcgagataaaaatgcatatcccttttgcctcaaaaattcaacttttagaaaatcattactcagagatactcatatgtgaaattatgtattttaaaggattttctggaagcattgttcataacagctaaaaattgaatcaacttaattgctcattaacaaggaatgaacatccaa

SEQ ID NO: 63079 - DNA, 1071 bp, Bovine  19866880723600
  misc_feature (1)..(1): n is a, c, g, or t
ngccttgacgtactccttttcctatttggaaccgtctgttgttcctgtccagttctaactgttgcttgcagattaacaatgttcaaataacagataaaatagaatatcaataataagatattgactgattaagagtcttggcaaggaatataaagagctaaaatatgatgcataaggaaaaactgttcactattccgtttgtaacacctacataggtaattcattaaagtagaggacttccatgaaaattttacaccctcaagaataaagatcccagctctcaacttttaccctttaccctcttccacatttcttcctccactgtgttgatccaagagtgcagctatacacataaaattacaccatacacctactcatcctaatttccaaaccaagtgcaaccagcacattctatgaaacaattttaaactctgattagattggacattccaagaaaagcatctattcagaaatatattttactctttattaggagtccaacaaggctacattcccatagaacttatcactttgggtctgtggattcatatgactactttgtagggtcattgtaagaatgactgctggttattattttcatttttatatatccctctgtcaagtattttcatcagaactcacagtgtatacaacacaatgtaggatatatttgttcatggttttttgaatggagcaatctgtaaatatattcaaagcagtggctcaattgttaggggaactaattaagctttgctgtattccatttgtacagattcaacccccaaatccccatttaaccatgtggtatcttactggaaacaaacaacattatccaagagtataagctaaccaatataatcccaaggaagttaaacacacactcacacacatacacataagacatataaagtttcagcaaatggcaagattactaaaaaacattttggatacatttcaaaggaagttacaagaacatctcacccatcagaatcaaaactcttagctgtcactgaaatttcacaagacaaattgaagctgccaaatttttctcaaatcccattcacttcaggg

SEQ ID NO: 63080 - DNA, 2112 bp, Bovine  19866880765007
  misc_feature (1)..(1): n is a, c, g, or t
ntgtatatatgtgtgtgtgagtttttttttttttctttcagtttgtgacctatacttgattcaagtaaaagtaatgaacagttttctctggtcacagaatgacttaacttcaatttgatgctcaagcaactaaccaatagggggcaggagagcatcactactaactctggtgcttgtccagtttaacaattcttatctaacattcctaagacttaaaatatcattgcggctggccttagtatttgcatttgctgtactagaagtagttgctcaaatttagtgtgttaataaagtgctgtaactcttagtaatgttaatgaatcaagcattttgattagcaagacatgttcaggggaaaaagttaagattgtgtattcaaatgaaagtcattaaaatgaacacagcgctgaaaatgaaaatgtgacgtacataaatgtccctattatcgcaagataacagaatgctattcaggcaattttcctgtaaccgagcagaccactcgttaattgtctgtcccttccttctcacacttcccactcaaaagacttttgtctctgctactgtaatagaaaaagtttaaagggcagagtctgaaaaagtttgagaatgactcagaataaattaccattcagagatatctaatgctatatcacttgtttttattaatatagtttcaaatagaaaattatctgtctgataattttccatccaatgttgttgaccaatgcatgtatcctgaaacagagagaggaaggagagaggactttgcttgctccctgcctcccacaacaaccttcaggagtcctcagaaccttcaagcaaactatacagctttgtgaatataacttacatcttggggttttcccaaaaacctgcccaaaaggccttgtttttcttaagaatggaaagactataattcacatttcccttgtgaataaagcagggtaggatgaggtaaggagccagatttgtggatttaaagggaaagtggggaatttaaaacaatgctgtgtacttgattttgattcttaaagaatccactccttcccacagaagtgatttttttcactagtcctgttccatatttctttatcaactggagtgggtgttacaatgagaatttaccaaggaagccaatttaattgcaccccttttctctcaatatcataaacagttccagacatgcatgcctgggataatggaatgcctataacatgttaagtatagctctcagttgtacagtatatatgtggtcttaagatccaggataaggagaattgcaattatgtggatgcttttggaaccctctgtaactcgtatggggcttcccagatggtgtagtagtaaagaatctgcttaccaatgcaggcgactcaagaggtgcagatttgataccagggtcaggaagatcccctgaggaaggaaatgggaacccactccagtattcctgcctgggggatcccatggacagagcagcctggcaagctatagtccatggggttgcaaagaatcagacacagctgtgactgagtgcactcacatgcacacacacgcacacgctcacacacacagacacacacacacacacataactggtttgagccaggatttgtctgtgacttcatctttaagggagttaaaaatggatcacacctagaaagaaagactagagcccaatcttaagattgagtgggtgtgtctagatataaggtctgcttcagattgagtacatgatgcaccaattgcctgtcctttctctgttgtggttccagcctttctttttcttatttctgcttcccttttaagctcagccctaacaacagtttctctctctcttgctcttctctctcatctatatatgatctacctcagctgaaatccaagttcccagccatattagaatttagatgtctgagaactcagttaaagaacaactataaaaggattatcaagtaacctttgttggatttggtaaagaacactaattgtaaagttcagaaagtctagctttctgtgtcaattttcaattctcagaattttgtaaatattttcttagtattaaataattaatttacaattaaaagaaaatactacaatcctgccctggcagta

SEQ ID NO: 63081 - DNA, 2007 bp, Bovine  19866880769425
  misc_feature (1)..(1): n is a, c, g, or t
ntaagtgagtgatcacaccatcatggttatctgggtcatgaagatcttttttgtatagttcttctgtgtatcattgccacctcttcttaatatcttctgcttctgttaggtgcataccacttctgtccttcctttattgtgcccatttttgcatgaaatgttcccttggtatctctaattttcatgatgagatctctagtctttactattctattgttttcctctatttctttgcactgatcactgatgagggctttcttatctctccttgctattctttggaactctgcattcagatgggtatatctttccttttctcctttgcctttagcttctctttttttcctcagctaattgtaaggtctcctcagacaaccattttgcttttttgcatttctttttcttggggacggtcttgatcactgcctcttgtacagtgtcatgagcctccctccgtagttcttcagacagtctgtctattaggtctaatcacttgaatctatatgtatacatatatcccttctctcttgagcctcccttccatttccccaccctccaatcccacccgtctatgtcatcacagaatgctgagctgaacaccctgtgttatacagcaacttctcactagctatctatttcacacatagtaaggtatatatgtcaatcctactctcccaatttgtttcaccctcccctttccccactgtgtccacatatctattctctgcatctgcatctctattcatgtcttgcaaataagttcttgtgtaccagttttccagattgtatatatatgtgtgttaatgtatgatatttgtttatctctttctgactttcttcactctgtatgacactctctgttcacatctaaggagatgctttccctcaaatccttctcacagtgaggcccctgagttaggatgctgaaggcctgaaccatgaaatttggataaagaactggtaggttttaagttagcttaggaggtagaatggacaaagtcatggctactttcacttgatgaatgaaaggccaggctggctaagtaatttgtggggcccagtgctaaatagaatgacaggcttctttgtttacaaatgatgaagttctaaaggtgagactgaagcatttgatcagatgtgaggcccttcaatgaacaaggaccagtgtacctgcacagatcacatactcctgaagctagccctgaggaaggaagggagaacgtggagaggagggttattttttgcacacggggtgagttgtgatagttgtttatgacactttgatcagatgatgtccactgggcatatctgcctataaaataatctgtttttattttcttcattacctatctgctccctcttaggtccaacaatccacattccctagaaacttttatattttaggatggaacaaaattttaaaccaaaagaataattgaatctgcttaaaagtaaaaaaagagaaagctttgtctccacctggattataaggtatattgtgctaaacaccgggaaggaaagaatccagttgactatttaagtgcactgaaaatagtgactgatttccaagctgaatcctggagacttgaaagcaataataatcttccaaaggtaccttatttattgaccttcccacctcagagatttttatttattttttactttatattccttgtggttgacgtccttttagtaagccatttatttccctaacagtcttaatggtgtttgtttctggaattacatgaaagtcaattatgagggctacaatttaaaaccattccacgccacccagcttcctagtttttgacatgggtctttgtggaaaaaaaggtgactgatttttagctattgtgttcagtctgttgaaagatgacacggatgatggtgctgctgactgctctcccatgactcatagatggagttgcctagtaactaacccaaaataacatagctgatgcacatcaaacctgagaagcatgggctgctgtgacacctttacaaagg

SEQ ID NO: 63082 - DNA, 1226 bp, Bovine  19866880781892
  misc_feature (1)..(1): n is a, c, g, or t
nttttttattactttttccctttctgaaggcattcactggaggcctgtgagaaggtaaacaagtaaagcttaatctactactgtattccatagtacagcgtgcatccagcaatctcagtcagtccatcacttgctgaccaaaagcagcaggtcagagcatttctcactccagctcccttagaagaatcaaaaaacctcattttttatggcagcagaaaattggtgaaccctgcaggtgcccatcctcatcattaaggtaatagcatgaagacaaatttgatagccctgcagttggcacaaacgggaacgacagaggatgctttggtggttttgtctgagttgttagaattcatggggaggttaacaaaggatgccatcattggaacacaagcaagtgaagttctctgtcaacacacatgaaaaatcggccttcctgaacactgctgcccttgtgctgaattttgtgacaagttctaacagcttcatgccttttctaatttctctgtttgctttcagaaatgtcatttataaaaattaatctagatcagaaagggtgatgaagagtacttttgagggacaaacattttaaccttaagctttggccaggattggagtagagaaggcaagcaagaaacttgttataaaggagaaagaaagcaagcaaatatgcctactgctattcatttgtagtatatcaatttaacaagacctttacaccatgggcctgtgtgcttcctcagtcacttcagttgtgtccaactctttgtgaccccatgggtcatagcctgccagggccccacctgtccatgagatttcccaggcaagaatactggagtggggtgccatgccctcctccaaaggatctttccaacccagggatcgagcctcatctctatgtctcctctatagcaggcagattgtttattgctgagccaccagagaaaccaagatgaagggcacagcctaccttttcaaatttcctaaaaattaagaaagaaaaatgaggaaaacagacaattggagagatataatttgcgctgttttgattttgcatttgtgctatgttagcaagtatagttacacccaatgattagacaggagccctctgaattgcccttcatgatttctgatctttccctgaagctttggtcagacacaagtccctcgggtcattttttcctctcatcaggtgttaccaacatattaggaaaagagtcttgttagat

SEQ ID NO: 63083 - DNA, 2455 bp, Bovine  19866880846733
  misc_feature (1)..(1): n is a, c, g, or t
ntacaataaaacaagtggacaattattgattgttatttattggtgagtttattctgatatgcctaagtgtgttagttgctaggtcatgtctgactccttgcgaccccatggactgtagtatgcctaaaaatctgtttttcaaagtattgcatattaaatcactttttcttcatgtatctcaaatatgcataattgctgaaagcagctaagtcatctggatgcattgtacacgtaatattagttgaaaacaatagtacttgctaagataattaatatagtgcataattatatggcattgaaactgcaaatagaaagcagattgcaggtgtgactttcctacgttgttttcttgttgctattctggctcttttaagattgctctctaaatagaatttttaatgttgcaataaaatttgaaaggctgagatcacattttgttattttttttaagtgtcaagtgatttaaaatttttgaaaatatattatctttcgtgctattacgtttatatgctatattgtcttatttttaaatagtttaactgcatttagtattttatttcattattctcacactttattatagtactaaatattgagtccagattacttttatttgacatttactgtctactgaatagtaaattgcatttataatcagaggcatgtatccaggtgcttgcttattttttattatgtctttatgtgtcaaggaggaataataatacataaatctttgattaataaaacccatagtttccattagacctttagaggaaaggaaaatctaagggttctttaagttctgcttaaagttataccgaaagagtgctagaataagcaataaacttcagtcacatgaatgtcacactttcaggatttgattcctatctagcttgcactaagtagttctttataccactgacatttttgtactactcatgcaaattccatatctgtttttagaaatatgatgagcagtggatttgaaacatgattctgttgtgagtccctctgctgcagttttctttcatcctacaaataatttacttttctcctacatatatttctacatatatttatatggggacttttattcaaactctgttcttctttctggtgtctgctaaatggaaattcctttccttgtttctttaccttttagctggcctgaagttgacccttttctctctttcttttgatcctaacagtagatgaaaactttgctcaagccatttatttaggtatcttttatttcaagtttcatagaaaattcagaattgaccctatggcaaagcctatttttaggagaagactcttgagagtcccttggactgcaaggagagccaaccagtccattctgaaggagatcagccctgggatttctttggaaggaatgatgctaaagctgaaactccagtactttgaacacctcatgcgaagagttgactcattggaaaagactctgatgctgggagggattgggggcaggaggagaaggggacgacagaggatgagatgactggatggcatcactgactcgatggacatgagtccgagtgaactccgggagttggtgatggacagggaggcctggtgtgctgtgattcatggggtcgcaaagagtcagacacgactgagcgactgaactgcactaaactgaagactacctgtaaagatggattcattaaaataacagttttccctaagaaaagagtatatattttaattgaaaagactgggagataaatttcatcttgatcttggaaaaacagcaacagggtctttgttccctgcccaggaattgaatctgggtaacctgaatgaaaactcggaatcttggccactagaccacgacgggctagaggctggaagccctggctcttcttgccctgtttgaaaaacgaatttctcaaggaggcaaaaactgtaaaaacaggcacaaagtttattactagagacacagcacaacatggggggagctcacagagaaagactgtttatttaggacagaagcaaggcagaaataacaccacaggagagaaagggtgtgggcatctttcctaatgaggagaagtgtagtaaagaagcagttagatcattgatacagggcagttcttctgggtctttgcttacctttggccagttatctgcattctcttctcacatctgacctgctctaggacatgccccaacatgaaaaagtgaaagtgaaaatgttagtcactcagttgtgtctgactctttgtgatcccatggactgtaacctaccaggctcctctgtcccacaggattctccaggcaagaatactggagtgggttgccattcctttctccagggatcttcccaactcagggatcttcccaactcagggatcaaacccgggtctcccacattgcaggaagattcttaggacactccccaacatgagtgcgtgtctttttgccaacatggatt

SEQ ID NO: 63084 - DNA, 1699 bp, Bovine  19866880870092
  misc_feature (1)..(1): n is a, c, g, or t
ncaaaataatgaatgaaggagtggtaactagattttatagaacatcttatgtatcctacctcacttaatactcagcacaaaccagtgaagctttcattgggcttttcccagtgtatatttgagagaatcagagtgctgggaattgatctcagggctactcccctgtccaacatccatatgctttcaacaaggaaactgaggagaaagttgtttcttgtgtttgtagtttcctaattaggtgttctcatatattagggggagccaacctggtatcatgtggaggatctgggtatgtcagattctgggatacatttaagaagcaacttttggctgaatttttggctcatagtggagttggttctattattatgtctactgataaatcaaatcgatacctcgccacaggagatctggagggctggttaaaaatctggaatatagaggtatgttgaaaaaattttcacattatcattataatttttgattgtcttttgtttcagataattatgaatcaggtcttgtctgtttctagataaaggaagaaacattcagtagtctaaagaaaacttatgtattgatcagagacttctttaatttatggagaaaaacagatttttctcaatattgaaaatcctctattaatatagtcaggtcagtctcccaatttaggaatgcagtattgttagtacggttctacagcattgtttgagaataaatagttaagatacgcctcattttaaatgagatagtaaacatgatctaagtagtgtactgccttttatctaacattgttgtcatctgaatttgggattttttgtgtcactgattacctgctcaattttctaataatgctgtaaaattgtataatatgtgactacctatacatgataaagttcatccactttatctaatagctgactttactgcttatatttttccatccttccattccccgtccttcctttctgtctacttctcaagttagtcaaatcagttagaaacattttcttgaatgtgaataccatttttctaacctctgttatcatgagctcttcttttgcatttgtatcacagattgctattcccaaatgcacctttgttcaatttctgtatcagactttttttttttaaagtggtatatcactgtagtcatttcatatttggacattttagaattctggcatgtcttttcattcaggagtactgtcttaattccagcaagaacaaactcacacaggccccagctctgataagatccgtccggcctcacgaagactggataagctccttagagatgtgtgaggcgggcggccgctcgctggttctctctgcctctgcagactgcagcatttgtgcgactgatgtctgtggtgttcctgtccagatctttggtcaggtagaaatattgcttctttactattctaatatttacttgacatttagtatgaacttggcttggtttccatttgaatcccatcatctagtaaagttcattagtcatgaaagaactgacttccatttctgcaactatagctccaggcatcccttattaaccatggcagttccatcaagtagaggacactggagacatggaaagatgggggacctaagcagcttaaaatatgtaaagatttctgagcaaaatttctcctccaaaataagtggatctcttcagtttcaaaattcagtagaaatacag

SEQ ID NO: 63085 - DNA, 1106 bp, Bovine  19866881041625
  misc_feature (1)..(1): n is a, c, g, or t
ntcttccacttacgaagttcaaactgcattctagtttatgtacattccattctctgcttttaaatgaaacattctaaaatattttactatactcagaagccagagacagtttagaaattaataaaaaatatggtaattttcaaatttttaatttcaaattaatatttcaacttaaaattaatgtcataccacagtaaaacatctaaaatgagtggtccttttgaagtacttaaaaaagaagaaccaaacaagaagctgcttacttgattgtctgcagaaacctcactctgtcgttgatctcatctgggatcttgctgagaatttgtttaagtgctcgtgccttttcatttaggtcctggaattctggctctggtcgttcaatcatatactctgatgaaataaatacgtagtaaaaaacattatgcaacttgctgccaaattcaagtctaagaatttccaatgtgttggtcaaggaggtgagaggggagataaaaggctagaaaactaggaagaacaaggttgcaaagcagaattaattacagtttaactcagttcagtagttgtattagggtccctccaagtaaaatatcagaagataaaaaaatgaacatcttcaatatgggataaatggaaattccatgaaatcttagaaataaataaaattttaaaggaaggcttaatcaaatttttcaggcctctcaagttacatttcacaaggaacatttggtaagtaatgacatttgtaacaaatacaatggcaatatatatctgccaatggtgaatatgagtttaattaaagaaacctctacattcaacatacaacggctcattacatcaaaactccaaacctactaaagtcttcagcacattcttgaaatctcacttaaaacaaaaataccaccatagaaagtccaacataaggcttggtatcaaaaaacagcaactttggtaaggaagtttagtcagatgcagcaaaggcaaaaacttcacaaccagattcaccgtaggcttggaaacattacaactctaccaactcatcaatacaacctggcctgacaggctgcaggtgctcaatccaaaataataatgaggactttctcataatt

SEQ ID NO: 63086 - DNA, 900 bp, Bovine  19866881062601
  misc_feature (1)..(1): n is a, c, g, or t
ntgtttgagaacccacagggaacaacttggaagctaaagagagattgtgaaagatgtttcaacttgaaagggaaagaaagaaaatacaaaagaacactgaaaaacccagtaggtaagattaaaaagtcacctgggggttacaaactgtttgaaaactgtcccaagttccaaaataatagtttagagtgttgaaagtaagtctggcaaaatgcctctcatcctacaatccccaaataaccttccaaacactgtaattatggagatttcaagaatgtatgtaaaatgcagggcaaagacttaaggtagactctgtaatgataatgtggaggggggactgtattggtgattgagtttttttaagattttttgagattttttttaagagttttttttaagtgccatttataatagtaatttttaaattcaatacctcctatgaaaaaggagatgaacaattttaaatgaaaatgataaaaacaggcaatattaagtgaaatagctggatttataaatcatcataagaataggttgcccagggattgtgatttcatcatttgaaatttgaacaagaggggccgcatctagaaatattaataacatggacacctgcctgaataacatggattcttctcaactataatccaccttttactggttatgcaaagctagataaattatttaaactcttcttctatgccatggagcctatgccagagaccctttatatagtaaataggggcaataataatccctatgtcatagaggtatttagtggaataataatatcatcaataaagaaaatgtattaaactttgattaggtgacaggctctgtgctaagggcttcacatgggttatttcacctaatgttcacgacaacattatggggagggtaacaaat

SEQ ID NO: 63087 - DNA, 847 bp, Bovine  19866881108066
  misc_feature (1)..(1): n is a, c, g, or t
ncacacacacacacaggcgcacacacacacacacacacgcaaaaccgtatctgatgaccagtcctttcctaatctaattcagtctctgtgagtttatccagttgatacaacagaacgtcactgggacatgaggtgtgacatattcattacccaaataaattagtctaaggaaaaacctttagtatctaaggaaactaaaataaaatgtgagaggcaattgtcaagacattttgcttaagcataaaatattcatctgctctgctaaacttccataaaatacaatataattccatctaatgcttcacacaggtttctaaagcaagaaataatttaagatttccaggtggcataatatttaatacaagctctagactaagcctgagcagcctatcaagtgaacacgagttcccattttcctaccaaggagtacccaaggttcactcaaaggcaatttggcgaggtttattggcaaaaaataaactagataaaaatgagagtcctgttccccaccatcagtaattcagaagcgctgatgtagcataaggaaaaggaacagccagccatggagaatttgctaagccaagtaaatctcaaggttctttttagtcactttgacaagacaacggtatcactaatcccttgcgcttacagccaatcatctataattcagaagcaagctgcagcaggcccatgcacaaacaaccaggccacattattttagtttcaaacttgcactcacccgattttgattttagcagcctctgataatcagggtgaaggacatagtgagcattttctgtgctgttgttccacagaacaatttctccatcataactccctacaggag

SEQ ID NO: 63088 - DNA, 755 bp, Bovine  19866881139644
  misc_feature (1)..(1): n is a, c, g, or t
nttgaacagtttacgctgatatatgtcagacagagaccagaaaaatactgtatgatatcccctatgtgtagaatcacaaaagtcaaactcataaaaaacagtgagtaaggtggtgtttacgaggggtatagtggagtgggaggatgagtagtgttgtttaaggtacaagctcataacaagcggtgaataagccatggagatctaatgcacagtatagtcaatatagacaacaattgtgtattataaatatgaatttattttaaaaaatgaggactgcttaagtctataaaggctttttgataatccttgggaaaatttagagctggtgtcataggtctgtatatggccagtaatatgtgtgcataggtcatattagtcatttttcatagataaatttattcagtgtgaaataacactggttaatttgatgttcactgatttattccaaagccagattgcaatgaatcttaataaatttacaaaaggtcataactggaaagtgtcaatgtagtcttagctatttaaataggtaactagatgaaaattttagaatagggatatttccatgggagagtataaaataaccatttctgatccctgctgaagtttgcttctgtcttgagaacatttgtttaagaagcaagacctattccttgtgtacctaataccaggttttcagcaagtctctgaagggtttgcagtcttccctcgagagtttatcggttcaagctcagatgcgatccagactcctgcag

SEQ ID NO: 63089 - DNA, 1053 bp, Bovine  19866881160390
  misc_feature (1)..(1): n is a, c, g, or t
nctgtgacttattctggataatcttgttggaggctggatgggggcgagtatgtgtgaaattcacaaataaccctcaagactaactttgtgatggtttcagtatccaaaattgggctccacaaattttaggaaaaagcatgaaaaataacatttattttgaactcattccctacctttgagataacctttttatcctaaaaacaatggatatgttcttttggactaacaagacatgaacaattaacctctgagggagcagatgtgtaaaatgcatgtctgactctgtgaccccatgcactgtagcctgccaggctcctctggcaggcttttctgggatttcctaggcaagaatactgaagtaggttgccattttcttctccaggggatcttcccaacccagggatcgaacccatgtctcttgcatcttctgcattgctaggtggattcttcacccaactgtgccactgagaagccccaagagaacaaataattgactttgttcttttgttctcaatgttacaatttctacatgataagttttggtaaaatttattatcctctcattcatcctaaaagagattatttttaacacattgaaaatgttttttttttttgctcttgtcaggcaaactaattttactttctcagaattggtcatcatatctaaattctgaattagagataaggccgtcatcagaagaacacagtgactcagtagctgtcctcccaggacttcagatgtgaggtgtggaatggaactagtaacctgcttcaatgtcagaaagaacaaatctctcagactcttaaaatggcctaaaaattggctcgttctgcacttcaattttactcttggcaaaagtacaaacttagaaaaaaagttatattgaaaatgtacaaagtaagaaatacagtgtggattctgaaggtattttaaggataactgtcatttcaaatgaaagtttcaggttaggtttcaagggaaagtaggcagctaattagcttctcaccactgtgacacacaaggtcaaatatcagaatggctactttttatac

SEQ ID NO: 63090 - DNA, 1687 bp, Bovine  19866881341613
  misc_feature (1)..(1): n is a, c, g, or t
ntgcctggagagtcccatggacagaggagcatggtgggctacaatccctagggtcgcatagagtggacaggacttagtacgcatgcacgcacactgtattctctctttgtaagaaaggacttagtatgcacacacgaacactgtattctctctttgtaaaggtcaatgtaggtcatcgacatatgaggaaataatgataactaacatctgtgatttgtgaagcacctgtgcttcctcagtcgcatttggtcgctaacagttgtgatgggaggggagagaccgagcctactgtaagcactacctttaccatccaggtaatcagtatgtggtttaaggatgtccctagagatatcaaggccacacagcttcttagtgagagaagcagggttgaacttaatgcacaactgtgactaacagtctagtggccttcctatcatgctatgacgtttcaaacttttcaggaaaagcttgtccgcatgaaatactgcaacagggcagagaatgggcaattgttctcttcgattctgatttgtgagaagtattatcaggatgtggggtaaatagctgagaagcagctattggagatatgcaacctttattaggatgtaatatctctgtggtttggttttaaagcaacttagtaagctgaactaatcaatatgatcaagtaacagtctatgaaattctatttgaaagcaaagctgttagattaaaaaatccaaagataaaatctgaaaatgtaagctgttggtaatcctctttatcattttgaagaaattcaaatcacaataaaagctgagaaatgaagggtttaaaaagaaaatatgaaaactgattctgcaaaatttcatttcatatcaagtcttaatagtcattaacaccctgagtatggaggttcacatgacagaccttgaactgtttcagcaatgagatggctctataatcaaacaacattgtttgtagtagaaagtggaatgcctattttaccattcttagtttaaataaacggacagaaaatcaccccaaataatgtcccatttggatcaccttaagggacccatagtttcattaattctgaactttgagagttccttagcaaacaggaacaaaagctgactatccaacaatagggaacagttaactatattatgatgtttccctttagtggcatattagctcatcatgaatttttattgacatggcaaaacacccatgatttaatattagttgtggaaaagacatgataccaattgaattcatctgtgagggctgccatgaaaaacaacagaaattaattttcttactgctttagagactagaagtccaagataaagatattggcactcggtttctcctgaggccattctcctgggctggcaaatggctacctcccaacatgggctttttcctacctatgcttgctcctgtgtcttcttctgcttttaaggacatggtcataggaccacatcctaagagcctcattttaccttaatcacctctttaaagactttgtctccaaataaggtcacatactgagatactggggtttgtgacttcagcatgtgaattttgaagggacataatttagtctattacaccaattatatgcagaaagattctcctctggctatatgtataggtatatgttagacaaaactaaaggaaatagacaaaaataacagaaatt

SEQ ID NO: 63091 - DNA, 1247 bp, Bovine  19866881351175
  misc_feature (1)..(1): n is a, c, g, or t
naatatataatgaatcagcaacatgaatgtctgttctttttcaactttatgtaattttatcattttaccattttaggagacagagaatggatcccagaccatagtgtaagtgcatatgctgataacacagttgccttaggtgttctgaagtttgcccagaaaccatcagcaaggagaacacagcaaaagactggtaagattgactgtaaggctgctgtgccatattgtagctcagtatgtttattagtttatctcttagtactttactaggcgcctgaagattaattttgtcagttatttaatttaaacttattcatttaaactgtcctggacttttcttccaaagccaaaaaaccaagaatagtcattactcctctcaaaaacataaattttacagtcttagctattttctgtcacaatgtactagagaatgacatttttaaaatgtagctcaggataaggcatatatattttgaacaacccttataaaatacacactgagtttcattacactttcaagaaacagtatatttatactagattttgtttcctcctctacttgattcaaattatgatcacacaaagccatgagattgctgtttgctgctgtggttaagacactgctggtttaaatctaatgcttaatatgttggccctgaaatcttgatttcagtctattaattctattttctagccaaaataattttgagattttctatacgataatttttgacatattgaatggtcattgcagtatttttctagtaagtgcatgcagagaactttaacatcattaaaatcagtagtgttactggttattgttatctgaaagtacctgataaagtaggtttgctttgtgctcaatttcatatgaagttgcagttgatgactaatgaattaagacaattcaacatgcacggtgagtatgacgacactgtgctgggtcctggggaaaagagttgcctgagtcatgttccttgatcttgggagctcatgattcaggagaaacatttgacagaggggactgtttgacttcatctgaaggccaacttcaagccagaaatttaattacgtatgatttgtccatatatgtaagatttatatttctctcttgccttaaatcctatgattaaaacaacttggccagcttagattctttccatatgcatttatgttgagaaactgtcagattttaataggttttttttttttttagggaaaatccattcatgtagataaattttttt

SEQ ID NO: 63092 - DNA, 902 bp, Bovine  19866881428431
  misc_feature (1)..(1): n is a, c, g, or t
nagcacaggtacacacaaaagactaggtatagactttttaaagtggtagaagtttaacctgaaaactaaccacaccattacaaagaaggtgaaagccatggaaggctttgtaattgagaatgatttctaatgccatgattttacaggaaggaagctgtgtgaattgattaacttctacggtaatttgttggcgtgctcattatagtctcctgttttgactaatgaatacgtttagagcttcatctctgtgcaagctaaggcatccaggcagtttgactgtcttagaataattagagaattttgcattgtcagccagtgggatacttacctctcccggtgagcttcacagagtattttttcctatttcctcttccttccctcattagtgtctgttatggaattaagcccaactctccaacagatcactataaaacattttatagacatttataggactgatctgactgaactaaactattattaatttgctaattaggatggtaagaagacagatgttattcttatgtgagataatttaggggaatttatcatattagggcttaaagatgttttatctaatttactgaagggctaaaccaggaaagttaaatgtgtgataaacatacccccctcaacccttttgtgcctgtgatacacatttataatttataatgccgctcttttcctctgagcctgcaaatgacttcacaattctgcatacagcactggaaacagcaagagcttgggacctgacatgaaagatgaaccagacagctaattgttcctacaagactgtaagtccctcaggggtaggcaccgggtccaagtcaggactcgacacacaagagactcttaataaatggttttcggaagaatgatagagagatggataattaatgggt

SEQ ID NO: 63093 - DNA, 823 bp, Bovine  19866880452442
  misc_feature (1)..(1): n is a, c, g, or t
nctccggattcttgacgatagcaatactttgcccacagctcactctttctcaatgacagtgagaccagtgaaaaagaagacaaaatcttagttcactatgaacacggaataccagtaataaaagtgactgtggtaactgtgatgatagtggcagaaactgggaactgattctcggaaaggtctactgggcttgatttattttaagcagccaggagagatctagaatttggatgcagtgtttggatctatccttttatttttctccattgcccactgactttaaaaacctaagatcataccaaacttctattagcatgtccaccatgaatgcacaattaaataactcaaataaataatgggtagctaaagaatactttaaaggtagtaaaaagatagcacctcagtgatttcttagcataatgctaatctttcaaatgtgggtaaaatcccatttagtgggaaggtttggaatcttacataaaaatataacatgcattatatatttcttgaatataaaaaattcaagcgactgtatccttactgatattaatgtaacacaaataaaattataatgaacattttaacacaaaatgcagttcatttctagttaacatattgaaataactgatattcaaattctaactattatagcacacacatatgaatggagtttacgtatatacatatgcttcaaagtagaacttgctttggggctagtactttttattctaatgcacagtatttatgactaattttcagttggttttactaagaaatcaggagataaacttaaatttctgactcttggatcagtcagaaaata

SEQ ID NO: 63094 - DNA, 767 bp, Bovine  19866880617200
  misc_feature (1)..(1): n is a, c, g, or t
ntagaagctggttctcttgattgagaataccttgcttggtaagagagaatgccttgcttggttaggatagctaacatcctatagaaatggggacacagaagatgtgttttctcttgtgactctcatcattggttccttcactttagttttgctacaaggctgaatctatggtaaattgtgtgttacactaggtgagaaaatgtacttgacttgtttgctaagccctgcttcctataaccgaaccattggcaggaattagagacctcagcatcactgcttttcaggttttaaggctggtcctagaaaattggactaaatgaattttttcccattgttttgtgttgtgttttagcattagaaatgaacccttaacactcctccatgtgaatgaaaaagtatgttctcacattatgttttaaaaggtcttattttctctctttgtagcttcagacatgaagtaactcgaaagtgtaattaccatgttgttgtttagtcactaagtggtctctgactcttttgcctccccgtgggctgtagccttccagactcctctgtccatgggacttcccagacaagaatcctggggagtgggttgccatttccttctccaggggatcttcttgacccagggatagaacccaagtctcctgcattagcaagctaattctttaccactgagccaccagaaaagctcataattatgataaagcttatctgtttcttaacatgtctttctgagaagtaccttaccacaaatcacttgtcat

SEQ ID NO: 63095 - DNA, 788 bp, Bovine  19866880787677
  misc_feature (1)..(1): n is a, c, g, or t
ngctgaggcttaaattgcctggttctgagcagggactccgctgagtatttgtaagctagaagagttcattttgtgcttccttagggaaacttttttttttaaacttagcaggcctggtttgggtaatgaagaccagacaactgatgctaccaggtcaccagggtggtggaaaatcagactcaggagagaacactccagaatgaccagggaaaatgggttctgggaaagttctgttattgagaggagctagactctataagcctatcaatgtttagtttttaagttttcccagaattcatctttttatatggcttggcaagcaattattttatttttttcttatgaaattataatctgggacatcattttgaaaggcttgccagtagctattctttggtctgttctgcctccgcttgttttatttttaaccctctcttgattatttctaaaccccttaatcataaaagctcattttcttttattaggagggatttattcacaaggctaactcagacatacacagcatcttttaatatacattactgaatgctgacatggttctgcaagattcagaaatgctttctgataacaatgctcaaaatatatggaaaaataaagaagctcatacctaagctcataatttgaatcaatttagttttatatatactgaagaaattcccttgacaataacaacgaactcagcatccacgggactgacaacagtgacctcttactaggtaccaggtgacagattaagtgttaaagataaaacaagaaacatggtggct

SEQ ID NO: 63096 - DNA, 1906 bp, Bovine  19866880810063
  misc_feature (1)..(1): n is a, c, g, or t
nggtcttgaatatggcgtggacacagtgagagctgtgttcacatcaccaccaattaccacaggtgttatatgtgctttaatggattttactgattcctctccaagaatagatctcttacactcgacatttctgagcctctagtttttaaggttgctgttaacaggatgacaatggactttgtgtatctggttccacatgtaaagtcgtcactactgttctcaagagaaaagagctgaacaaatgaacatgtcttctcagatccatcagagaatgaggtcacaaattgcttcccccaaaaatggagagagcaacaggggacagagaatcacagcccccagggagaagctgcaggggccaggtgggcaggcgcattggaagggggctgacaaaaggcttggacgtgggcatggacgagcttaagacaaaactctggggccagtcatacagggtcccaggtttacttaagctctacctccaggaggcccccctagccaggattctcagaagttgtctgcagcttctggtggggtggggggaagaaaccacttccaactatgaccagtaatttgctctcttcaacaagggtcttttttcaaggaaaactatttgaccagggcctgacccacctggggaaaggtaaacaccaactccagccccccagcagctctgtccctcctaaataagacatgtgtgtgacggtcacagcccaggggcacaagctcacaggacgacagagacctactcatcagagggctagtgcgctcccctccccagcagccccactgcatccacgggcgcctgtacaacaggagatgacatgtatcggacccttttaatagcacacagctgcagccaacagtaaacacagcctaattcctggccacataaatacacagcctcacctctttacctcagctcctctcacctgaatcaccacacccagctttcaacaaaaaattacaaggcatgctaaggcaaaaaaacactgaacagacaaggcaagcatcagaatcagactcagatatagcagaggttttggagtgatcagaccaggaatttaaaacatctatgattagtaactccagtattcttgcctggagaattctacggacaaagaagcatggcaggttacagtccatggggtcgcaaagagtcagacacaaccgagtgactaacaattacttagcctggtggctcagatggtaacaaatctgcaatgtgggagactcaggttcgatccctggatcaggaagattccctggagaagggaatggcaacccactccaatattctttcctggagaattccatggacagagcagcttggcaggctacagacctgtagcctgtagtctgactctttgcaacctcatggtggcaactaatactttcacgattaatatgctaagggctataattaagtgaacatcatccaagagctgatgggcaatgtaagcaaagagacagaaattctaaaaaaatcgaggggaaatgttaaaaaccaaaaacagtacaacagaaatgaaaaatgtttttgatgggttcatcagcaaatggacacagacaagagaaaaaccaatgcgctcagagatatgtcagtaaaaagtctcaaaactgaaaaggaaattgggggtggggggaggaaaaaacaaacaaaaacggaacagaatattcaaaagcagaaaattacaaaaggtataaataataaatgtgcaatgggactaccagaaaaaggagagggaaaaaacacaggaagggacttccctggtggtccagtggttaggactctgcacttctactgtcggagggcccaggtttgatccctgatcgaggacctaagatcccaccagttgcatggcacagctaaaaaagaaagaaacacgagaaatacctgaagtgataatgg

SEQ ID NO: 63097 - DNA, 1297 bp, Bovine  19866880814938
  misc_feature (1)..(1): n is a, c, g, or t
ncttttgatgtcattagctactctgaaggctgtgggcaactggtaagaggactatgcgtcaagtgcaaaggaagagtagctgctctaattgtgttaccaaagaattagatctggatctgttgcaaaacctggggcttgtctgttcccatctcacgtaattatttattggagggacagatgaatgcttgcttcacaggtgactatggtaataggatccttggccagcccaacagattcagattttatacacaaatctgtaaaatcttatttaatgtgtcctgatgtggcattttggccaatcacattttctttatactctgaatgatttcacacaggagagctacttcaaatcatatgtcaggcaaaacaacatcacttatgaatctcttctcccaagtcttgggcaagaacccattttcctcaagttcaggcctttggagtatttatttcaaattaagacttgaataaagaagtgaaatagtatcaatattgttttgttacttgccgtatctgtcttctgcagggatggccaggggtggtaaaagtgagtggtggagattggcaaagcaggaattgatcagtttcgttgggggttgggggagttgtgggctgaagtctgtgttgatgtggggtcaactcactggcctgagaagacagtgtgaagcagtccaggtgtctctcagtagggaagggaagaacgtctagacataaattataacacaccttttttttctcagaaaaaaatcattttacaattattccatgtgttcccacagctcagatgcctagacctcacccaataagctccaacagctgcctggaggaggcagtgaatcttcataattaccattgaatgtggggagtttttacccatttttaaagaagaaaatactagagaagagactttacaagtggtttgcatgagtgatgatgctatttaatcctccaaacacacctgcgatgtaaattgcattcttagcttcattttacatatgaggaaactgaggcttagagatgttacatcaattacctgaggtttcacaggtactcccttcagttttccctgaaagcctgtcctgctggatccttggttgatccagatggggaaatgaggctcagagaggttcagtgaattattcaagatcacacagtatgtagcagaactaggatcaagtttaggttaaatatttctaagttcaattctaatgcagtggtcttctgtttttctcattcttccaaacttgaagaacatcactttgcagagtggcctcaatggtggcacccacatcatttgaaa

SEQ ID NO: 63098 - DNA, 2044 bp, Bovine  19866881128770
  misc_feature (1)..(1): n is a, c, g, or t
ntttcccttatggcctgaaatgcataccctatgctgtgaagtgtgagagctaccccttacctccataagcatcaaatccacatactcaaaactgtaagacaaaataattgaaggagtctaatccctggatgacagccctggatgctcattaattaattttaattcatgagaaaacaaacctattacttgcttatattacagtttattgtggtctctgttgcttaaaactgaataccatcctatctaatacatctcaaaggaaaagagctttgaaaaactgtgtttgttgtaacccatgtaataggaacaaatgatctgtaatcagatcttgaaatgaaaatgtaaatggtcaaataacagaccgaatggacattgctgtagagcaaattaatgagttctgagaggtgattgaggaattctgtatcacagtgaaacagcaaaagaaatggagactatcaacacagttgtattatttttctcaggtgaagtaataatgtaccacagtctggacggcttaaacaacaaaaatttatcctcagtgccggaaattagacttccaagatcaaattattgacaatgttactccttctaagggttatgaggaagaatctgttctgtgtctctctcctagcttctcttggtttcctggcaacctctggtaggggcaggcgtgtgtgttcagttgcgtccgactctttgtgacgccatagactgtagcccgtcaggctcctctgtctatggaattttccaggcaagaatactggagttgaggggaaaaaggatactggagtgcgtggccatttcctactccaggggatcttcctgacccagatattgaacccacacctgctgcatcccctgcatgagcaggcagattctttacaactgtgccatctaggaagccctttggtattccttggcttatagatgaatcacccaaatctctgccttcaaattcacatgatattcttcctatgtatgtatctgtgtccaaaattcccctttcttataagaacactagtcagatatgatctcaactttaattgtatctgcaataacactatttccaaacaaggtcgtattctgaagtactggggtttgagactttaacgtatgaatatggggagaggggccaaattcaatccatacagcaattaagacaaggagaaaagagaagagaagccctcatatccatgccatggaaattgtaaaaggtgagaagggacagaattaagaaatagaaatatctttttaaaataaaaaaggaagaaaatttccctgagccaaatgatatgtctatatgtagaaaaaatccattgagtaccaagcaggaggaaaaataaaaagaccaactccttgtcaaattgtaataaaatctgacaataagaacaatgatgtttttaagcatccaaaataaaaaataaagattacacttcaaaacgacaaaaattagattaacattacacttcatatcaacactgctggaagcaagaaaacaatggagcaatatgctcaacatctgaggaaaaaaaggtatttctgaggtacagaaaactataatacaagcgagagagcaaactagaaatggtaccaggtggccattaagtaacttgatccaactgcagtttcatggacagggcctgcttagttccagccaatcagagtagtcccatcatcttgctagggctgggcttcaaatgagtaggtgacatatttgagctgagacaccaagagaaatctgctgggcttctggaataaaatccctcctcactttcctgggattggatcccttccttccattggaagcaaacatggaaaatatcagccattgctctaccagtcacccacagccacaaaaagagccagatacaagacaaaaccagcaaccatggggctccttctcctggggttctgcaagagaattaagtcttactgaaaattttctcagttctcccaaggagtggtacttacctagggaacagtgctagagtgcatagaagataagctaatttattatattcaataaatgccttatgtcattaag

SEQ ID NO: 63099 - DNA, 1322 bp, Bovine  19866881151385
  misc_feature (1)..(1): n is a, c, g, or t
nggactctgtcttgtctcaacaaatgagaattgctgacctgggtgagtgtatttatatagttgctcctaaaattaggagaactgaaaatctcagattaatttttttcttgactttggtatgcaccataatttttccccttgaatgttagtttttctaattatgttccctttagcctaataaagggaacattccttccattgctccttggaagaaaagcaatgacaaacctagacagcatattaaaaagcagagacattactttgcctacaaaggtccatatagtcaaagctatggtttttctagtagtcacatatggatgtgagagctggacaataaaaagtactgagcactgaagaattgatgccttcaaactgtggtgttagagaagactcttgagagttccttggactgcagggagatcaaaccagtcaatcctaaaggaaatcagtcctgaatatttattgaagaactgttgctgaagctgaagctccaatactttggccacctgatgtgaagagctgactcattggaaaagaccctggtgctgggaaagattgaaggcagaaggagaaagggaagacagaggatgagatgattggactcaatggacataagtttgagcaagatggtgatggacagggaaggctggcatgctgcggtccatggggtggcaaagagtcagacacagccgagcaactgaagaacaaatagcctaatattgaaatgggcttgtttgtctaaacacaactttttaggctgagaaaaaggcaacccaagagctccctggatgatgagggaaagtcaaattgactgaagtttaaatttttttgtagagattccacatgtggaaaaatttataggcagatgatctaaacttgactgggcaatgggtgggaccatccaggagagaccacagaatatattggagaggtgacaaagatctcaagaaccaggtactgagctgatagctagggtgcaagggtgtgcccagactatggtccaacccagtcaattattttgaatgtcttgctagcaatgggttacccaggtggcgctagtggtgaagaatccgccctccaatgcaggggacacagaaaaagcggatttgattcctgggtcaaatcccctggaggaggaaatgacaacccattccagtacttgcctggaaaattctatggacagaggaggctggtgggctacaatccatgtggttgcaaacagttggacacaacttaatgactgagcacacatgctctagcagtgaagatggttggtgattagtttagtctctaaattcctacataagttctatgggctcatt

SEQ ID NO: 63100 - DNA, 520 bp, Bovine  19866881990742
  misc_feature (1)..(1): n is a, c, g, or t
ntactggtatattactcacaaaaatgatgataaccacatttccctttttactttattttaaaagccaaaggaaaaaagaactaccaaaaaacatacagaattaacagccaggaacattataaaggaggtgtctggattaagcaaagagtactaaaaaagacatttgctaatttgaatatgctcttctgaaagtgtctacacaaagccagtttttctttaaaaatgtgctcaatacttccaagactaactggatccttgattttgcataagtttccaaaaccatcatcagtaccagatagacttaggccttgaacatcctcaccaggaccacagtttagccctgagaaaactttttctgacctatttttggttccctatcctaacttacttccagaccctctgtcttgtttctttggtcccatccttttcaatgctatctcatctcagtcctgatctacagcactttctcctaactatgatcctaattgtatattgtccatgactcattttttcattacct

SEQ ID NO: 63101 - DNA, 929 bp, Bovine  19866880462852
  misc_feature (1)..(1): n is a, c, g, or t
naaagagctaacactttcttagcaaaggtcacagaattatggatatctgtatttgcgtatcattgattgggtgacctctttatctagcatagcttttcttcacattctccagatcaacaaattcaccctcaatatttagaagtccacaagatttatggcaagaaaattagatgtgtcacattatcacctgctctaaggtcagtattgtgcaggatccttatttattaggcagaacagcctgctggttaaaaaaaaaaaaagaaaataaaactgcttaccatctctgcaaagtctgacatgaggcacgactgcttctttttttaaaaaagtactacagtaacaagaaggttttgtatgaagtgacctcttcatgttgtttgatgcagtagagccagaatgatgtttctagaaatctgttctctgggtcaaataatagcagaacacaattagtctagaaaaaattaatccaccttatgtgaaagtctcaaagctcgcaatagtgacacacatagtaactattgggaaaagggcaaaggaggtttacataaatccctgaaaaagtacatgtttaatttgaaaatcctggcataattttctctttgctctaggacttgatttacacatttttcttttcttaccatccctaggcaatgactgccatggaataattccctctgataataaatgcgcacgtgaacaaaactgcaggaaaccaagcaaagtctcctagttccattgttttctttcctttccctcagcccattaagacaaaatgaatattggctatatttaggagttaaaaacattgaaaataatgtttacactgagtcttaacccctaactgaaaattaaaataaaatgtgcaatttctttaattcttactatactataaaacaatacgaagcacaatttcaatccccaggaaaata

SEQ ID NO: 63102 - DNA, 1136 bp, Bovine  19866880547825
  misc_feature (1)..(1): n is a, c, g, or t
ntttagagtgactctaaagtatatttccttgccgcaaggtatcatgattgaaatcacgtcaattcaaggggggataatgtaagctatgtctctgaattccagtgatcaaaggatatcatgaaacacattagttcctaaaaaacagactgagtgtgtattccatggcatgttatcatggaatttatgttgggcaattatgtattaaaactaatatgcgtttggggactgagtataggctaggaggaaagggagaatctagtcaggtgaacgatgaccttcagaagcacatgtaaaaattgtgatctctcttgtttttataggagtcacagctgaaagcaatgaaagagactgtgcaactctgcctctcaactgttttccgcgatcagcatcctctccatttgaatcccttcaggccgtatcgaactcagttatcagtcccaaccatgataactgacaccaggactgcatatgtaagcacaacggccaaggtactttcttgacttcaattcatattatcatcaaagtgaatccaagtaagatagcaaattcattgaaaaatcaggatgtaaacgggagatagtaacccagtttgtaaagtcttcatagtcacttggagaatgttggaaaacaaattttctgtataagagaacaaggtgtttcttaggcagaattattatcatcataattattttacaatattataagaaaatatcttgtattatattccagttttcaccaggggtttattatggaaaatactttcttctagggtataaccaccatccttacaaaagtggatacatttttcagaaatgaagcctgtagttctcaacactgtgactatacattagaatcacttgggatagtttttttttttattttttttttttaaagtcttaatacttgggactcacctcagacaaattcttcctggtttggctccagtcatcattaggttttaagagctccctaggggactaggagggcttccctgtggctcagcagcaaagaatccacctgtcaatgcaggagacgtgggttccatccctgggttaggacgatcccctggagaaggaaatagaagatagaaacccactccagtatgcttgcctggaaaatcccatggacagaggagc

SEQ ID NO: 63103 - DNA, 1533 bp, Bovine  19866880604774
  misc_feature (1)..(1): n is a, c, g, or t
ngattaaagcactatacatacctgtaaagtagaaaaattgaactccaaatagatataaatgcaaatttcccaatctcagactaattatggttacataaattataaaatacaaaaatgtgtgcatcgtattgtttttagatctaaaaaatagctcatcattgccctcagctgaaaacatgccattgaatctgctaagtataattaaatttaaaatgagagcaaaaacacctgcagaagtattcaatcaaaaactagagtttgccatgtcttattgtggaaagtaccttctgtttaaaacttgactctacagaagcgactttatatgactgcttgggctctatgcatgtttaaatatttcttaaaatccttgaaaagatgatgtgtgcccttcaaagatgagagcttgcaagtgatgagatatatgtgctcgtaataaggaaattcatcttatacagtgattaatataaaatggaaatattctgtttcatcaactcttacataatgcaacttttcactttcaaaccttttgatcccaggatgcagcttgcaaaagatgaaaactttttaaggtgttgtttcttctaattctagaaagttattggcaggtcagcatcttagttaaaattctgattgtaggacaggtgatgcacagagtcatagaacctcttgttttgaaagaataaatgagctagctgtcaataaccaaatttgatgtatgtattgaattaaactttaatatgcttttattatcagaagactgcaattttcaaagccagtgcaatcctttatcaggcaatataagacattatgattcaaggaataatttatagctagagcagtaactaggcaagataaatttgctgtgagaccattaggaaaatttagttaattcactcataattacttctgaggatatttgtgccctgacctactcaattaaggcttgaacacctgccactttttccttgctattctgctgagaatccctggccaataaaatcatttcattgtaggaacatggctaggtgactagagtgattaaaagcgtatttcttacctcaactttgtgagaaattcttcttaaagttttttcaaaattgtttttccttattgttcaggccaaagctgtaagaatatgaattatttatttctaaattagtagatttcctaggtgcattgacatataaataatatttgctttaaaattttatgtttatacactaacaataatcaggatatataaaagggatcaaagataatgtatcagatggagtacgtgagcaccctgtgtattatgtatgcatgaactgaagcttgctgaatatttactatggtggacaattcttaatactagctaggctctcaagtggacaataagatgctattgcatgtttagtaagcagggtgttttatataatacatttgatttatttccttttattggcatcatttgaggattttcagtgctgagcagaatgggctggggcacgtggagtgcaatatcatcacccttattgtctccaaccagagtag

SEQ ID NO: 63104 - DNA, 1122 bp, Bovine  19866880807602
  misc_feature (1)..(1): n is a, c, g, or t
naggttgagcatctgctgggaattagcctagaccttttttctacacacctgttctgtagaagaatattgataatgaaagtgcctactagcttgtcctatgtaactaacaaaatccaagcctgtaatattccctgcccatatcattacaaaaggcagattctggtctgtgagatggcactaaagaaaacaaataaggtaaagtttgatgaaattctgtgggtagagttgtatggaatcgtaagccctctgggccagtccctctcactgggctttagtttccccatctgtaatgaggggaatggaactgatctctaaataaatttcaattcttatgtgtcagttatgttgactggggtatagtgttctttgtattttattttttgttttaaaatcatattcaatgcctagagggaaaaagacaaaagaaagaaaaatattagcaactgttttagaaacatggtatcaaagcctttgtattgctatgtttaaaaatactatctcagatagagctgagatgaatgttattaaaaatattcttttgactagaatagaggagacacaatttatttttaaatacgatttgtgtgtgtatgtgtgcatgttcatatcacaccaactccaggcatagactggacagtttaaaacacaactggagttaaaaatgtgtcaacctgtaggctgatcgccctaaagtttgtaacagtagcctcaaacgggtccttagtgctgaccagcagtcaaaatatattttcactcttctagaagactatttcgtattttattccttcactttaaattctgtcttccaacaccttctccccagtgctcactctcagctgatggttttgcttcctgttccctgagaagactgaagaaaacttccacagctcccatccaccccctggcatctgtacccatgtattctgacgtgctgcctgatactcaagacaaactaactgcattcccaccaaagcctatctcctttacttatgcaatagtttccattactgtcacctacttcagaccaataactttcccatgctctccttactgagtcaaagccagcctctctccacaccccacctcacccctagtgataactcccatcgccgtacaagcata

SEQ ID NO: 63105 - DNA, 1313 bp, Bovine  19866881113402
  misc_feature (1)..(1): n is a, c, g, or t
nctagactaaggcaagaatatcttaccagttctattcaacattgtactagatgctacaggaaaagcaacaaagtacgaaaaataaaagttatacatattaaaaaggaaggaataaaagtccttctgttctcagatggcatggtgttttatataaaaaatcatatggaataaaaaataaatagcttttagaactagcgagtttaccatgtttagtatatttataaaacagtaaaacaaataaaatagacataacataccaggaatttaaagattcaatattatcaagatgaaaagttttctcaagttaattctagattccactcaacctcattcaaaattctcatagtttttttttaaaatagaaactgataatcaaatcataaaatttatttggaaattcaaatggtctagaatagattaaagtgttttgaaaaagaaaatagatgggcatcttatactacataatttctgtgcctagtacatagaaggtgcaccatacatatttttaactaaataacatgttcccctacatgtaacgaagtcttaccataatcaaatgtcacattaacctttggcaggaaaaaatgaattatgaagatagcaaatgataacatcaggtgaagtaaaaaataaaataactaacagatcttaagttctattgagtttgatgtggacatatcatcaggtgtcagatgtctttgccatttgcagattaaaagcaaattttcccatagttgaaaatttcaactcatcactataccttttcacagctgctatcatgttatttctcttgtgaagtgtttaaaatggcagaatatataagcacttgagccatacagtcattaaagatattaagacaaaaataaatcattccatactgaaacctctaagcctgaaaaatctgtgacagataaaacagtgagtaaccttaggagaaatttattgctttacatactgaaaactaaacctaactgcctcataaataagtaagaaaaatatgtaagtgataatctgaggcctaaattaaagttgttaaactgatgatgctgaaatatacaggtgtccatatgagcttagttttgagaaacacaatttctccacttttattttatttagcaagattttcactgtgcctatctgctacaagtgtgataatttcagccagcagattattgcatataattttactaatgatttagaaattctccatgtagctaaaaagatatacttattgctgatctcagcctaccaaggttcccaatgaggcaaagtgctaggacttctagaaggggtcaacaataggctaaaaagta

SEQ ID NO: 63106 - DNA, 1182 bp, Bovine  19866881343024
  misc_feature (1)..(1): n is a, c, g, or t
naaataaagtctttaatgaagaaatagaaatctatgcctctaataacatttggttgggaatttagcacagaaggaagtcaatgaacaaaaccatcacatggcaattaattttgtacaaaatggtaatggtccaattagttaaatgaagaaaccattttgaaattctgtcatgatttaaaaatcaaggagttacttattaaacccttgctgggtgacaggctgctgcttgcagaaaccaagtagtttcagacataacattacatcgtgaatcatcaatcatcattaaaaaacacacatatacaaatattttcatggttaaaagaactgaacagagatattgaagcctagacactttcattttttagggctgcatggtggagaaagaaaggaatattaatattttaaatatctaccttgaactaaatgatatactaaattctttaaatatcctatttttttatatgttgaatatttgaaagctttaatggaaggagaatctatatcaaacacacttctaattaaacatataattttttaatttataaatattatataatttgtaaggattatatgataatttatagcctgaaacattaaaagtttatattttcttctaaaatgttggttaactgctttgggtatcagctaaaacattatctttctagagagacttcatttctggcagttgatttggaagaagaagaaaaggaatgaacatctaaatgtcagaaggtcctaaaattctgatgtatgatattaacccaaataatcattcacaaaaattaaactataataggctatatgctgctgctatgctcagttgtgtccaactcgttgccacaccatgaactatagacttgcaggctcctttgtctgtggaattttccaggcaagaacactgaagtgggttgccatttcttactccgataggctatacagaataaacttattttttctaatttatctttttcactgcattgagttgaaaattcagttaaaaaaaaaaaaaaatagtggatatttaagctccatttccaaatattacatttatatagttctaatgtgcatggattcatttgggggttttttttttctatattgaaataaaaatggctatctctgagttctctggcaataaaatatctccaaagaaaaacacaatataaaattcaaatatcattt

SEQ ID NO: 63107 - DNA, 2811 bp, Bovine  19866880153279
  misc_feature (1)..(1): n is a, c, g, or t
nttcacccagactcacgtccatctagtcagtgatgccatccagccatctcatcctctgtcatccccttctcctcctgcccccaatccctcccaacatcagagttttttccaatgagtcaactcttcccatgaggtagtcaaagtactggagtttcagctttagcatcattccttccaaagaacacccagggctgatctcctttagaatggactggttggatctccttgcagtccaagggactctcaagtcttctccaacaccacagttcaaaagcatcaattcttcagcgctcagccttcttcacagtccaactctcacatccatacatgaccacaggaaaaaccataggccttgactagacgaacctttgttggcaaagtaatgtctctgcttttgaatatgctatctaggttggtcataactttccttccaaggagtaagcgtctttttatttcatggctgcagtcaccatttgtagtgattttggagcccagaaaaataaagtctgacactgtttccactgtttccccatctatttcccatgaagtggtgggaccggatgccatgatctttgttgtttttttttttatctttgttttctgaatgttgagctctaagccaactttttcactctccactttcactttcatcaagaggctttttagtttcttcttcactttctgccataagggtggtacaggcactcaatttaaaacactttaaatccacacatttcattccacctccgctactgccaccctagtcctaaataacaacagctctttcccagagccactgcaatggcttctttttttcaatagactgatctctaggtgctcattctagctcttccctaatctactctccacacagcagcaagcggcactttctaaacataaatcagttcatgtcaactctgccatttatgatcttccattagcttttcatttcagtcagaataaaatccaaactccttaatatgacctacagatctttgcattcacgtcagtctccccacagagaaggcgatgggaccccacttcaggactcttgcctggaaaatctcatggacagaggagcctggtaggctcctaagagtcagacacgcctgaacgacttcactttgacttttcactttcatgcattggagaaggaaatggcaacctatttccgtgttcttgcatggagaatcccagggatgggggagcctggtgggctgccgtctatggggtcgaacagagtaggacatgactgaagcaacttgcagcagcagcagcatgtccattgcattggtggtgccatccagccatctcatcctctgatgccctcttctccttctgccctcaatctttcccagcttcaaggacttttccaatgagtcagctgtttgcaatggaatattactcagccataaaataatgaaataatgccatttgtagcaacatgaatggacctagagattatcagactaagtgaaatgaagaaagtcagaaagataaatactttatctttgttatatcacttacacgtggaataaaaatgtggcacaaatgaacttatctatgaaacagaaacagaatcatggacatggagtacagactggtggttgccaaaggggaggggattgaaggaaggatggagtgggaggttgagattagcagacgtaagctcttgtatacagaatggataaacaaggttctactgtatagcacaggaaactatttcaatatcctatgataagctaaagtggaaaaagaacataaaaatttatctatatgtataactgaatcattttgctgtacagcagtaattaacacagcattgtaaatcacctatacttcaataaaaaaaaaagactatatgatgcttggatataataactgctcccagtaaacagcaagcgttcttgtcattattccctctccttccttgagactaagaccaatgacaaaaccatttctaagcctgctaatgcctcagatttacagttcaattttctgactctcttttttatctatcacttgagtcattcaaggtgaataagtgtaggagcctctacattcagagatttggtccaaacccagcttgcttgcgtgctgttttccgcatgctggccgtgggtatgtgacagtctccccaggactgatgttcctttgctgtacagtgaggacgtgagcctcttgcttacaggtgactgtgcaggacacgtgtggaggggcctgctctgctctccacgaagttgggtccaagcacaggacggcataccctcggcaagtagggccttggattccttcatgccttccagtatcaccccagcacctgctcagtgaacactggccgaatggatggaaccagtgatgaaagcaggaaggagaaataatacccaggacagttgggacaatggtaaagcctacaggaagtaactttgagtgcagccacaggaagtccaagaatggggacactgtgtccatcttctttatctttccacagttctgggagaggctgacatcagggacctgtcagccacctgactcaggccctcctggaggtgggtggagaggcccagagggaagttgagtcactggacaaagggtgtggagaccttgaaagactgtccttattttcttctactttacatggcatcactgacatgagtttgagtaagctccaggagttggtgatggacagggaagcctggcatgctgcagtccatgtggttgcaaagagctggacatgactgagcagctaagctgaactgactaactctacatgagaatcttaactttacatttccacttaatggagggaaa

SEQ ID NO: 63108 - DNA, 1285 bp, Bovine  19866880182842
  misc_feature (1)..(1): n is a, c, g, or t
ncttctatgatgtactctgcatataagttaaataagcagggtgacaatatacagccttgatttggaaccagtctgttgttccatgtccagttcaaactgtcacttcctgacctgcatataggtttctcaagaggcaggtcaggtggtctggtattcccatctccttcagaattttccacagtttattgtgatccacacaatcaaaggctttgggatagtcaataaagcagaaatagatgtttttctggaactctcttgctttttccatgatccagcggatgttggcaatttgatctctggttcctctgcctattctaaaaccagcttgaacatctggaagttcatggttcacatatttctgaagcctggcttggagaattttgagcattactttactagcgtgtgagatgagtgtaattgtgcagtagtttaagcattctttggcattgcctttctttgggattggaatgaaaactgaccttttccagtcctgtggccactgctgagttttccaaatttgctgaaataccaagtgcagcactttcacaatatcatctttcagtatttgaaatagctcaactggaattccttaagactctacaaatcatttttagcttgtgagctgtataaaaatgggcaagatttggccttaatgcaatagtctatcaacaatataagctttcttatattgtgttgggttcataaaaataactaacgaaatattaaatttaccctttctttgaaagatatatttactggaaatataatttaatattgtgaaaaagtttttacaaaatttaacaaaggaattaggacttctagcacatcaacttttagttttattgaaatgcatgtcaccagttgtatcatatgaaataagtgtcagtgatcataaaatatatatatatatatttatacatatataaatacatatatatatacatatatatacggtgtaaaaaaaaaaaagtgctcaagtagctgcattaagcccttcaagaatatttctcatcaagtctgctgaaaaaaacctggtgcagctgtgaagagtggtatcactgtgtgtccccatgagaaagcagaagtctttaaaacaaagccacagagtggtacctacctccatgcctcccagtcggtctgcagacccttctcggtaggtgtttaggtatccatccaccagggtagttaggtcagacatcatttcatccaagagtaccaagcgaagagggagcaggtaggtagcttccaaagccaaaattttcagcaaagaaggtgaaagaggtcg

SEQ ID NO: 63109 - DNA, 4104 bp, Bovine  19866880354508
  misc_feature (1)..(1): n is a, c, g, or t
ntatggataaggtgggtagatgcttatgagatttagaatgcagtaatttgcatcaagcttattatatctttttgctctgattggcaggaatatatggtttacaggaagcatacctacatgaggcttgatggctcatctaagatctcagagagacgggacatggttgctgattttcaaaccaggtaatgttaatagaaattacagaaattgtcatttgatttttcctctagttgagatggtgactttcaaagaaataccagtatgtctcagattgttaagcaatcatgatacagttcctgccattctaagaggtagctccatctgcttatgatggttcagatctgggtggctgtgagagagagaggaaatgaatagttggtgattttggtattctaaatattctttcttactgaatcagtgcctgtttctttgcgcaataaaagaaataatttctgagtatgaaccaggatccttcttatgtgaataatatgcatgtaaaaaaaaaaagtccacaaggctatattcataaatgttaacagtggctatctctgggtattgacttatagttgattttcattttgttttgcttacctgttttattttgtataagtttaaagaaaaataccttctttttttcctgctttgcccctaatattgtagtggtacagtgaactctgacaaattgcaatagtgtgcagtcttcatctggcagctctcagttacagtacctatcctacccgataataagcctgtgaaatttcaaataccgcctgctggatgctgatggcctacagagccataattatcctaagtgcaggttctcattgtaataagcagggtctagttactgctctctccaaggagaaagccaggctgtactagtgacaggtctcctgaactcaacccttaattttccttgagaactaaggaatagactaggtcttaatgttctgtaagtcagaacaattctgaatttttggcctttaattgtatagtctgttactatttagcttttgaattcttggtaagaaaattaagcatatagccacttgtatttaggttataatttttaaatttcttttatttcagttttaaaacatgttttacttcaacataaaacaaatctgtaattcaacatagcatgcatgccctctgagaatttttgctattgcacagtccttcgttatacagcgtgggtaagaggtgcatcctgatgtgttagtttacagtgcatactcagaccaataactcctggttgaaactgcttctgaattcaggtgcctgtttgaccaacaatggaggggaagaacttctttggacctgttttagtttgttacctagcagaagcttttggccggtttgtgaattgattatttaagtgagacgtgtaataagcaaagtagtgcttcctagcactgcatattgttttgtgcctcccctcaccccagaaaaagtttaccagctgatctttatcttttcttgattttgaaatcgaatgaaacacatttcactatgtccttacctagtccaacgttcagagctccaactgacgagactcttacatatgaaatctacagactgtttccctggggtgcctatattctctccaggcgtatgtgttagaagaaaagtaatcagtctttcacctactattgtttgtggttttttcccccactaatatgtttgatattgtacatttgagaatctcctttatagaaaagctttttttttttttcaagtaacagttgtggccattttgtattatagaaaatgcctattgaggaagatttgagattatttgataaagtaaaaatcacccacagtctcatcactgttaacattttggtttatccctctaggctctgatacatgtgtgtgattatatttacatgttgataccatattgtacagatgattatgtgtccttatttcttccacttagcagtatttcataaagatcttcatatatcatccaaaaagtcattatagtcattatttttaatgacctatattcccttacattggatatactatctttctgttgttaaaatgttgaatatctttgtttataaagctttgtcgtcatttaaattattgtcttagtatggattcaaacaagagagattactgagtgaaggaatatgagtgtttaagactgtacatattttcatattactttatagaaaattctgctgatgttgataaccaaccagagctgtaatgtgttgatctgtaaacaatttgggcttctgagttatagagctacagcttttcttctagctgatccagttccctaaactggggatttcatggggtggggggggcggggcggggggggcgggaaaaatcagtagatgtatctatttactacttttaaaatctcttacttgtgattacttgggcaatcccagtagtttagctttaaaagaagggtattttcaccattaaattatactagatatacttagtaaatactttgttttttaaactttcctggaaaaccttacttgagtgtccaaattctgcaactaagaattacttagggagcaatgaattttatttagactcaaagtgagtaacaatcatattaacacttggcatttaataaacaactttggcatcccaaagtcagctgcatgcccagcactatttcagtattttggtgcaaagtggccttaactaaagaagaatgagagtgagatttaggcaaaataaaaaaacagacttaagtctttttcccttcctacatgatgagctagactagacgattagaattaggattatggctaggaaataatctctctctcatgtatagaatctgaactgtatttatgctgatcagaagcctgtgagatagatccctccaaatgggatctcaacttataaaagttctcaacttataaatttgaaaggctaacccaatatagagaaaaagacaggtgtttttgaaaacaagaaagcatccttgccaaatattttctttgttattaatgaaaagacatcaaaagaaaaaattgtagttttcaactggaaagccctgtggctcaaaggtcagccagagtaaacaagaactcctataaaaagccatttacattcccttcatacaagattgatttatgaggggtccttccaggaaagagtctgactgagactaaagactgtttggccaggatgtcctgactgggcaacattcagaacatgtgaccagtacgtgatcctagactaagccattcacaagggcttttctctggggtgccttggccttttgcttctcttcctcctatcccatgacatttcccaaatggactcccgccccccaccaccattacctgattattcgggtgactggaaaatataagcaaaagtaagagcatagtgtggattttttccttcttggtgagactataaataaagctccagggtctttaattctagctcttttccactcatcatcaagtctttgccagtcagctacatgcccagcactatttcagtattttggtgcaaagtggccttaactaaagaagaatgagagtgagatttaaccatgtctttgctacatgatttcataggctgcttcacagaccaccctgaagcctggtctctaagacccattccaatagagaccctgagttgagattcctttttagcctcatagagggcacccaaactatcatgttgccttctgggattctattttcttccttttagtcagcttccaaaacattaatttacattatcaatgctagatttattaagtagaaaggaacttctcagcagtgcaatttagatgttttggtctacatatgatccaacagtgtgatccgggatggacactaatttctttgacttttaataatctaagactcccataatccttatttttccattagagtatgatgaaattacactgggcacagccaaacattgctgcttaccatctcatcactaaaaggtatcttcttgctacataggtaacatccccagaagagcatttttcaccagtcatgtctctaaattttgttactaatttatttttaactagattcctttctctagtgtttttttctgtatatagtccctgtttgtgaagaattgctacat

SEQ ID NO: 63110 - DNA, 2592 bp, Bovine  19866880430359
  misc_feature (1)..(1): n is a, c, g, or t
nctccctcctagagagacctcccctcactacccatctaaagtaggaccacctccactgtgggcctctgcgattgtttccttcatgtcttcatgtcacctccatttgttccgcattttatctgccacccatcgatgccaacccccctctaccctctctatgcttcaggaagcagcagcaggttctatcttggtgctgataagactaagtcacctgacacatggtacgtggggacacagtggaccaagaggacctagcagagcatggtgcagggtggacgttccacataaggaagcctcttccccttcccactggcccttggatgagaacgcagggcagtgtgtactatgtttcctaaaggccacgatcaaaaccactaaaggaaaaaaacccaggagatttgctgtgtgcaggggaaagtgccaattatatggaaacgtacccaatgtggtaccctcccccagtgctgtcttgtgtgtgtgtgagacagacagacagacagactggcagggggttgtttcccggtttatgtcaaagccctctattgttaacagcccatctgagagttgactaggcttggctgggtgggtctcgactgggatttgtcatgaggtgaaagtcagaaggcagctggggctgaagatcagaaggctcagctgggctggtcgttcacgacggctttgctcccatctcagctgggccagtcggaggcagtctgagactcttggccaccccatgtgacaagcttgggcttcccacacaatgtggaggtctcaaggcagttggatttcttagacagtggttggcttctccagaacacacatgccaagagctctaggtggaaacttcaaggcttcttataacttgggaggtcataaagcatcaattccgctgaattctactgatcacaaggtgagccagaggccattccagattcaagggcatgaataccggaaggcatgggtgggaaggcattggttggcagcagtgggagcaaaaggcatcttttgagaccagttaccacatttgctgtaaaactgtggtcttaatgtctgtgtgcctcagtcttctctcctatggaaggggataacagttcctatctcacagaacttttgcaaggagcaaatgagtttaaaaaatatggaaaacacttaacaatgcaccatgtgccagctattatcactactcacaagagtaaggagcaaatcttttctctgattaatctctgtgtcccaaggtctatggaatattttatgatcatgggttgctctctgtgtgaagagaagtacccaaatctccactaaaaaaaaaaaagttgtttttcatttaaacatctaggtaggtttaaagtttggatagaagtagccctttctcatgatcaagtatgcatttaaaatatctacagaaagtaaaaatatcttgccgggcttagtgaatgccattctgagtcacggtgatgacgtgctcactttaggggcagaggcagccacacgcgtagtgtggaatttcccgtggcaccggcggaaacggaaccccgaatgtgtttgtcagcaaacttccccaaaacaaaaagaaaccaggatttcctgctggaggcccaagaagcaagtgatgtccaggacctcacaacccaacctcagactggcctcagctctggccagaaaacaggatctgccaacaaattagcggtcggccccaggccctggggatgcacacttttctattgttgccaaattccaacaaagctcagagacaagtcattgagctcaagctctaaatatgaaaatggcttcatgatctgagcctgtgggcatacgttctactctacagaattctcttccatgtcatcctctaccgcatatccctcagtgttcccattcagcctccaggataaacccagccagcagacacacacactccaccatatgcacaactcacattactttaaaggccctgagctcagacatcttcccgttcttacaacctcttcctgctgtctggacgggaagaacaatagtaagggcagacagattatctgtctgctgactgtgcaccagacaggtactgtggtaagagtgccacatcacctcactttatcctcaccccatcctgaaaggccctgattttgctggttggtgaactcacctggagcccatatgatcaagaagagctacttcataaggtcagacatacggatcaatgaaatagaattgagagtccagaaataaacctccacatttatacccaacagattttcaataaggatgccaagacaattcagtgggggagagtattgtcttttcaacaaatggtgccaggacaactagatatgtacatgcaagaaaatcaagcttgaccccaacctcacaccatatacaaaagttaacttaaaatggaacagtcacttattgtaagcgctaaaattataaacctcttagaacaataacaggagtaagttttcatgagtttgggttagggcaaaagcacaagcagtaaaaacttaaataggtaaattagacttcattaaaattacaaacttgaatttctcagactataccataaagaaagtaaaacccaatccagaaaatagacaa

SEQ ID NO: 63111 - DNA, 1808 bp, Bovine  19866880463205
  misc_feature (1)..(1): n is a, c, g, or t
nccgctcctcccagggtcctgcaggcgttcctcagtgagtgtgggcaggaggcttgcttctggtcctggctccgtcaacaactaacctgatctctcacaagccaggtcacctttttggatttagtttgtgcctcagtaacttgatattgactgaatgctggctacgtgccacagttgtaggcatcaggatagaggtgagaacaaaatacacaagtccctacctgcttggagcctgaaaattctaaaggccccatatgggaaggaatagaagtagcttgccaggtcactacagatagtgggtcacagacacacctctgccttggccttatttggcctcggtggtctctctgttctcttctcccattcccatcatttctcctggactgttgaaaagagccagttgggttaggcagtagtcatgacatgctaagagtgactgtccctgtgaggcaggcactgactcacgtggctggcacagggatcagtagaaaggcagtgttctttctctctagggatagaacctccttgtcattcggatacctccataacatttcatattcttgatgccagttgactgtgactgattttattgtaaatggacttctgaagcactggctaagtctacttgcttccagtgctcacactgatgcttaatcatggctgctctttagaacagcctggaaggttttttgttgttgtttgtgttatttcagtggctggttcctactcccagagattctaattcagttgatctagagtgctgccttgccattggaagttttgtaaatctttgtagatgattctaaagggtggccaagatggaggcccttggagataggcagtgtggagtctggagggattgatctgctggcgctgcagtcaacatggcccttcctgaagctgctctttttcatgcaggcacggcagtgaccagcgagtgttccgcctagagtttgtctcaaaccaagagttcactgagagcgaattcatgaagtggaaagaagcggtgagtgagtagacagcacctccctagcagttgttcatgaagatattgacagagcctctttcccaaattctttattataaacaacccttttattgcgttttggtccagatgttctctgctggcatgcagttgcccactctagatgaaatcaataagaaggaattatctattaaagaagctcttaattataaattcaatgaccaggacattgaagaggtaagaaacctcgtatcccagagtctggagactcatcaagagccaagtgttagagaagatcatgcctgtcttttctttcctgtattttgacatttttggctctaccactattgcatgaggaagagggaattctgttattactaccttagaatttatagttcatcaggattttcttgtacactgtcacttgaaatcacagcctaacaaagtagattcagggctcagggatctctgttcttctgctaggcttggtccttcaagagtttcctttctccaagacattttggtaaaatggtttgatctctgttctcttggacagaggatagccttacagtacaaggcccttgggctgctgctgtttattggtgcatgttcctttgcgctagccaggaagactctctgggaccctggaagcagcatagtaccccttggaatgaactcgttctgggtgtggggcatggcactgccataggaagagcagccctcttttaactatctgcttacctccacaatgggctcacctgtcctgcctacaaaagtagtttaggaatacctcactggctggtgtctcctctctggtacagat

SEQ ID NO: 63112 - DNA, 1160 bp, Bovine  19866880500432
  misc_feature (1)..(1): n is a, c, g, or t
nacggtttccctctcctgagtgggagtggagccaagctccaggctccgctcgcgaactgccgccgtctgctcccggcgcccgcaccaggcttggacgcgggcaagggaggggcgcgggacagcgagcttaggcaggggtaggaacgctgccctcctccgctttgctgctcctaattctggccggggagggtggagggaggtaaactgaggctgagagggtgggaccagtctgccgatctccgcccccggtagcctggatgttctggggccaggtttgaccctttgataacccaggctagggtatggtgcagtcattccccgtgcctgcccctccgggtcgtgtttctcccagtatagccgtcctgtcccccttgttttaatcaaggccaaatactttaaataactatccgcggtcaacgagaaggagttgctctagatccacgttatgcaagtgtccctgaagtggaggaagaggcgaagggcgccctcagcctctggtggctcggggcttgcccagaagggcggtgagagcagcggccgtgcgccggggcggccgggcctgcgggacctaggctccccccgcgctcggattggacgaggcgcgagagtcactgtaatggcttgcagtggctccgtgattcacttacccctgagacttacgttatcctcagggagacgtggtttgtgaaacaagaaggaaaaggaaaaagtgtcatagagcaggaacccaccccgacaccaggcagagggtgtggggagtccctctctcctccgtaggggtacccctgacccctgacatttctggtgtaaccctgttccctgaaaggaggcggtgccgcccgagggtttctgaggcggggaatgaggggcggtgagaggactcctccctccctacccccgaaaatccggagcagtaactgtgggcccaacgctccccccgttcaaatctctgagagctgagaggcgggcgctggaggcaggggagccacgagggcagcccccggcttcactcttcttgctaaaggcggaggaggacctgcggcccaggactgcttacacgtaggcagcccagctggggtcaagactccggggcccagtcgcagctgtgccctgggcgtcttcggccggcctctcccactctgggcctccccgtcaccccg

SEQ ID NO: 63113 - DNA, 664 bp, Bovine  19866880558100
  misc_feature (1)..(1): n is a, c, g, or t
ntatgcaggcgttaggtggggcttagtgtcagatttgggtttacattcaatgattttaggactggttcaagggattgaagttttgctttggttggatgctgtgaagaagtggggggcaattccacaattggacatttaataacttttatctgaaaggtagaaggaaaggtgtggagctaaagctgtaattgatagataaaggaatagcggcagtcagtcctgaaagatgagaaagggtgatgatctgtcttctctatggctgggacagtgatcttgtttttatctgtctcagaaccactgcacagcggtcttgtttttgtttcgctccatcgtggccgcagtcaccttgtctgccgttggtgttctgagccctggtccgtgcttgtcaggagagcacactggtccgggagctggtgctggggcggctcccagctgagagctgtcagagcagcgctttcctcccaagcagctgcttccaaacctgtgggtctggagagggctcccgtgctccttcctttgtggcttggcttctgttttcattccctcatttccacagctcctcactcaccgctttgcaccgtcttcttccccacagtcgcctcttctctggcgcggctaatgccagatatccagacaccatcgccttgaccttcgatcctactaa

SEQ ID NO: 63114 - DNA, 1130 bp, Bovine  19866880570150
  misc_feature (1)..(1): n is a, c, g, or t
ncgaggaagggatgcttgaccaagagaagaggagaagctctccaggaaaacagtgaaaactggaatctttggcatcaccattaaacgtccccgcttcacataggaattcagtgcttcaaactgctttaaatggctttgtttgtcctagagctgtgaatgaaggaaatacttagctgaagttgaatgacccttgaatagtctgactgagctcgagtgccggtgcatatctttagcacccaaaactagtagctgcctttgcgtgcctcagaccttgcctcttgcagatgcccgactcccggcactctttattgaagactacccgagatgattctaaaagcctgccttatggtaaccaacgtaagacctggtgtataaggcttcatgtgctgctctaatatatggtagctgtggtaacagtcatagagcttgtgattcatggataactaactctgaagcaaaatttgaagaccaaaagacatacgtattttgtggtggttgggggcaaagaaggaagtgacagagggcctttatgcagctcttacctcatatggcctgttgctttgaatcataactgttccttctatctaaagtagccttttcaccaaattctccacttatttttagatccaactctatatttactggagccacggggccttctcagactagccctaccaccttggaatcagtctctaattgttctttatgtatgtcttcatttcttaaggtcagggccatgttctttatttcctttacatcaccaggcttcatacagtgtaaggaatggtctaaatactaaatgaataaatggatgagaaaaattaaaagatctcaaatatagtgaaggtaaattccagaagaagagcaaatgttcaggaggaatttgtgacttctttagaaatcaaaattagaaataataaaatgttgaaaagaaatttaaaaaagaaatagagacacatcctatttaagtgtgaagggcattagagagaaagagaagtatatatatccagaaagtagtgctcattaaaagctttttaattcagaagagacctagttaaaaatatggttaaaatatggttaaaagccaaagtgagagccagtagagatggggatttaagttattagagaga

SEQ ID NO: 63115 - DNA, 726 bp, Bovine  19866880589084
  misc_feature (1)..(1): n is a, c, g, or t
nagggctgcggtgggggcccacctcccagcctagctctgggccagactaccatctcagtagggggaggggcatgcccccaccctcatttcagaccccttaaggtgagacaggggcctctgtgggctgagatcacattcctagcctctctgctctggttcctgcttccagagtcggagggtagagttcagcttgtggttcccgggtcctgtgagggtccacaggaggccttcgtgggcgctggctccttccgcttccattggccggcctgctgggagcaggagctgagtattcacctgcaggtaatgcccgcttcagactgggtgccatctctgtcttcaccctcagcttctcctggcacccccggtggtcaggcagcctgggaggtgtggggtgacctcggcctcctgtccccttcctgctgcttcttggtcactcctagggcaatctgtgaggctctgctgggacgcaagggtagagggtcttaggtcctcgtcatcctccctgcaggatgccccccaagagcagctgaaggtgcccctgagggctctgccctctggccaagtggtgcaactcgtcttccctacatcccaggtaatggtgaccggaggaagaaagccagatgcacattgtgggcacagtccttgaggacctgtcctgctgtagcggctcctgtccttggcccccgccctggacaagggccaggccaggggagaggggtcttcagg

SEQ ID NO: 63116 - DNA, 1317 bp, Bovine  19866880625514
  misc_feature (1)..(1): n is a, c, g, or t
ncccggataccaccaccagtggccataacagcaaccactgggatctagaagagaagacaacggggctcgaagaggccctagcgagaggccggtcaagccacaggaagaggtggtagcaatccaagggaccactcagctcacccacagctcaacctggtcaagatctaattggggctcctgggaccagttctagtcagacccaaagagggtctagtcggaagtgggcttgcaagggtcaggcctgtctggttttaagaactcagaaaaaatggacaggttccaggcttcatctccacacctaacccctaaggagtctgatgattacttttttgaagccccagggtcacctcaaaagtctcccacatagccactccgctccctctttcaggaagaggtcatttccctaggagcggccccagtctgacctgaacctccaaggactgccccaggccagcagggggccctgaggctgtacatctcactggtcagttacccagagcccagcctcaacacctggagcaggccgaggaccaagaacaatgagaaggcaggttagcccagtggggaagctcacaggctcctggtgactcaggccatgctctgcatttgatgcaatcaagctcctgacaacatcaaatgcaggaaggcagagcaggcttggcaccagtgctggtctggtgagggcacaaccggtgccagcatctgggacagccccctagtcccacgcagtccccagacctcatcttcccgcaggtctctgtccagatgcagggcctgctgcagggccttggccaccacctgcttcctcctgctcaggaaggcctgctcctcagcacagggcccacagcccagccgcacagccaggtccctgggtctggtgagaaggaagggaccatgaagcagctcctgggatcatcagagaacgaaactgggcctgccctgaaaagctcaccaccatccttctcacctctcttctccccaaccctcagcccacctctggtgtcctgactgaagggtgatgtgtagatgtgaggggagaaggcgaccccagaccctggtggggacatccttggggaagcagcgctgcagagccacagaccaggaaagcggtgggacccaacaccatcaatctgcttccacctcagcccctctccctcacccacccagaaacggctccagaggggggcagaaatgacgttccctcctcttcctggtgggagctggcctctcatcctgcggctggccagtgcaggtgactccgcccgtctcctgcagctcagctgaggcccgcccacaacggctgcccctcaaggggcg

SEQ ID NO: 63117 - DNA, 863 bp, Bovine  19866880628338
  misc_feature (1)..(1): n is a, c, g, or t
naggcaggtactgggccccagtctcccagtatgaaaatggacggagtcaagtgagcagtcccaggatgcccgggagatggaagctctatggggctttggctaagggcacgccccttaggaatggccccccgaaagccctcagtcaccagaccctcaaacactgaccactagggataggtagacaaaatgcccagacaggtggatacttcagtggtaacagcaagcaggattgctctgggattcagggctcacatgtggttctgagagtcagattccaggaaggatgagggtgttccaggcctctcttactttaataggggatgctgatgaggtaggtttcagggatggttaactcaaaggatgatattcaaagtgtgggaaggagaagcctgtggaagatgtggggatggctggaacaggtgacccccaagagagcaggaaagtgccagggggaggaaaagaaacgagaagcgaaggcagagaaatcctgaggccacaagagtgtggaccactatggagatgcaagaagagggagggctcttcaaaggggtggtgtctgaagaggcgggcaactgggggtgggcagggggcactgcagggttgggtttggggggaggggctggacagtcttcaggaagaaagagcagggctctgcctttgggtgtgtgaaagaccccgtcctcatggcctgtcatcaccccagtccagaccacagcggggaagctcagcacacactacctggtgcttcttaatgagcctgatggtggctgtctcatccccaccatagtcctggctgctcaccagcggccacttctcctccacccagtcctccagactctgatgcgtccaggaaacacggcaag

SEQ ID NO: 63118 - DNA, 863 bp, Bovine  19866880647072
  misc_feature (1)..(1): n is a, c, g, or t
ngcgtttgagaaatgctgattttgcagtctctgactgccttgctgtgccttcatctatgtgttcagggacttggtgggccattaggcttctccaaggcctccaagaacattgcacttacagaaaagggcacaaataaccattggtaatggttttctccagctccttagagactgttttctatgtgtgtacaaacatactgttttaacagaaatgtgattaccatgcacatttcctacagcttgactttaaaaatatatatatatatatttatttatttgcctgcatcataccttatttgcatcatgtgggacttttcattgcagggtgtgggctctctagttggcacgtgggcttctctctagttgtagtgcataggctcctcagcatgtgggctctggtgctcgggcttagttgccccacagcctgtgggatcttagtttccctgcaagggatcaaacctgagtccctgcattggaaagcggattcttaaccactggaccaccagggacatcccatacatcttgatttttggtttgttggtcctaaattttaggacctctggattttagcttcagccttatccattccttgttactggtaggcctctgaccaatgttaattgtctatattcttcagggtttctccctggcttagtgattctaagtgtctttcaacctgtagctccttcagaaaagttagcatgtgatacactcaggatgccttgaagacagttcttttcagcacttgataataactgataataactgactcatatcctagtctgacttactgtgacaagtccttactcacatcctatgcccagaaatagcacatatggttccagccagtcggccagtccctg

SEQ ID NO: 63119 - DNA, 3066 bp, Bovine  19866880660014
  misc_feature (1)..(1): n is a, c, g, or t
naacagccttttccgttgcaaagtaaactcgtcctggaaacaaaacaaggactccctgcacatgtttaattgaagtagctgttattgttaactgaagtgactatttttgaaaatatatatttaatacttgagtgaccccttagacaactgatgtttattttgagatgatttgtactccctataattagtaacagcccttttttaagacactcacagcactatttaagcaactaaacccttggacttgctaaaaattgttatgcttcttatttaaagcaattcacttcattaaaccaaatttatttcattttattgtggtaagaacacttaccatgtgatctaccctcttaaatttttaggtgtacagtattgttaactacagacagggttgtatagcagttctctagaatgtactcatctttccttgtggttcagctggtaaagaatccgcctgcaatgcaggagacctgggttcgatccctaggttgggaagatcctctggagaagggaaaggctacagtattctggcctggagaattccatggactgtatatagtccatggggttgcatagagtcagacatgactgagtaactttcactttcgctaggtaataactgaagctttatgccctttgcttagcagtttcccctcaccccagcccctggcagtcaccagtccacgctatgattccaagtctgttttagacacctcatgtaagtgaaataatgcagtatttgtccttctgtgactggcttatttcacttagtatagtgttctcagggctcacccttgtcacacattattccagtgtatatatacaccgcatttgttctattcattcatctgccaatgggcttttaggctgtctccaaatctcagctacgtggattatgcagcagtaaacatgagagtgctaacatcttctttaagatctcagttttaaattcttttggatagatacccaggagtaggattgcaggatcatacggtagttttgtttttaattttggaggggaataaatggatcccctggagaaaggcatggcgacccactccagtattcttgtctggagaaccccatgggcagaggggttctctgagtccatggggtcccaaagagtgagacccaactaaagcgatttagcacaaactagatatagatttactgagtacctactctgctcagtggtggatcctgggtgaacagtggtgaacagatgaggggtgaagtttccctttggcgtttctgtcacataatcaccaaataaatatatcattatagagagtaagtgctccacaagaaaaaccactggtgctggagaacagatcacaggggaacggatttagggagtgtcaggtgtgctgcagtgggcttttggactccagacatgatgatgacagtctcatctagagcacgggctgtggcagagaacagacccgttcgcgaggcagggacatgctgctctgcttgggtgggggaggcctcctgagggcatgggtggttggagatgggagagagggaaggcactccaggcagaagggaagttctgggcaaagtcctgggcttggctggctggtcagggggccttgtccaccccaagaatggcactagcagcaagggcagagagaaccattatcttgcattctttcattgacacacgtcttgattaaaactcacgtaataggaaacttggctttgggaagtaactgaagcatttttttctgttgtgctattaaaaatagtcagtcaaatttgcttccttggggtgcctgccctgtgtttacctgagcctggggccactgtcctgacctcatatgccatttcctggtaaggcttgtcagcaaggacggagaccgtggtctccacagggctgtgacggaagccccctgattgggtggaaagggccccttccttcctgcctcctcctcgttcccagaatgtggaaccaggaatgccaagctgggatcttccacaggacaaagtctctttcccagctccaaaagccatatagctgtggggtccttttgcaaaaagagaagctgtacttttaaacaattgaactgattacacctctgttttgttccagactattacaagttccactggaacatcttacagaattgaaatgtctgtcatcggcacctctcctctaggggcctggttttagttcaggttccactacctgctggctgtgtaaccttgggcaggtgtctaaaatcattaagcctcagtttctacatctgtggacgtgctcagtcatgtccaactcttggaactcaatagtccccatagcctatcgccctccaggctcctctgtgcatggaattttccaggcaagaatactggagtgggttgccgtttcgtcctccaggagatctttctgacccagggatcaaacctgagtctcttgtatctccttcattggcaggcgattctttactaactgcaccacctgggaagctcctatatataatagactgataacatatttaaaatatattgagtaccgtggggacagttctattattatattgaattttatggtctccacacacactcatacatgtgcatgtatataccctacacccacaggcatgctcacctgggggtgtgtactcacatgcccagatctgtatgccctgggtcttatttcattctgtgcagctggaactgattctcataaactcagagtactctcgtccctggtctgtcacgatgaaagactttaagcacctcagccatgaggcaagacactgtgaaattcacgactctcaaagtttcagtggacaagccaaattttacattaacttttgtggttaagactgttggaactgttgctaaatccaactgcatacatggccagattcatgacatagttcccttgaacagctttcaacttcctggtccactcagcagtgtgtggagatgtatatcttcaaacaagttcagcaaccttggattttttttccttttttcccttctccctttctttcttctttgcagccttctgtccatcctttctttttctttcatatttatttttactttttaagtcagttttat

SEQ ID NO: 63120 - DNA, 1998 bp, Bovine  19866880669100
  misc_feature (1)..(1): n is a, c, g, or t
nctggcaattgtgtgtcctgctgccagcccccataatatgcacacaagtgaaggtaggcttcgttagagtcttctggcaccatgcaagtctcaagtgaaaatcataaagcagtatgataggccccacagagacatacttcgtgccacagtgtagcagagaacacactgttatctgtattttcccctcagataaagatgtgcccatttaacaaggggccatattttgttttccatgtcctattcagaattaaaaagagtacttacgctaaagttaggtcattacttagaaattaattttccgcttttgctcttaaagaacacatcaaactcagatatagagaaactgtctcacttaaaatgaaagggcacagtgcttatagaccaattgctaagattacaaggattctattttcacagatggaaatacagaaaaaaactgaaaacaatggttttccagagctttccacaagggtgctggcagctctcatgatttcaggaaatgatgatatagatactgcagttgcaaattaacatctagcggaggagtttttggaaacttcctgtttgggagattcttcatcaatagccattcaaagctctctaagcatttaatagagtacagtgtttaaaacttaaaaaaaaacacacatcactttttccaaaacaactctttatgtttagattcttctgtatattttaaactgcaaaatctgaaatgccctcaatttctatgaattagctggctcactagagttgtagtgagccagttaactcatataatacctaagcagaccattaccatgacaacagtttctcagagactgggacaggaaatgaaatggatgctgtaccctttctgccaattaccatttttaacatattatttaactggatatagtataaaatctgttccgcctccccgaaagatggctcaatggtatatttcctacagattctggtttttgtctttagtcttcaaagcaaaataagattaaaaagaaaaaaaaaaagattcatgtgtatgagacttgccctctaacccctgcaaaactgtacaagaaaggaggtccagtgagagcccacactggggagggaggtatgtgagaatgaattcacaaaagttttgagctaaatactattccttcttgaactcatcaccagtaaagcagggtaaagaacaatgagggttagtggcttctgtatcacaagcatcgtaagaaaaggatgatcagaaaagcacttacgtcaagcaagagattttaaaaggccctaactttgttcaaaatactcctaaagtgtcatctcatctgtgttcttagcctagtttttagtttcttgatgtttttgtatacccccccaaagccagtattatgagaatggtacttctttgaactctgtaacacaggattcaaatttaacattcactgctgggtaagaagagttttacaggtatactcagtgggaaaaaaaagagcttcccactgttaaaattcattcacatccacgagtggcaagaaagacgggaggattggattagactgctgaatataacttaggtaatatgtgatttaaagatagactatcaagaaaaagatgacaacgtgtagtaagtcaacattcattaacttcctcctcagaggaataagaagaaagcattcaccttgatctgatgataggaagctgtatttaggagacaggctgctggaacaatacctgccactatttataacataaaatatacgaaggcacagaagagaacaaaataaagggttttctgcaacaagaggataaaagtgaatatggaaaaaattaactaaaagttaatctgatagctccaaaggaattttattcagagttattatctgagggcttccttggtggctcagtggtgggagagtctgcctgctaatacaggagacagggtttgacccctgatctgggaggatcccacatgccatggtgctactaagcctgtgcaccacaatttctgagcctgtg

SEQ ID NO: 63121 - DNA, 787 bp, Bovine  19866880710664
  misc_feature (1)..(1): n is a, c, g, or t
nggcgaggacctggaggacaagcggaacatcctggagttcctgcagagagtggacactgcagaggcctggatccaggagatggtgagaccctgctgggtagggacagagctggcagtggggctgtggggctggcagatggaggagggagccccggcaggaagttccccaagtcaccgcctgccccaccactgcccctagcagctggatgcctgggaactaggtgcccccagggctgggtgctcagagtacagccttcccaacccatggcccccacaggaggtgatggtgaatgtcagcgacctgggccaggaccgtgagcactgccagcagctccacaggcagctccgcaagctccgaggagtctgggccggggtaaggtgccctgcatcaggaaatagtgacccagtgtgggctctggagccagaggcgggtcctcatgtcagctcagtgcttactacctgcgcttgcttagacaggctctctcaccttgccaagtcttagtttcttcatctttaaagtggggatactgcttccttcataggtaagagagcatatatgaatggtggtggttacaggaatctatacatatgataaaactgcctagagtgatactttcccacacatacacagatgtgtgcgagtaaaaactgctgaactctgaataaaatctgtagtgtagttaatagttataccagtcaatgccctggttttcatattgcactatagttatataagctgttaccatcaggggaagctgggggagggtacatgggccttcattataca

SEQ ID NO: 63122 - DNA, 699 bp, Bovine  19866880816162
  misc_feature (1)..(1): n is a, c, g, or t
ncaagttagagaaacaccctcttcctcgcccagtcctccagaaagactccgtcatcaacaattcattaagacactcgtctccattggctggcgcctccactcgcgccggcagcggtccaatgagaaaggacttgagagacccttctgaataatgaacacgctcccgtgacgtagcgaccggagactggctgagatggcgcgaggcggggccagctcgggcggcggcgagggctgttggggctgctcagttccagctggggagggtcgagcccggagtggggtcggagctcgggaccggcactgagagggcgagcgcggggcacagacgagcgggcaggcggcaggatgttcagctggttagggcggcaggcgggcgggcgcggaggtacgggcgcggacccggtgcagaccgtgacgggtggcctgcgctcactctaccagcgcaaggtgctgccgctggaggaggcgtatcgtttccacgagttccactcgccggcgctggaggacgccgactttgagaacaagcccatgatcctgctggtgggccagtacagcaccggcaagaccaccttatcaggtaacccttccccgccccctccgccctcctccctgcacacctgtccccgtcacctaggtggaggccgtcgtcctccccacgtgcgcgcctgttgtcaccagcctcccgccagcttcctgcag

SEQ ID NO: 63123 - DNA, 1898 bp, Bovine  19866880825513
  misc_feature (1)..(1): n is a, c, g, or t
nctgtgtgtatacatttgagtgtcagtatgtaatgggggaaaaatgtgggggagggagggagggtataaggtggacagggggagagagagggcttgagagagagatcagggcttctcacgcaaaactggaagcagcaggactgattatatgaccaaaactgcagccaatatgatcatgacttaagtttacatgcaaggctgttagaagctgaagaaaatctatctaactttgggagaagtaattggcatgatttttgttccagtgtcttaagccaaattcccaataaaatcccctcttatccaacttgaaaatttattttaaagtactttaaccaacaaatctggatgctggtcttttcccacttgagaccacaaactgctcccatttgaaacaactaagattttggcaatgtccatatgaagactctgatgctgggaggggttgggggcaggaggagaaggggacgacagaggatgagatggctggatggcatcactgactcgatggacgtgagtctgagtgaactctgggagttggtgagggacagggaggcctggtgtgctgcggttcatggggtcgcaaagagtcagacatgactgagcgactgatctgatctgatctgatatgcttttcatagaagctgtcatttttctatataaaatgctaataatcccactcacaaagcacttgaaaatattaatgtcatatgagacatactttaatactcactcgaatccatttttgtctcacttccagaaaggagagatgtttaggggctattttaaggtgtctgattaaactttcctgtaaagtactaatgcagtttggaagaaagcctcccgtttccacggaaaattgaaggacatctgctacctgtggcattcaaaaagaacaaacagaccaattcatagaatatattacagagagctatctcatgacagaaatatatttggagaaatgtcattaaataccatttttcccaaggacccatgtgatagacaatgccatcagaaaattttaagttgttaggttaacttattcttagaaattagaaacaaaaaaaggaccatgcaactttaatgtgtccctattttctctttcacttcttttaattgcctgcgttatggttatttattactctttggtgccttcaatgaatggggaaaggagaataaaattaaaggatcacttatacttattagcaactctggtaaagttttggtaaggaaagctaataaaattaagaattataatcattatttatctgtgtgtggtatgctaaataatggcccctgaagatatctacatcctaatttctagacctgtgaatattaccataaatggcaaaatggattttgcatctgttattagttaaggatactgagatagggagatgaatttgaattatctgggtgggccctaaacataatcacaaatgttcttcttataagatgagacagagggagattttattacaggcagaggagaaggtgacgtgatgacgaaagaggagatttgagtgatatacttggaagatggaaggagtcacaaaccaaagtacaggcgaaagctgaaaaggcaaggaaacagattgttctctcagagcctccagaagaaaccagccctgaggacaccttggctttcacctggtgaaaatgatttcagatgtctgacctccagaactgtaggagagtaaatttatgttttaagccacaaagtttatggtgattagttacaatagcaacagaaaactaatacactgttaaaggaagacaaattgaaataattctgaattcctgcttcttgaactatgaaaatctgaaaagaaaaatatggaaagacatgctagggattttctggtggtccagtgggttaagacttcgtcttccaatgcagg

SEQ ID NO: 63124 - DNA, 767 bp, Bovine  19866880830743
  misc_feature (1)..(1): n is a, c, g, or t
ntccctgatggtggctgccttcatcagggccgccacccaggtcagagaccaccccagcccagtgccatgcactcgggccacgtctcccagttccagatgatgtccaccttcgcagcttgttcaggcctcgccacagccctgtgatgaggacactgaagtttggagagttaaatggctttctgagaggccatgctggagcctagacgtttgattcgaagaccctgtgtgtggagacccctctgcttcctaagctcttgcagacccagggcaaagagaggcactgggagggagcagatcagtccagtgtcccggggccagcgagcctcacctccaaaatgaggtcccacccaaggtccctgcccagcccttcctgtggctggggggccagctgagctggggctgtcttcctgggcccaggctgctggatcttatttaccaggcactgcccagccctcccctcgggccagcagtccactgcctgggcacagctgagggcaagcgtgtgggacatctctgtggaccatcagcattgtgagactcacgtccccacccccaccaggccaaggactggatccaggagcaactccagcaactgaaggagccagtcccttctggggacctgaaagctaagttgagacacctgcagaaacaccaggccttttgagggcttgaggtccaggcccatgaggaaatcataacctctgttgtcaaggtaacagccaggccctcagcccccacgctgacccacagtggggattccaagatgg

SEQ ID NO: 63125 - DNA, 2536 bp, Bovine  19866880917728
  misc_feature (1)..(1): n is a, c, g, or t
ncatgcttttactttgactcttctaaactgttctcatgttcttcaagtccccagtttctctttttccttcctttaccaccacatcttcttttaatcttggcaaatcacctcactcccttactacctcccaggtagaaatataagctctgtacatttattacccatgggatcttactgaagttatttcccttctcagtgatttttgcttccttcactgtaaaatggggataaccacagtacctatcttatgaggtggttgtgaggattaaataaattaatatataagaactgtttaggcctataccatggtgaatgcttagtaaatattagctcttaatgtttctgagaacacagaggccaatgacgtgaattccatcatccaaactcctcttcacctgaaaaaaaactctgtcactctctaccactgcctccctcagagcaaaaacatgtcttattttctaagtctgtgctctccacctgtgtcttgattccatcccctcccatttactcaagggaactttgttgaatgaattcttttctccttcatagtttaaattgattcctttttcctggctcctgtttctcattctcaaacacactcaggtctctcctattttgaaaaaggcctctgtatgacccccatgtctttgagttactgtcccattttcctcctcctttcactgccaaatactctgtgcctccatgtcttcgtgactcactttctcgttattcctctgccatctggctccctctgccaccccccactctcacatggctgtgtctgtggtcacccatctccaaattcaaaggacttttcttgatttctgtcctctttagccactttgcaatggtcagtattgctggctgtcatctactctgtgaaatcctctcctctctcacactctcctctgagtgcaagtctgttgtgctgctgcttctccttccctgtgtctcctttgttcaataaatacccttacaggttccatttttttctttctactctttggttgtggacatggagagggttcaccatgcaacctactgatctctactcttactctttgatctcttgcaggtcttgtgccttcccatcactcctttaagtatggcacctgcctcactttttgtactcacctctttagcctcatgcctcatgctcggagaaggcaatggcaccccactccagtactcttgcctggaaaatcccatggatggaggagcctggtaggctgcagtccatggggtcgctcagagtcggacacgactgagtgacttcgctttcacttttcactttcatgctttggagaaggaaatggcaacccactccagtgttcttgcctggagaatctcagggacggaggagcctggtggctgccatctatggggtcacacacagtcggacacgactgaaaatgacttagcatagcatagcatgcctcatgcttgctctcattctctgtttcggccactctggctttcttttgagttcttgaaggtgctggggcctttctgacatgggatttttgttattgctgttgtttaatttgcattcatcttcatctttttttttttttaaccctcattgttactgtaatttttttctattttgaagattgagatataattcacataccacaaaattttatcctcttaaagtatatgattcagtaggctttagtatatttacgaagttgtgcaacagttaccactatttcattccagaacattttcatcacctcaaaaagaaatcctatacccattaacaggccctctctttctcccttgtctccatcagtccctggcaaccactaatctactttctgtctctgtgttgtgggtttttgtgcatgctggtccttttgcctagaacctctcctctactttattccctagtcagcttctgtttttcctcagtgatcagtgccagtgtccttgagctggtcaattcctcctacatgctttcacaggaatatgtacctcttttgcagaatttgttataaattgcagttttattctctgtgtgtggagtcatttataaatgcaccaaattgtacatttccattaacaccagattcacttgaatgtaatagtatgatacccaactaacacaaaaatgcatatttttctccccacatcaattcctccttcatacttccccatttgatgatacttcctcattgtctcaagcacacaggttcagtttcttgaagaactttgattcccttctctttcgtcttcaacatccagttctcttcaaatcctcaagttgagtggattcttttgcaagtccttgcatgccagcctttagtagtgtccttaatgctcagtaaacactgcctgataacgaataccttatggagctatctgcaataaaggaaatggttgtggccatgatgttgagtgagtcttagagactgccaaaggggcgaaagagagaggtgaacgcagagagtggagggtggcattggatggagactatcctatactacagagaccggagaaaagcagtaaagtactaagagaagcaaaaggagaa

SEQ ID NO: 63126 - DNA, 1363 bp, Bovine  19866880933908
  misc_feature (1)..(1): n is a, c, g, or t
nacatacttggcatctccttcttcaggaagctgatgatgtaggcatgtacctgaaggggtatatgtcagtgaggacgtgccatttagaacagagatgcaaacaagatggcatctttatgcatcgtaacacataacaggcaccccaagggccatggtccttgggacaggaggagggtgagaacctggtggaaagggatgggggtgctgggtgggaaacagcctggttctggtgactaacctaagagaaaggttcaccagggctggtatataggagcaccaggaaatgaagctgaggctgatggaaatggctgatgggcatggaaatctgtgcccagtgaacagtgagatgaggactcccataacttcccttcagacagtttagatctcaagatcactgaggtcatttcggcacaagaccagctgcctaggaccaggctggaaaacagaagtgccctgtgggagagggagacctagcacatgatgggggagccccagaaaccttggtcacttagggttagctggcctggcactgttacccaaagggtggtgaattccgatgggagggctctgcttggcttgtgtcacctccttccctaaaatttccacccttctactgatttccaactttaggatgttaaaaaacgctcataaggttctctttgtatatctagaattctacagagtaatttagaagccaagaaaataaataagaaaagatgagaaacaaggcagtgattacaaaaagaaaatgactatgtagctatggaaaattctattaaagaaaacagatgcctgctataatcttgtggaagaatgaaaattgaatagagggggtaagcagatacattccatggctcagttgagggcctctgtgtatggatatacaccaggcacagccaaaaacattttgctaagatttgaacactaaagtgcgtgcatagtgcaaatgctgacatgtttggaccagacaacgctaacttctcctcctgtataaaggtcattttaacataagcacaccctgtgctgcctggctatttctgcaagtatgactgggacagatggctggatagcatcaccgactcaatggacatgaatttgaacaaacgctgggagacagtggaagacagggaagcctgatgtgctgtagtccatggggtcataaagagttggacacaacctaggaactgaacaacaacagcagcaacaatagattgggagagatgcttttacaccttcctgtcactggtaaacttacttacttttcaaattaaaacaacttaaaatattcgcacagttcttcaagataactagagaaatccaaggtttgggaatccttttatttagaatcatgggctttaactgc

SEQ ID NO: 63127 - DNA, 2783 bp, Bovine  19866880947363
  misc_feature (1)..(1): n is a, c, g, or t
nccagacaagtccaggcctgctgccatcaccaagagcccagcattcccacaggatccgcctcctacgactctccatcctccagaaggcagaaacaaatgaatcctgggatgagcaaggaatgcagaagaggcacacgcagggagagcacagaaggtctgagctgtgaccctgcacctaaaatttcctctttcagaccaagtaaaatcagaaggtgactcacagaggcacaccaaaggtcctcaagtcttgctcacacatcaccctgtgtgccttttgaacactataattccacaacccaacattccctattccctctcactgcctattgcttatactttttccaaagcacacatcaacttgtaatattccatacaattttctcttggggaggcaatagggtctgtcttcatcactagactgccagctctctgacagtaacacttgtttacttcgtttactgttaaatcccaaaggcctagaaaattgacactccgtaaatatttgtgaataaatctttaagtcattagctaccagatctcaaagaacctaactcctgaagagcctcctgagtagcagaccccggggcaggtccacagttctccccgaccttaggcttctaggactcactgatgctggagggcagtgtgatgatggaaagaataggaaaactggggtcaggcagacctgtctgctaacaaactgtgtgatcttgggcatatttcttcacttctctgaacctcagtttcctcatctataagacaagaataataatattctatgtctcaagaattgttgtgagaattgaagaaaaaaatatgcaaaataaccagcagggcactcctagctatcttcttgacaggttccctggggcaccaataacaaggaaatggctatccaggggtcagcagtggcaacaggaaccccaactacagtctcccatccaggacctgcagattagtgactcatcagggtcctcctccagatgtggaattacaaactgtccctccagattcactcccaaaggggaaatgttatggctttaattgttctaagagatgagtctaggatgttgcctaggacatccttgattgtagtcctctttagatacctggcatccttccaaataagtaacattcctaggccaaatcatgagacccattggtctctgtttccgagatgctctctgagacccacccatccactcaaaggaatgggaaaagaaaattggccataataacccagtaaataacatggtacatgtctctctgcccaggggaatctgaacatattcccttccaggacaagaagcagatctcacaggactcatgactcaagtccaaaaggcagggtctgagccccttcctctcactcaccaggctctagccaccatggctgctgtttagctactcaaacaagtgaatcaatgcatcctttcttgggacctttgtagttgaggtctccacctgaaagcacagatcttcacacagggattcctctttgtcgcccagacaacagctcaaaggtcagctcccactgagccctgaccagctgatcttcaagtagccctactcccacccagctccaggatgttcacgtactctcctttccatcactccttcagaacactgaccagtctcatgatattatcttgctcatttgtttgtttacatgcttactatctgcttacccactcccctcccccaattgccttaaacccggaagaagcggtgacactgtccgtcttagtcactgctgtataccctgcggctagaagagtatacagattaggttttcagcaagtatctgccacacacgattgactgtatggatgaacaaggtcttctgggaagacctacagggccctgtttctggagtgagatctgttgggaagccaggagaaagggcacggaggggatgggtgtctacgggtggcgtcacgcatgactcacagccatcagggcaccgagtccaggcgtcctctttccttagctccacccagtctgtccaccactccacacgctccctggcgaccgccccgcacccagtgtttaccacagggaggaagaaggcagcagcgtgctccttcagctcatctgccactagaacacgggccaggaggagattctgtggcttcacatgcagtccaaagccctggagctgggtctctcagcatcgattccaacaggcactgagtaaatggagggcctcctcaggagagcgggctttcccctcctccccccgacgtaaaccaccaagaggtcctttcctggctgccagatagggcccctcactgttccaggacacctcccactccagtagcaggtctgcacagaggctctgcactcaggccaggtcctgcactctggcattaagggtcgagagaaatccattctccaaactgactgactccacagcagcaacaggggctgtgctgggctctaaaggtcctgaaactctaccagggcagctagggaaggagtccaagtcaattatgggttttcaactaaattgaggggcttaaaatgtgacaggtgaggggttgggtttcctgtggggaaaagagcaaagggagagctctggagaagagacgcaagagccactaaaactcaagggtccttgcccagaggctttaaaccctgcccctgcctcgaacacatctctctccaccccgccctcccttgagctgtttcatttcctttcagaaaagctttgttttggtttgatatttgcctctaggcctctgggagaatttttggagctttggttctcttcttggttctag

SEQ ID NO: 63128 - DNA, 949 bp, Bovine  19866880985854
  misc_feature (1)..(1): n is a, c, g, or t
nccggcacatcctggggtgcctgtggtcctgggtgtgctgacagccctggtgacggctgctgccctggccctcatcctgcttcgaaagaggaggaaggagacacggtttgggtaagggctggggacatggagagaaaagtaggcactgactgaagaccgtggagctgactccaagtcctgggtctccttttaggcaagcctttgacagcgtcatggcccggggtgagccagctgttcacttccgggcagcacggtccttcaatcgggaaaggcctgagcgcatcgaggccacacgtgagtgagtggtggggagtccaacgaggaagggatgggctgtcttgaacctgcacctgcctttctcttactgatttgaccaataggtttgaaccttgctgagtcctaggcacaccatggaaaaaacatgtagacctatcctgaggtctctggcccagctgtgggggagctaaataaagctcatctctgctttgagggtggcttctggggtggaggaggcagactgagttttggatcaggaccagagaggtcgctccctttcttatggcctcctccccgcagtggacagcttgggcatcagcgacgagctgaaggacaagctggaagacgtgctgatcccggagcagcagttcaccctgggcccggatgttaggcaaaggtgtgtggggctgagcagggactggcctgagctgccagggctgggtgtgtctgctagcttccatgtcactctggggctgtggatgtaggtcagctcctatgaacaggatatgctcataaactcctggctgctggacatttaggggaatggaggctggggtcgagaaaggctgaggtgtcatcactcctagcttactttgttttgctatgaatgagggagcctccttcagtggccccagaaagtgatactgtgtccctatgaagggtcactggggag

SEQ ID NO: 63129 - DNA, 3330 bp, Bovine  19866881088332
  misc_feature (1)..(1): n is a, c, g, or t
ncttctcttgctgcggagccaggctctagggcacacaggcttcagtagttgtggcatctgggctcaggagttgtggttcccaggctttaaagcacaggctcagtaattgtggcacacaggcttagttgctgtgtggcatgtgtgatcttcccagatcaggggttaacccatgtctcctgcgttggcaggtggattctttaccgctgagccactagggaagcccactgctgctgctttttgttcctccagtctaggtgtagtagagtcttcctgctgttaataatctccgggaccgcctcaccatccactcttggcttatctccattagctatgtaataaattttctatattaaattccctctgtttcatatacttagagtgctttctgcttttctggttagatcctgactgctataggggtataccacatagtttttgaaatatattctaagagggtacatgtagtgcttactgcaatcatctatgatttctcccagagacagtaaattatatttcatggatttgtgtgatcatatctgtgtcctgccacccatgtaatgcctggaggtataagagaaacttgttttcagagatgcagttggaattatatgaggataatttgcaaggatgttgcaataccaagaaaatggtattgaatatattaatgaattataactttaggaagggaagtggtctttggagtgatatctaataaaattagacaaaactttataaccaaggagggattagaaaattaaagtcaagcagatgactaaaaagctgaatgtccattgaaaatttcccttcagtaaggagggaaaaaggcccagtcatgttgaactgtaaacagcagtactatcatatgactcactgaaaatgtttaaaaaacaacatggaaatcaaagcattgcccattaataaatagtgcttctcattatattacatgggttaaatattctgtttattgtaatttttctaaaatctcaacagtgtatcattttattttctttcatttccatctgtagtgcaggtgctaaataagtaataggaattagggaagaatgaggaataaatacatgaatttcaaaaaatgttcctggaaatcatcatgcaacaatgatctcaaccttaaataaaatagtggaataaatatttaaaaagaaaaaatgtgcaagcctttaaaggatgaaggaattctgactaatcaacagcagtgattaattataaatagtggacattgccagattggcgtgagtggttttctggggggtttttggattttaaattccaggaacaaaaagaaaagaagtactagatattctagattgggcagtcagtaaagcattttaagctagcatcttatgaaatctcaattacgaaattaatttatagtgatttccaggtgagagtgataactggaaactttaaaagaaggtttagaggaattaatgagcaatggcagggaattttttacaattttttttattgtgaaataagcacttatataatagaaatgcattgtttaaagaaaaatctgaaatgatcacccaggtcaagaattagcccattgccagtagcatagaaccttaccttgtttccatttcccattacaactccccatccccagagataactactattctgaattttatgtcaatcatgtccttgcttttcttgacagtgtcaccctctacctatgaattctctagcaggcaagtagctttgcctgtttttgaactttatatatatgaaatcacattggatatattcttttgtatatttttttttggggggggagggggctgtgggatctcagtttactaaccagggactaaaccccaggtcactgcagtgaaagcactgaatccgaactactagatcaccaggaaactcccatgtatctggcttctttttattcaatattattttgttgttatattgtgtgagtgtatgtctcattttcattgctatatgatatcccattttggtatataccagaatttagctatcccattgttgtgtattaattttgttgtagtaaacaaccctttaatttcactggcttacaataacaaactcttgtgtcatgctcttgatattgtaaactgtatcagctttggttcttttctatgtgttttttcattccaagacacagaataaagcagcaaactctgtttaggacatgcctttttgtggaagagataaaagcaatagctctgaaagaaactcacgagtctaatacatgtctactctgcctatagtttattggccaaagcatatctcatgtccaaaccaaaagctaattaggtggtatgcataacccttctacaggaggcatgaaggtcacatggtggggaaagatgtatagttttctaaataggaaatatggtataattcatcaccactatcaatgttcttatatctggttatcacaaaccgccttactgtgagtttccttgtatatgtagccttgtacaattgagcatgaatttcttcagcaatggaattgctagttaagtgtatttttttaactttttattttatactgtagtatagtcaattaagaatgttctaatagtttcaagtggtcaacaaaaggactcagtcaatcatacatatacatatatccactctcctccaaactcccctcctatccaggctgtcacatatcattgagcagagttccctgtgctagacactagacctttggttggttatccattttaagtacagcacgttgatcccaaactccctaactatcctttgccccaatcctgctctggaaaccataatcttgttctctaagtccctgagtctgtttctgttttgtaaattaagttcatttgtattatttcttttttagattctgcatgtaaatatcacatgatatttctcctctgacttacttctctcactatgacaatctctaggtccatccacattgcagcaaatggcattatttcattttttgtaaatgactgagttatattccatgatataaatgtgctgctgctgctgctgctgctgctaagtcacttcagttgtgtcccactctgtgcgatcccatagacggaagcccacagacagaagcccaccaggctaccgtccccaggattctccaagcaagaacactggagtgggttgccatttccctctccaatgcatgaaagagaaaagtgaaagtgaagtcgctcagtcgtgtctgactcttagcgaccccatggactgcggcctaccaggctcctccgttcatgggatcttccaggcaagagtactggagtggggtgccattgccttctccgataaatgtactacatcttcttatccatt

SEQ ID NO: 63130 - DNA, 1469 bp, Bovine  19866881113539
  misc_feature (1)..(1): n is a, c, g, or t
ngcacatgcctggcatgtttgggaaaaaacgtggaagccagtgaacaagttgtagttgagatcagggaggtatggaggccaggggtggtggcagagatcctgccggaccctgcaggacacggtaaagacttggtttttactcagcagaagataggaaatcatggcaggacttgagcagaggagtgacatgatctaacttttattttacagtgatcattctggatgccatgacaggagtagactgaagggacaagggcagaagcagagagaacagtcaggaagctactgcagtaatcacttagaacaatagagaagtgggggtgatgagaaatgggaggggttctgcctttattttgagtccaagggaatttgcaaacggatgagatgtgggatgtgagaaagcaagtcatccagttcctggccagggcactgggaaggatggagttgcagtcacctgagatgaggactggaaggaaggcttgggggtcagaggaggcctgaacctcccagactctccttccagtttttctgcctgtttctaaaaggcagggacactgcccctagcactccaggttaggatgctcacagccccagccacagtactcaggctcctccagaacagacaagtccccccaccaccaactgcggaccccaagcttccctgccatggcccaatgtacaccacccttattcccacatcccccaggcagctggagatcacccagcgctgggagcggatcctccagcggctccaagggcagaggaagcagatagcgggcatgcaggctgtgctgagcctgctgcaggaggtggagactgcctccgaccagctcaatgagctgcaggtgggccctggaccagtggacccctgggggaacatagcagcatgcaccagtcctggcattcatggggacccagcactctgggacgttaatgaccactcatctgtccctggccaggtgctagtcagctccatggcctgtgggcagaagctgacagaggtagagaggctgctgcagaggcatgagctgctggaggcccagatctcagcccttggagcccacgtgagccatctggcccaccagacgatgaagctggactcttccatgggcactgctgtggaggtgctgcaggccaaggccagggcgctggcccagctctaccagagcctcatgtctcttgctaggtccaggtaagagcccacccaaactcctctaccctctccacaacttttctgtaatccagattacctcctgcccaggtttaaacagtgctgcctggtgacttcctgtaccctgacctagtctcctctgttgcatgatccagggacaggagagctcctatctaaggggaggtgtctgggcctggtggggaacccctccccaagtcccatcactgcccaatcccctccgtggcccttgccatccctcaggagggcctcactggagcagacgctgcagcaggcagag

SEQ ID NO: 63131 - DNA, 1485 bp, Bovine  19866881167129
  misc_feature (1)..(1): n is a, c, g, or t
ncttccttgaaccgggggcggcacctgggcgatccgatgcccagatgcctcgccaggtgtagagagccctgcttccaccatcctgcaccccttgtaaccttggaagaacattttaacgatggtgactcacccgactcatctcccagtgggacaggcttcggggcagggctgggctgggcactgaggctggacagagacaaacagtcagagagcacggctcccgcccactcactctgaagcgccagcccccacccttcaaagcctcaaccccctgctctcaccccccagtcccgctgagggtgcatccaggccctgcccggcctgtgcctgtctggcccactgcaggctcgcacagacctggctctttcttggcacccctggaaaggacaggcagcgctgggagctcctcctcttctgtgccctcgtcttctccctccttgtcgctgtctgaggagagagctggtccgggagatagcatcgagggggcctcgtgcctgcatccaagacaagcaaggtgacggggagaggagacttggtgggtggagaggtcagcggcgtggctcttcgagtaagcaacaggtacggggagacacagagctgctgagtggcaggtccatggcgaggaggaggagcagcctggaggcccacccaccagcatccacgcccacactctgatctcaccggttgggtccagcggccctctgaggagaggatgatccttgctgcttgcctccgcgctggcgctggcgcagctcagccagacgctgcctcatgctgatggtcatctccgagctcaggcgccacacaaatatgcagctggggtggagccacagagctgggtgaggggtgcggggactgcaaggggcagcacctccctgggctggcaaggagcaccagagccaccctccagtgccgggccattcagccctacttcccaagacatcactgatgtggagaggggactgacacaggaagaatcccagggaagctggcttctgctcacctgtcccctgatacagagatgaggtgtttgcagtcattactaaacttcatgccagtgacaatctctgtgaaaacaaatatggccaatgagccccccacccaaagtctcagccagatgtcttctcaacagtggaggttggggattggctggaggggagggacagacagctctgctgggacccagaaaaggctacggagaaacgggaaggttccagggggagagaagcagggctacactcacctgagtggccaaacatggtagccacgcactcgcctgaggaaaagtcaaaaatggagaggttcttgtcagagcagctggtagcgatgtagatccctgaggggtccgtctgcacctgaggagtggacacactgctggatgaggccaggaagcactgggccctctccacccagcaccatctgtgccccccattctctggcccggcacccatcccactgagccctcaccttaatcagagtgccgtc

SEQ ID NO: 63132 - DNA, 1747 bp, Bovine  19866881190335
  misc_feature (1)..(1): n is a, c, g, or t
ntctaatattttttaaaagcaccaagtctttgttccttctataatatgatcattatagaacctatctaacaatagccaagatcagaagtaaatttactttggagttttttaggaggtgtgggtggcgggatagttctgatgaggtttccatcttagaaatgctccagatgagctatttttaagaaccacagtctgttaatttaccttgataaaatactgtgaaagggtgctactttaatcttctaatttttcattttaatttactcagttattttaagtgctactttatttttgtactcaggagctaggaagaagggacaaatgaaagaaaacagctacatgttctagatgataccttaagtgaataaatgacatattaagtaaaacatcatttatatattaagtgatatataattatggcaactctgtaagtgaatttacttctcaaacttttaatatttcaacacttagttaccatttagaaacaaattccaatgcttttaatggctatgtttcaaccatttcaaatttttaatcattcaaggataatagtttctaggtcattttgaaagaatccaagaggccaaagtgatcagtttcttagttaactgagctaaaatatattaacttcctatgctgataacagagattttacacttgtttcaagaaatatcccaactatgcacacgatagtcaataaatattgatcatgaaaatgagcataacccatctcttctaaacagggtgtcttttcagactttgtacagaaatcccttctttgtataaagaggtccctttatacttctacctgaaggtaatatggaaaggctcagaacataaaggcagagcttactggggtcacatgtatcaagatgggctagggtctacttctgctcacagattagtgttactcatctgcaacagagtcaaattctgaaattctgggtgagggcaaggggggagtgtgtaagagcaaaaagggcttaaatgcaaggccacacaggtgaacgcaatttaggaggtgccagaaagctatgtgtggagaaggcaatggcaacccacttcagtactcttgcctggaaaatcccaggaggagcctgggtaggctgcagtctatggggtctcgaagagttggacacaactgagcgacttcactttcacttttcactttcatgcattggagaaggaaatggcaacccgctccagtgttcttgcctggagaatcccagggacagcggaacctggtgggctgccatctatggggtcgcacagagtcggacatgactgaagcgacttagcagcagcagcaagccatgtgtcttccttttctactgtctatctgcttcaatctgccactgcctaagcttagcaactgtcatctacagcttatgatgcttaacccctgggggagagggaagaaaggtaagcatgaaaatagaaaaaaataaaatgtttcaatttaacaggggttttcctggctgagctggtaaacatctgcctgcaatacgcgagacctgggtttgatccctgggttgggaagatcccctggagaagggaaaggctacccactccagtattctgccctggatatttccatagactgtacagtccatggggtcacaaagagctggacacaactaagtgacgttcactttcacttttcctggccgaacctaggtgtgcgaagggaaccttgtttccttccaacaattttcaaaagaaatgagatcacaaagctgcctcacct

SEQ ID NO: 63133 - DNA, 2582 bp, Bovine  19866881224910
  misc_feature (1)..(1): n is a, c, g, or t
nattttaattcacggttgttaacattttgctatatttgtctatttgtatatgtgtgtgtgtgtgtgtatatatatatatattctttttgatgaaccattttaaagttgcagatagtcaaacttttcaccccttaagctttaagcatatattcctgaggacagggatttgtttcctgcataaccacaatactattatcacacctaacaaagtttgactctggctaagaagactgaggaattcgggtgctggggagacttttcattatgtacactttttgtactatttttaccatgtggatagattgttttctcaaactaaaaaaaacaacctagtataaaaagaaatacaacttgaatgtgatcattgtttaagaaaagtaacctgaagtataatactgtaagtattaaaaactgaccccatgggctaaatattatgaagtttttaaaaagcactccaaagcaatatagaaaaattatgaattaataaatgaaaaataagctattataactatgtaaagtgcacaagtgacatattaggtaatatatgaagacatgaaaacagtggcattgatattgtaaacaaattttgtcttttcaaaaagtcttttgagaaagttagtcattcttgaaccaacttattttgtgaaaactaaaaaaaaactttagttctagagcaacatttgaggcctgaggccatagcctgttcaggttcctgaagaagacagttgtggctggcagaatcaagagaaaggtggagactaattagtacagcagtaaaattgtacctgcaggctcacagtataaggataatgatgataatagctaacctggcatgcttaccaggtgccagaccttggccaagcacttttctctcctggactgagttagttcactgcacaaccccattcactcagccctcattcgtgagctgtggtgccatgtttggaatcagactgtcagcctgactctcagaggagtgtttactgagctgcgcacacctgcctatcgggcagaaaggtccccaccggcttcctcagtgtctgggctcctgctggctctgccctggcaggggtggttctgcctcttcttctgctccctgctctccttgagagctagcacagaacagagcccaggctggcttgaaacctgaggctgaagaatttactgcttggcccggggtgtcctctcatactagctttgggccactcacttcctgtttctcctgcgtgtgcctgtgttaattttgtcccattgttcccaaaactgcgagtgggtttttgttgcatgagctgggggaggaggacaactatcagaactccctgagccacccctttacccctgaaggtacagcctaggacaaagtccacacttgtcacaccctttttggctgttgtcttttctcctttgataactatttttttccctcctatctccagtctaccccgagattaaactatttcccaggaattccttttttgcattttcaaagtttcattgtctacctgtggttagtccctcattttaattgtcagcttgtacctgagttagtgcaaaatgaggaacaaagtaacttccttgtagatgtcatctgaagatagcacaaccgttttacagattgcctaatcttctttcttggaacccattcctttactgggaactcagtggagctcatgcagttgcagagaaagaggctgacccaaggctgtagtgattttttacccaaagatcagccctgagggaaaagataaaagtcactgatgcttgaggaaaagtaaactagattttaaaaatactgtctgtttcacatgccctagtccttaattcagcacatgttacctacccaactgcacaagtctgaaacaccaaactgattaatagggatgtgtttttgatcaaagctggaattttcatagcttctaagtcagggtactgaaaggtgaaagtttcacactttccttttaaactaaatttagctttgttttgttaaatcttaaccaactgacatttaacacagagtcttaattaaccctagacttcactcttgagagtcaattttgtttactcttgatttattttctaactcctttcattctttctgttttgacacactagaggtgagttagttgagacatcgcaccactttactgactttgaagcatttaatggtgagctgggaccagaaaggcagctggtttccaaagggccactcacattcaggttgaatttgaccagaggacaacttctgtaactgcaactaattctgtgttcttcagtttctcacagtcagatcacccgcctctacagccggttcaccagcctggacaaaggagagaatgggactctcaggtaggcatttcctttctttatttcctgctagtggctgaatagctgcttttatccagagagcttacatctggcaggcagagagcagggaccatttcttcacgcatctttaagtgttattgatccacaagggacttaaacagaacaatggatttacatttatcactaggtgctcgctgctttaccccctgctccccttagtttgattggccattactcggacacgactgagcgactga

SEQ ID NO: 63134 - DNA, 1923 bp, Bovine  19866881281363
  misc_feature (1)..(1): n is a, c, g, or t
ntatcccagaaagtatttgggttttgtatgtacccacttcttccaaagcattcttggtatttgaagcttaaattgatgtagggaaaagcactttttctaggcaacatttaaagccaagtgcttacatagaaagcagccttcaggcttcatagttgtgtagttgtttccttttttccttctaatctgtaatgtatacaaagagacctataagaggaagtctggatttttgagagagggttgtcaggacatttttacttctcatattccccatgttttatggagccaataaagagtgaactgccctggactgtaattgcatttatggacataaattttttcatttataccacttggagctctgtagccaaccactctgaagaataaccccactttcctgacatatttacacataaaaattcccactattctacttaagtattatttctgaggaggctgaagtctgaactatcatgtctggtactgatatttccctaaaaagcccctaaaaagcagtagtaacttgaagaagactataatcgtgtaaaggtatgggggcaagcaggaagcaagagaaagcttttctcatctggctgaagggttcctctccagcacccttgccttttctgcccttctccccatacttgtttgtagagtttcttcagtagcttgtgctaaatctgaaatgggagtaatcacaccataattacaaggacgggaagaaaagtttttaacatgtctgaatgttttatacatgtcttcagatcaggcctggggtgtgagtaaggcaatatttcctgagagattttaattatattgatttctaacctatctgtgatggagagaaactgatttcctttgaagcctcaaccctggccttgagttaagacaaattaatttccatggcacatgctatgaaaactttagggtcagttcaggatgaactgtgtcactaaggaaggaattatcattagctgaggaaatcgttctgcaaggttaataaactaagaccctgggaattcatcataccaaaaaactaaagtgcttggagcggtcacgcttcttagagccagagcaggaatctacatgtcctcaggaaggacgcgctgaatgcttgaggaggcagcccctaaagatactagagtttagaaagttaatgaagcaacaccaggggtcagctcatgtgagacgaaagggagtgtgcatttccatttgtggggaggcaggaatggtatgtcatacttcatctcccctgcttctgagcagttgggaaggctgcttggggtgggcagaatgggtggaggtgggctgtttaggatacagctgacttggaaggcataatttaagtagaaatggacatgtttgcctccttttggacctcgtgggtttactgcttatgtacttaaagcatgatattctgtgattctgtatatatcttgattcagggctcctgccaagtaagcttaacgaaacattaaaaaatatttcactacgagctgtgccctcggaatctcctagtttttaatcctgaatttggaaggctatcagcaaaatgaaattggaaaacaggagaacgtttgtaactttaaaaagttgttttgtttttaaactgtaaaagagtgactagaaatgagtccagacaggaaaaacattctttcctgtgtcaactgttttcaccttgttcctttatgattttctagcttttgacttttcacctcaagaacatgggcccaaagtttttatataattccaatgtaagttctgcttttcttaaaaaaaaaaaaatagcaaggggagaagggggaggaaggaaaggattgggagtttggaattagcagatgtaaattattttatacataggatggataaacagcaagggccaactgtatagcacaggagctgtattcaatatcctgtgataaacca

SEQ ID NO: 63135 - DNA, 841 bp, Bovine  19866881304616
  misc_feature (1)..(1): n is a, c, g, or t
ntcatacctcctggagggcagcagcctgctgcaggtgccgggcgtgtgcctcacacgcctgctccagatccgcccagcggccttccagctcctggcaccgctccatgatgtgctgggcctgggggtgcccggaggctgcgaggtgtcgtccggagcccagcacccgtcgcacctgtccctggtgggctctcacctgcacccggagttcctgccacagaacagcataaagggcgctattttagggcactcgttagccacagggggcccggaacagagcccgtggatgtgccttgcaggcagagaagggctgggggcagagacttggaaatcaggactctgagtcatggaggagggcatcgaggctctgggaaaggcacgtcagggatcctgggaggaaacggggactgttaccttgtgcttgtggagaaggcggtgggcaccatctgggcacttagcagagctggcgctgggcgtgggcatgtgctctgccacccacacgagctccgcgttgctcaggtggtggaagtggtacagctcaaccgaggcctgcagctgccgtcgccggctggccagatgtccctgcagggcctcgaacctgggtggacagaggagacagaaagggctgggaacaggcgaggtccagtgcccagtgctttcctcatcccagtcaggggccacaaaggaagaggcaggggtcggggaacatctgaagatggggaggcagctggaaaggcccagggcccaagctcccaccctgatgacctccctggctttagactgtggggtgcttaggaagactggctggtgtctctgactctcctaccatagaagtgactccact

SEQ ID NO: 63136 - DNA, 783 bp, Bovine  19866881336566
  misc_feature (1)..(1): n is a, c, g, or t
nttaccgtgtctaaccaagaggtggaatacctgtccctttttggcagcagcaacagtaatctgtcacacctcacgtttgtatgcatctctgtgacacataaagtgctctatttcaccctgtacagctactcaaggtagcaaggaagcaaaaggacacaacaggtcatgggctctgtgtgcctacacaaagagggcccacactgcccagaacctctgaatctctggccacatcctggagaccaggccacagcccctatttaaaatcctccacctaccccagggtgcccacagcaggggtgccgatggattcaatgtctggatagtgccaggcagtgcaccctggggagcccctgggagggctggagaccacaactgggccgtccaaaccgctagaggttccggaagctggtgatcaccccaactcagtgagcctcaaacagagtcgggggccgtggggctggtcgcggccccgtcccgcccatcactcgggccggcgctgcgtgcgctgcctccgcctctgcatggcctcacgcagggcctccagcagccgctcctggttgttgcaaatgttgtactgcgtcaggtggagcagcttgtccgtgtcctccaggctgtaggtcaccttcgagtagtggtagggggagtcggatgcagacaggttcacctccccagcagcctgctcctcggctgtccgtcggacccctgtggggagagtgcagcccggccatgggggatgcccgctgggggtggaggatgggtttgggggacacatggggggagaca

SEQ ID NO: 63137 - DNA, 1299 bp, Bovine  19866881341977
  misc_feature (1)..(1): n is a, c, g, or t
nagcctggagccccacctgggggtgaccttccaggcctgcctacactctgggtgccctcatgcccaccctctcgtgccctgcagcatcccttacctccgtcaggaagtactgggcttcctgagcctgctgtagccgccgacgcctctgtgcagcctctgcccgcaggcggcccatggcgtcctccagctgctgcactcgggcagccacatcgcgggcagcaaagtgcccagcctgtaccagcttgcgccctgtgcccaccaccgcccgggttagagcctcgtggctgctcatctcactctccaggctctgtggagtcagaggaagatggcatgggacatgctcctgggtgctccttgggggaccttgggagttatgtccaaagcccagtgggaccccacagattcccccagacagaaccctgcctcctgaccaacaaagaatcctaggacccccagaacctcccggaggcagaagctcccagaaccagaggtgactgtgggcacagtccctgtccctctaggcccacacctggtgcttctcctgcaggcgccgcagggcacttgggctctggccacagtcccgggcggccaccaggagcagcttctcctgcacccaggccatctcctcgtctgcgtccctgaagaactgcagcagcaggctccgggcctccagggctgtcctgcgctcctgcaggggcgcccgcaggctctcgaacctgcagtggtggagggcgggccagcggcaggtgggaccccggttgtcaggatctggggccagactgtgacctgcacatcactcactcactctgtccctcgccatgggctgggcaggccctgaggagctgggctgggggacagggaggaggggtgggtgttacctctgaagcagccgctgggcctgctcttccacgtctcgggccaggcagtgaccttcctggacacaggcctgggcctgggcttggcccagcagggcctgtgcccgcccgacctgcctgtccactgctgcctccagctccccctgatcccccaggagctcatccagcccaggctggtcctggcccccgatggggactctcagcttgagctccacaggctccagccagctctccagttcctccatgctccgtcgcagacgcagggcctggggcagaatgcgagtgtgaagaggagaggccaagagctgtacccagcccactccaccacacagcctcacctcacgggcctcctgtagcttggctgccctcctctggctctgggcctgcagctcctcccagagctttctcagctcctgcagccgct

SEQ ID NO: 63138 - DNA, 1024 bp, Bovine  19866881343248
  misc_feature (1)..(1): n is a, c, g, or t
nggtggaaatctgggggtctcttggaatcctgtgcgccacaactgtcagctgttctctaagagttggactaatttgcagtcctcctaacagtgtacagatgtgcctgtttctcccatctccatttttctgttgggttgtttgatctttttcttagttatctgtaaaagttttgtgtttaggatacttttttttttttgccatcagaaagttgtaattgtactcttttattttttcttttgggacttctggcttgcaaaggtttacagttgttttcttgcaatacttagattatttcattaaatttttttccatctgtgatccaagcaactaagccacttgttataacttcacattagataattttagaattaaatttaaagcattattattttatcattgcagttctatacaaatgcctcagttgcttacatttcagcgttgaagccaatggtttttttctttcagattcctttctccaaatttttcttctctaatcaaggaagaatccgggatgcccagtaccagcttctgctcgacaaggtaacgtttttctgtattttcactcaggactgtattgcatgtgtgttcagttgtgtctgattctttggggccccacggtctgtagcccaccaggctcctctgtccatgggatttcccaggcaagaatgctggagtgggttgccattaccttctccagggagtcttcccaacgcagtgttgaaacctgagtctcttgtgtcgactgcgttggcaggtgagttccttaccactagcgccacctgggaagaccatatatattcagttcagttcagttgctcggtcgtgtctgactctttgagaccctgtgaactgcagcacgccaggcttccctgtccatcaccaattcctggagcttgctcagactcatatccattgagttggtgatgccatccaaccatctctgtcgtccatccttggccgtccccttctcctaccttcaatctttctcagcatcagggaaagactgtttattacctttagtga

SEQ ID NO: 63139 - DNA, 1369 bp, Bovine  19866880373531
  misc_feature (1)..(1): n is a, c, g, or t
naaccccatagacggcagcccaccaggcttccctgcccctggtattctccaggcaagaacactggagtgggttgccatttccttctccaatgcatgaaagtgaaaagtgaaagtgaagtcgctcagtcgtgtccgactcctagcaaccccatggacttcagcctaccaggcccctctgtccatgggattttccaggcaagagtactggagtgggttgccattgccttctctgccttaccatacttaattaatacaaatcccaagtgcccgtaagacaatgtttgcctcaatttacctagctgaaagatcagtgtacaattcttcagcaggacacaatgaaatgctttggaaagagaaaaatgcaagcaggagaggactcaataaaatgatgtacattcattcattcatattcataacatttgctttaccaaaatgatgattcagtccagctgagaatttgtgttttagatttgatgtataatagttattaataaaggaatgttattgaatccttagagtaagtacatagtcttccaggtgcttactggttttttctctgaacgtttgttctattaattcatatttatgtagcacttattaactgcatggtatacttttacacaggtaaactatatgcttaataagaaagtaggcccttgggagcctgtagttaagaaaactgttatttggaattcatgtaatataagtatttataactaagattgcctttcatttaaaaggaaagaaattctcttcttgaggaccacaatggagcatgttagaatcctgagtgagtcatccccacacatggtgctggaggcctgagccatcgccttccttcttaatcccaattgcactgccaaagcaatcatgcatcgagaaccacagtttgttagctgcagctgaagaataaatcactcctggggaccctgcagttcaagtatatatatatttcaagcaaacccaggatatgaaaatctgtatttacacaacagatagattaaggataataattcactttccaaaggatttactactgcaggccctatgaactaactctctctatataaagtgtgatttgattttcaaaagatcccttctataggcaattttggaggaagagtctgttgtgtaaattaagatggtcaggggagataggaattataggctgctatgtaatggggcagtttgttttttagttcctttgtgagttcatctctatgctttgtcaacttcaaagttgtgacattctttagaacgtgttatggtgtacagagatggaggcctgattgcaagcaattaaaagattaatcaaatatataaagttctagcattctttaaggtgattgaatggtaactgtctttgcaa

SEQ ID NO: 63140 - DNA, 2587 bp, Bovine  19866880420545
  misc_feature (1)..(1): n is a, c, g, or t
ntatgctgctttatttctttacaaagacaggcatagaaattcccatgagatggggaataatcagtattcagaagaaaacagaataccaactcttggacctgaatagaaggatggtatatgcaatgtttgtttcatttcttacctcttctttgagtgatgcaatgtaactcaccacaactcaatataatcaaggaggtggcatttcacaggaatgctaccatcatgacagagaggaggttcaaaagttggctttgctactgataacagtagcaattcagtgacattaaaaaaaattaagtaccatttccaaaggatagttacctttgaagaaataatattgcctttgcattgactttcatgctctagttcatccccaacagatagatgcagtgaagagcctgtatccgtactgtgaacaatatacttcctttaatgtcaatcccgggtgaaatgaacccagccaggaagagcactacaatctttccagttttgatcatcaacagttctccaaaaaagcagacttggattgttgttatccaagcaagttgatcatttacaaatggatcgtgtccaaaaatttcacttgtatatttggattatagagtgtcaagtataagtgcttatctaggcaatataaaaatgacaggttcccagaacagctcatagacatctatttccttcatgttttgctgatggtgttgggagagacaaacaaggatggaggatttgaagagtagtagttggccttggaaagacaatctgtggcacaagattaaaaaaaaaaaaaatctcctaatgatttctactacttccaaaaggaaaggaaggaaggggggcaaagaaagaggaaggaatagctatatcagctatggtccaaccaagaaacagcattctgagtatttcagtttcttgagagacaaaaacacagggtagctactaggaggtgttgaggcaattcagaaattagcagcagcaggaagttactaccatccctggaatggagggtcacaaagaaaaggtggtattgccagaatccagaagccggatcaccctgtggaagctggaactacaacgggcctgtccactggggactggagccatgaaggagctgccataggtaacatcagagaagaacctatggatacagggaaagacaggacaaacaccatggcttctccctttctcccaccatccagttcccattggtgccttccattgaccaaacccagacagaagccagctgacgaaggatcctgggaaattcagcctcctgtgatgcagagcaggaaagagcaatgagtggatctgtgggctcacaggtcagggctggcacattagacaattaattaaaaagaaaaagaaaaactctaatcccagtcttagcagattccacaagagggagtggtgaatattattaggtctgagaataagaaccatgcatggtctacataaaaagccaaattatgatacaacaaaaataacactaccaaacaccaatatgaatgatgttacaagaaaaaccatgacagccaaatgaatgatcatgagagggaagagaccatactggtctggctggaaatggttgggttcttatttagaaagaaggaaaagcaggatgaaaccaagacttccagggcagaccaggcaccatctatggagacaaacaggtgttttgtcaaacaggtttggtcaaacaccacatacctgcaatggaaaggtaagcgaaacccggggaaaggagctggcttcctgggtggggagaggagcaggtgagtggctcatggtcataccagcatggccctagtctaggctagaagccacactgtgtttactgactcggtgccatcacatagtaaagcctgacaatgagtggagagacaaaaagaagctctcaggcggcaggggtccacaaagggtctggttttaaaatggaggaacgaggtagtagagaccaacaccaatggctaagaatctgcacaataaatcatctgccagtcttactcttcccaccctcaccccacccccaaacctccttccttgccctaccctcgcaggctgcaagttactcctggaggaactgcacctcactggtcttcgtagtttcagggccttgaacagtgtctggcacaaagtaggtgctcactgcacagtggttaaatgaatgaatggaccgaggtgcactctgggtacactgggagagcagaactgcaggggatgagggcagacactgcagtgatgtggcagcgtgctggcctgctggaaaactccagcagcagccagaccagtgtgggcagctggagtcagaaaatgagatggttctttgaagcaaatatgttagttataaacagcacaggcctatgcaagtagccacagctgcccagcaaaggactggagcgcaaccggcacacgatacattcctgccacctaaattctgcctggctaattccgcagctcggagaaggatgggagctgcctcccacaggggagacccacagagttgagccaggatggtcaccattgcagtaaagctgcatactgctgctactgctgctaagtcggcttcagtcgtgtccgactctgtgcgacc

SEQ ID NO: 63141 - DNA, 2057 bp, Bovine  19866880502168
  misc_feature (1)..(1): n is a, c, g, or t
nttcccttttaaaactagtgactagtgtgggtttcactgagtcaataagcactgtattgtaataagtcaatgtattgactctttaatgtgtacaaggcatggtgctttcacagaaacagttttatttaggcatatagaaagtaagctaaggtctgccttactctcatgaagccatctgtggagcatgatgactttgtaataccaggtttcactctgtactatgaaggcaatcactctgtcttttcagagcccttggaagaatgtgtgcacagagcgtcaaagcctgccgggacataccgtcactcaacaaattgcagcttttactgttattattattcaaactgacttcatgcatgtagaccaggaccatcaactggcttgaggagtctgccccttcagctcacaatacacacaacacccacacatctttctgaattgtttttaccagaacaatctcagcatccatgagcaaacaaacaagcaaacaaatgcattaaagaaaatcatgtgaagcaactgagtatctggccaatagttaaagttcgtgttccaaagcccctctgtgcatcggaagaaccatggtctctgcaacagcgtatgacccacatgctatttatgtcttgggtggcacatcgatgctactgctggaggaatgaacggctgtttggagacttcttttgcctggttcattatctgttttaaactatcagggctccatctgagtgggccaacaggaagcctgcttttgatttaacagtgctctgaacaagctccttctatggctttccaagaattaattacagagcttagtaaaggcgccggctgcaaagtcccacagatgcctttatgagcaattacagcagccacactgatgccagtagaataagaatttccttggaggactgcttggaaagagaggactggcttgtggaaatataggcacacagagttcccatctgtagtttacaggggaattaaaaagtcacaaagcgagaagagattggttgacggtgcacaacatctgtgttattgggcacttgtagacctaggcttgtgtaatttgaccagaaaaaaaaaaaagagagatcatttgatatgttgagattggagcactgtagaggcaaagaaacaccttagagctcaccggggaagggtgcaaagccaaagaagtctgggatctaattgcatgtccgtgcagcacagagtcattcagactggtgggcttgcaactctgggcatgaagcaaatccatacagtggctcttaaccaactgtagcaatcgagtgagtcctgggagcatgtttgttttaggagggcaaattgaatactgctggactccttgctcagatgtttccattttttgtactggcagcatgactgtattgacaagatgcagaggtgaatccagtgggaaacccattgagagaagggggttcctttgctgagcaaaagattgtacaaaccttcctgggcaggtgcccgctgtctcctgcagggcaggcttactgctcccatgcaggtggatggagctaaaatggctttccatagctacttagtgaatgaatgaagagatgaatgactcagaactggtcacttcacaagccacccacttacaccattagaaagaaattaaagtagtgggagaaaccactcagcctcttattcttgttggtaacaagggtaggttttagaagggcagacattttaatataaatatccagctgtgcaatagtctcatggactttaattaggggtcctactcaccagggacctgtatgtcccctctctccttgtgtcctgggctgttggatgctaagagtgaaactttgtctcccagtaattgaaggatgtggcctctgggtctctctgcacttgtgggttttgcctggtgccagtgttttcatgtacacaaggaagttccacacttactccttgcccacacatttgtgagctttttgtagaggcatggggctcctggccaaaatctgttaccgtaattgagaaaaataaatttaaaaattaagtttgctcctataattttgttttcctgtggggaa

SEQ ID NO: 63142 - DNA, 898 bp, Bovine  19866880530802
  misc_feature (1)..(1): n is a, c, g, or t
natcccctcacgttgtagagcaggaaatggaagtcaagaaaggttaagtaatctaaacaagggttacccagccgctgcctggtggcagaaccaggactaaaaccctggtagcaaaattatctaacctagctaattattaataataaacacttttcttccaaaacaatgagcaagtgctatgctagtactgtgaagggtctgtgctattacaaaatatgtatgttttcttttctaacactggaaaattcaagtcactcaatctcacacacagaacattttcagttgcaaactccagctatctagaggactctttctacatatttaaacacacacacacacatatatatacatatacagtggatttgtttgttttacaaatgttttaaattacatctgctgcttggctccaattttctggctcatgtacacttcctgtcagtgacatctataatccaacagaaaaaaacctaagcaacaagtccttccaaagatctttagtgaagcttgcttgatcaaaaaagtatcagtgggcatctttgtgatctcagttacactaggggactctatgcagataagaataagagtgagcactgcagctaggatctagggccatctactaatagcacaagtctagaacagctttagcaaagctcagcaacctcatagcccattattcttggatggttcaccctcaagggcagcatgcataggatctgcagttgacttcattacctctctaagagtagtatctccattaagatgttagtctttaaaaatgaagccctaaatttcagcaactagcatactttccttcataaggcatgtgtgccttcctgttccacctatttttatcgtgttttttctttaaaaaaaaaaaaaaaaagcctgctccagctga

SEQ ID NO: 63143 - DNA, 1214 bp, Bovine  19866880815012
  misc_feature (1)..(1): n is a, c, g, or t
ngaaaacactgttccttttcctctctcttcttatggaatgcccgagtatagaagaccagctctaaaacagtgagaggtcacggaatagctgacaacctgcagagcacacagttgaaaatcatgtcttatctctaaaaaaatctttctcacgcaaaatgttgaccaggttctgtttattctggaagagattcagtctttacaggaaaactctcactattgttaacaagatacatcttgcagttgaactaagcaatgaaacatactgttgttgacaaattactctcctatttcgtgatagaagtgtagatccaggaggagggaagatgagtgtcctctctggcctaatttgtccctggaactttataaaaatacatagttggcattatcctatctttctatgacttctccagagacggggtgcctttttctaattcatacgagggtgtcttatgggctagcagtgatcctggatgtgaattattgatctcaaagcactctgataggtgttctagggagaggtgtgaaagtgttactgaaacataaaggagaaagcaactgagtggtgcctggtaattcagaagaaagttggaattccaggcaggagtagcagaatactggaacagctgttctgcatcgtgtgaaaggcttcctccactggttggagtgttgatgtcattgaatctctcaatcaaaatcccatcagtggttagaaataagcctgaggatcagtatcagctccaatagcaacttatatttaataagcaaaattgaaaccagagcagagttatccctggtgtgtgtgtgtgtgtgtgtgcatgtgtgcgctcagtcacatccaattctttgcaatcccatggactgtagcctgccaggctcctctgtccgtggaattttccaggcaagaatactggagtgggttgccatgctctcctccaggagatctcctcaaccacatttcttatgtctcctgcattggcagggcgggttctttaccactgcgccacctgggaagccttggttatataagttggtaaatttgaatggagttgcatttgtaatgcacttagcaacatttgatttaacaagagattccttgatcctgagtaaatcaaacactttcctgtgacattgacaatataaggagaaataaaatgataagagatgaatcattctggaagcttaaatgaggatgtaacatattcttctccctttcc

SEQ ID NO: 63144 - DNA, 1426 bp, Bovine  19866881088376
  misc_feature (1)..(1): n is a, c, g, or t
ncgtgggcagtcttaccgtttagtttttattcttcctgctgagggttttcacagagttgcagagctaactaatggaagagcctaccttcaagcccaggcctccggactcccagattacagccctccccatccctgggccacaccacctgtttcgacaccagaagtatctcttgtattgaccagggtaggaaaacagcagttttccacgtggatgaaaacacagctaactagggcatctcattcactgctggtgaaagcataaatggacaagcattggaaaaaagagtttggtgaaatgtattaacactgctcctctatacttttacccagtaattttatttctaggaatctatcctaaggaattaatactaaggatatgtgactaaagatttacataggaatgtgtttactggaatgctacttataatatccaccaataagaggttagttaagagtattatgatacattccaataaaaacctcattttgaagattattggtagtaaataaatattgagaagatatttatgatataagatgtaatgaaaaaagtcagcatccagatagtgtagctaccagaggaaaaaaagaatttatggaaatgttaacaatgcttaactgtgggtgatgaaattataaataatatttttaaatttttagtcatttctcatgttccaaatagttccaattttatagtgagggaaaattctatttaactttttaaatatagtaaaaacagagtaaacactaaaagcaaatagtggttagtatttaaaatcatcattttacctacactagtctataaactagctcatgtaaaaagaaaaacaaacaaatggagggctaatttgttatgttgccaaggagaagatgatacaagatttatgatataagatttgtaatagagtgtgtggtaaatacttaaagctagaaaattttggctccaaacaattgactctgttgcatgagctgagccagttccactaaatgtgcaggagctgggctctaggaagccttgctacgagaacttcttgaaagttcctctaccgggtagtcacgtggtttctgccttcactgtctttggccctggcttgtcctgtgggatcaggagaagcaggctcagccctgaacaacatccccagcaagcaaaagcccagagataatttgggactttctaggggggaagaaagagaagtacagacccagagggaaagcagccgaaggactcggggttaacattccactctgggaggagactttagtccttggagggcttccagtctgaacttggagaattcatcaacaggaaaacaaatagcttggcgtgctctgtatttactttgcctttctcaaggttgcaacataaatttcccaactttgctagctgttaaggctgaggagacatttttgtgagttcagggccttt

SEQ ID NO: 63145 - DNA, 1804 bp, Bovine  19866881260441
  misc_feature (1)..(1): n is a, c, g, or t
naaatcgctcctgctgctgcctacctgcttcccgagctctgcaccttggggggcagggagcctggcgtccctgtggctcatggtgcccacggggcccacagcagggtgtcttgaattggatagtgctgggatatccaaaagaaccggtgagggatgaaacctgggtttttgaaagttgtgacaaattggggggcagatgtaaaaatccaagactcctatgccagtggtactagatttctggatgtgtcagaaaagacaggaacagaggagggaaatctgtcagctgagcagggacacagatgctcttaatagtacaccattacattttaacctaaatctgatgaactattatgattgacattgtttgggggctggcggctgattttcctcctttcccttggtctattacaccctcactgatctcaggaggaggtggggtggacagcagggggatgtctgtcccaggcttggccattcagaatccctccttctccaccaaaatcactggccatataaaatccatccctgggattacctgctgaaccatggcccctgtccctgcttccactcttccaggctgtaaatgaaaggatcctgaccactcaagctattgacaggacccataacgtgtattgttctaatgtgttagcacctgatgcaacccaaattataaattaccataatcaccaagggtagaatccaaggttaatgatgaaacaaattaatgcgtacttaaaatatataaacgtgttctgtaactactacaagatgaaataaggttaattaaagtaattttcaaaatattaacagcaccacagttccagcgagtgcaggaacattatcagcacatttgaatcattaaaggatttaaacaatttatagagccatggagagagcacttatattttcgaaggtcaaaaaaaggatgaactcttaagcgttcttgtgttgtgtgtgagcctcttttggttttcacatactgtggcattattatatataagatttaagccacgctaatattatttctactgaattgtagatttttatttatgaaagaggttatcttgcctataggaaaaataattgattaagtttaaccgttcacaaacggacagttatttgtaggtacttaaacatgaagatctatccaagtgtggtcattagtcatctttactgctcgtctgactgcgtataagcgctcaactgagtacaaaatggtgaagctttctatagtgctactgctgctttgattgataatgggaagatagagccaccatttttaatttttaaaatgcaagattattctggagtaaattaacctaatcacacagcacaagtaaattaatgtcacttcattacctaatagcaaaaataatattaacctaaagaatctaaatccacttctgacacatattcaatttttataacgttacgttgacagtttttttctggattatatgtggtggttttcaacattagctgctctgctaattggaaattctgggactgagagcacagatgtctccgtggtgtggaggaaggccaggaattgatccagctgcatcacacctcggacaccacgccactaaaacaccactgggtagtttgtgtggccagtctgccgtaaattcaccccgtgagaaagtctcagggctttcactcctgtggcataagtggatttttttcccaagcagcccacctggagctctcgtctgaagaattcaagttctccagctccttgacaccccaacactgtgtgcggcgccagagtccaaacagtgtctacaccatcttcccctgcacc

SEQ ID NO: 63146 - DNA, 1225 bp, Bovine  19866881291838
  misc_feature (1)..(1): n is a, c, g, or t
natttgtgctttgactcagatcctagctctgagtgtgaaatctcacaacaaaaggaattaatcattaaagttctatggggaattctggtcttttaaaaatcacttgcataccatttctctgggtgacattttctgatcgacaaagcttgagtcatgggtctgttaactttttacatattgtggctacaatgatataattcaggatcttcttaaggatgtgaaaaattttttgctatttagtgactaaggactttctattttcaatctgatgaggtgtcatttggagcgctatgaactttacatacccatttatacatccccctgatgattaaaatggagctagataacttaattaacaaaaagaaaaaataaaattattatggtgtttatgcaacattgaaaaagctacttcttgatgctgaaaggcacaaatgtaatcatcaggcatttgggcaatgtctaaaaattaatttcattgttgtcttcatctcccaatcaaaatggtattacgtttcctttctccttctctgcccattcagcatttagaagagaaaggaagtagttttcagcttttagctgccattttccaagtgcatgtggtcctgagcatgctcacctaaaatctgtttctctctacccctcacttccactccatattttttttctctttatgtactttaaaaagtttaccataacttttttaccataaacaaaaacatttaagaagtttaccataacttttttaccataaacataactgaatcttcgtaaatctggaggataagacacaagaaaaatatagaggaattaatcaaaacacaaggatgattttttttccctcttctgaatgtcagctttgaaaaactcttactgctaaaggccggaataaatgttaatgattcaaaacaaagaagaaggttgtatttgtagctgtactgtgaaaaaacacttgttagcttgagtgatatccttgaattgttacagttttcttctctaaaaatgcaagtatcttttctttttctgttaatttttaaaaaataaatttatctcatttatttttggttgtgctgggtcttcattgctgcacacaggctttctctctagttgtggctatcaggggctactcttcattgcagtgaacatgcttctcactgctgtggcttctcttgtggaacacaggctctaggcacatgggcttcagtagttgcagcactcaggctcagta

SEQ ID NO: 63147 - DNA, 1607 bp, Bovine  19866880434264
  misc_feature (1)..(1): n is a, c, g, or t
nttgaaaagaccctgattctgggaaagattgaaggcaggaggagaaggggatgacagaggatgagatggttggatgggatcaccaactcaacagacatgagtttgagtaaactccgggagttggcaatggacagggaggcctggcatgctgcagtccacggggttgcagagagtcagacatgactgagcaactgaactgaaatgaactgaaccacaattaagataaattaataaaaggcagttcaatgattaactacatcagagttatgattccagtagcctcaaagacctcaaagctaaatttctaaactgagttttatggtcaacatacaggtatggcaattgaatgccaagtttcaaacaacaaataacatctactcttaagaaatgtcagctgcagatatttttattgttaggaataaaatatttatatcatggaaggtagtgatttaaaatgtgcatttgcctcatgagctaagtctttgtgtcaagcacataaagtcattaattttttaggaagagggaactagataacatgtgaaattctaagtcatctaagtgctctactatttatgagcacatgtgctcagttgtgtcttaactctttgcgaccccatggactgtagcctgttgggctcctctgtctatgggattttccaggaaagaatactggagtgggttgccatttcctcttctaagggatcctctcaatccagggatcaaatctacatattctgcaaatcccctacaaatataaatcatatttataattattttatatttattttgaatttaactaaatttataatttaatttttgtggtattcagttaatagtgctttgttaaatcaactataatgttaatttaataaaatatcttgaatatttactgaattaatttttctggttaaaatgcaataagaatgtttccatctgaacttagcaccattgctgatagaacaccttaaacaagaggaaatctaattattttgccattgaaaaggtaacagtaagatcatttgtaatgatgtagaataactgcaagatgatcctgagcataaaaataattcctgaataaaaaacaacttgatttcaaaggactgacaaagacaagagggcaagttctatggaaattggacagtatgaaatgaacagtggtgaaagaatgataagtcaagaagatggaaagttaaacataaaatatcttattatcatatctattcagaatatataattctaacattaatgaatttgaggtaacgtcaaaaaaaagctagaaatagtatatttaaattgctaactcatgtggaaatgttgcattttctgcaacaaaaacaaattttatgattaactagaggttgttattgcaataagtaatctacttgatgttaatgacaatatgaattacaacagtttctgcaacatgagatcttgttcataatgcaaatatttgttttagaattagacacaatgctctaatctttaaatttatagcaagaagcttgacgatttagaagaatgatattatagcttctaaaatggaaaaacagtaattaaaagtactgaaactaagttttagttttcagtatagaaataagtccttccag

SEQ ID NO: 63148 - DNA, 1513 bp, Bovine  19866880453051
  misc_feature (1)..(1): n is a, c, g, or t
ngtcttggttcatgcccacagttttctttgccaaaatatataatgactctgatttacatctcccagctcagatctctctaaattaaacttgcagttgatcatggtacaattgtatggttcccttacactgactgtttcaaaactgaattcatcttcttcaacacaaacctctaactcatgaactgacctctgtctacttattgatcttgctttacgaaaagcaaactattaacttacatgccattgtggttgaattcacaaaatcatagtccaagaatcctattacaagaactacaagaggccaagtaatttcctaatacaacttaaaagtaacagagtcagtatttgaatacttgttggccagaatctgaagcctgtcatctctttattatagtacttggtctttctcaaaacacacacacacacacagacacaaagtggaagagaactaagaagctttaacattcattgagatatactaattttcacttcaggttaatttcttaattttatttaactctcagctatgtccttattttagtgattgattttaatttacagctaattttttatcagtgtgttgttgatctttttggatgaatattggtataaaatacttaatccccagatagcttctgttatacatatattgtagatatgattcttcaagatcaggtatgtgtctaattttaatactgtgcaaaacaaactctaatcaagaagataaatatgccttaaaaatcatgcaaggcattctaaatttaaatagaaatgaaaatcatttttggattatccataacactattttccattcatttaagattgaatatatatgcgtgactctgtatttaaatatatactctactatataaaatacatatttaaatatgtaaaatatatacatataaaagtatattcaatatagacatacatttaacttattttaatgtttttaattccatataagggaatgtgatttgagagaaattttcttttgctaatcagttgtaatcaagacaggagtctttacttaagaaaattaacaattacttttgaaaaagtctaaactcaagaacagttcctgaatttacaatcggttcgtttttactgtagacatcagaatgtatttttccttaaagatataaagagctatgatgatgtatattgaaatggaaataaatcaatttcactttggttatcatcatgattgtatttccttttcttgaacttaatgagtgggactgtatttgaactttgcttctgtcctgaagatgtatgttttattttttccccacagcgtgtgcagtttctctctgcatatttctattttactttgtaagaaaacatttcatttttatcaaagtatataacatgcacacagaaaagtgcttaaatcataagtatttaaattaaagagtttatgtcaagtgaaaacacctagatgaactcacaggtcattactaggacctagaagcctcccttcttgcccccctcaatcactacatcatcacag

SEQ ID NO: 63149 - DNA, 1622 bp, Bovine  19866880464067
  misc_feature (1)..(1): n is a, c, g, or t
ncttatatagtgagaaagtacattggtttgtacattcggaagagtgataggaggcagagggcattgtcttaatagtatcatcagtggtgccacttcattcattcctgtatctctgctctgtagttatttctgttctattgaattcatctcttttgagaagactgccaatagccattggagttaaatgcttccttattggtttgaagcagtaaaaaaaaaaaaaaaaaaaaggtggggaggggtgcttctcgtcattatctaccgcaatgcatgtatgctcatccatgtccaaatttttgcaacccgactgcagtccaccaggcttctctgtccatgggattccaggcaagaatactggagtgggttgccatgccctccttcagggatcttcccagcccctgaggatggttaaacaagatccaaggataccgtgccctcagcctcaggtccagggaacaagtgtctgctttcactcggtcaggtttctccttgctctctaaggacagttgtgtaataggaggagcagcagcagttagagagactcacgactcattctgccaggctcagattggcagtgagtctggagttttttccacctggggaatggcaacatgcccagcaccttggctcatcacaccaccgtctggcttacctgccgcaggttgctgaactctgggttagactgacaccagatagccacttgtgaatcatccttgcaaatggtgcatttcctttgaaaatggatacattgctttgtgtacattactgcatcgaaatctgcttctgtgtgttttccaagtatctgatgtgatagttctgagtaatttcctatgcaaccagctctacagtcaggcaaagtaatacagaaaggaaaaaagatagagagggtattaattggatatcctgagatacatatatttatttgtgagatatttaatctcccactttaatgaattactttctccaatcttagagaaggggaaatttgagatatttaatctccaaccttaatgcattgctttctccagtcttacagaaggggaaatttgagaactaagttgcaaaatttgtaagtgtcagagctgttaagaaccttcaggcagtgtgattcctaggcccatattcttcctatgtactcctaagggccactcccagagtcgaatatctgaacagagttcccttgtgagagttgctccatcctaacactatccttgtgacttcagattcaccccagaactggttttgatgtcctatatagaggctgagaaacctgaggcccatcagattttccccaagcttattagaactaaacacagagacgaggaaaggtccttctagatcagttccaaaagaaacctagaatggatctagtggttttcgatccctttgtctcagttcagttcattcagtcgtgtccaactctttgagaccccatggactgcagcatgccaggcctccctgtccatcaccaactcctggagtttactcaaactcatgtcctttgagttggtgatgccatccaaccatctcactctttgtcgtccccttctcacgccttcaatccttcccagcatcagagtcttctccaataagtcagttcttcgcatcaggtagccacagca

SEQ ID NO: 63150 - DNA, 1710 bp, Bovine  19866880570465
  misc_feature (1)..(1): n is a, c, g, or t
nctcaggggcttctgatcctgcctgtccccaagggctcggaggctccctagagccacagccacagccacctcttgcctggcagaaaaccactctctactgattattctagacctctggttctcaaccaggtgaaattctgccccctcccatacaccttggggacatttggcaatgttcagagacattctgttatgacaattaggggcgctgctcttggcattgagtggatagaagacaagaatgctgctcaacgtcgtaaaaaatgcacagaacagctcccagtgacaattgtctggccccaaatgtcaatagtgctgaggttgagaaaccttgccctggaaggcaacactccgctgtagttatggccaagcccaggtaggggtgggagcagaaaaggacagaaagtcaataatgaagataaccttcaaggttcctcaaggaccctaccagatctgtgtcagggttttcaagacaggagagtgaaataagcgactagctacgctgcgtggtttcagaacagctcagtgtgcacttgaatcgaggtggcattagataccctgtgtgtttgtttgttttttcctgttactatactagcagcattgccagggcaaccttgagactcttcaaaggttcactttaattgcttagtatctaatatatacattaaaaaaatgttcaacaaatggaattgtattgtgcaagacccactctaccctaatctttaatttaaatcagcacttaaggtggaaagagtgtcctgaatctgtgttttagtcagacggctgagtggtcattagtataacatggcaaacacagtcccgaaccagaaaaactgcctgtatacaagtactggctctcagccagatctgaactcaagagccagaagtgttcagaaggcttcagattcacagtggggctgttcaccctggttctggtatttatcgtgccaggtgacagagtgggtttagagtgtgttttgttataagctgaacttaaattcaacatcatgagaaagcctagagtttaatgttgcagttttggatacctgtctccctttggattctttagtcaagctcatggtattcctcgcatattagtttttgattggcagtttcaaggttttgtgaatgaaatgtgtggtttgtaagagtcgaattgtgagccctcacataatgcacggagcaccagtttcccacccagcccagcagtggaccctctcagtgcccatctctcttctcccctgcagggcaagattcactcaaggggagtgactggctgaatgtttttgcatcttcctaatcaggaacggtccttaccctgatactgctttccggaagctagtatgacacaatttaaaaccttcctgtgcagttaaatctggccccttagactctgaagaggaaaaaaggaattattacaagagaaaaatgccatgtttacagaagagtaaaagtggagtaagtcggtagatggtgagctggcaggccagaggtgtcaccagagaagaagcctgttcaaggctatttctttctttttgctccagaaatccagtggtaaagtcaccatcaagcaaggataattacaaaagcggtttcaatagctgtatactatgtatattttgtatagcaagaaagaaagagagaaatgtcctcttagtaaaatattcacttttgtcaaccctaaaaggttttgctggtgaccctgttgta

SEQ ID NO: 63151 - DNA, 2067 bp, Bovine  19866880605509
  misc_feature (1)..(1): n is a, c, g, or t
ntcatagaggatcctgctgtgatatatgtcagagagtgttttgcctatgttctcctctaggagttttatagtttctggtcttacgtttagatctttaatccattttgagtttatttttgtgtatggtattagaaagtggtctagtttcattcttttacaagtggttgaccagatttcccagcaccacttgttaaagagattgtctttaatccattgtatattcttgcctcctttgtcaaagataaggtgtccatatgtgcgtggatttatctctgggctttctattttgttccattgatctatatttctgtctttgtgccagtaccatactgtcttgataactgtggctttgtagtagagcctgaagtcaggtaggttgattcctccagttccattcttctttctcaagatcgctttggctattcgaggtttttttgtatttccatacaaattgtgaaattatttgttctagctctgtgattaaacaactatctttaagtaaagcacatatgccatatttatcaacatttgaatgaagcctgtggtgataattttactgccttaaaacaacccacactaatgggttttataatttgcaaaataaagggcattcgaatgcttttaaaaaccaatttgtcaactgctgaacttttactactttgtgatccatttaattgagctgttctaacccatctttctccatagtacaactttacccctccaccagtctacttttatttgttatgataagctgaagaaatgtatatataattttaagatgatgaattttctttaaggattccgataaaattcagtcattgattaaatatttaccatacaagtgttcccccttagaatgacccagttccaggtaatggagtgtggtgagatagggaggacaggagaggcacaaactggaaacaaataagatatgatcctgagctcttaatgagatatgcatttgaaacttgaaactagtttctaaacatcctaaataaaataaatttcctgtgactttacatgagaacaaaacagatataggtgaatctctgattctacagatttgaaaataacatcaaactttcttttccaatgctcttcacatccctggtaggaccaatattctgttctgtcaacctttcacttcgtacactgccactctattctttccatttgccaaatcaagaaagagaacgttccatttaaagtctgaaatgaatagcatgtgatagcagcgctggagcagtttttgcattgatgtacataaggaactggagatcacaggaccccccgaggagtaaaagctagtcacagttgatactacacttgaaatacaccatggactgcaattttaatgatgcaggcatttaagtttatcaatctgttgtctttcatcaaaggagaacagcagtccttttacattcccagagtaatgaaggggacagggtaggaaatgaaaatcggagaaacgcacatcttctgctgaagtgactagaggtcagagaggggtttggaacctggatgaaaactaaccaatgactaaggtacagactgtgaaatatccagtcaagccagtctcttccttattagaacaagatttgattttttcttttttttcttcacctaaatcatttccacaaatatttatccagcacttcctaagaacaaggtacaacttcatattgctagtaatttcaagataatcattttttaagtgctcagacagagctttttaaaaatacgtatgtttaccacttcacagttaaataaaactaatcacttagcaaagatggcagcaccatattaattaaccattctcaataacaattgcttttctctttgtcctttgattctttggtcactgtacatgttacatgtacaatcacaccaattctgttaaacttgttttaattattggtagcaacctaaagtgttagtctatttggcagaggtctcttttaaagtggccaacagtaaatgattaatatagtgttcactgcaataccactgttggaataacctgcaattaatttatttcctggtaatatggatataagcacaattgca

SEQ ID NO: 63152 - DNA, 1724 bp, Bovine  19866880622215
  misc_feature (1)..(1): n is a, c, g, or t
nattctgaagcttattatgttatatttgatattattttcatagtccaaatatcctcatgacatctttttatacttttaaaaatcatcttttcctgaataaatgcagaagagaagagatctaccatgttcctgtccttatttcaattttgttttgctcttgacttcacttttctttactctcttgaaatgaacataatttctggtatttaactttgtgattttcatctctctgttcagatcctcattagaccttgtctttgctcttcccaagttccttcaactcttaatgtatttcatacttttaaaatgatgagtgacttaagacttcttctccaccaaagcacacatttctcattattcaatgagaaaaagacattaatttttcaaactctagaattaaaattaattatatcacgttccttgaagaaatggtcaaaggaatggaaaggtcaagttgaaattatatttcttcaaactgatgaaatgttttcattaatagggtccctggtttacactctttatgtttctcattgttccatccttgattttgacagttttcttaatattagtgtactatcgaatatatagcagtaatggagagaaaaaatagatttgttgtaccaggggcttcaagacttgcatgacagtaagatagaactgacatttatttaaaataaggtttgcctgacaatatatagaaaaaaaatttgaggatggatgataaggacagtaaaaggcagtgaaaacatatttaatattatgacagtaaaatatatatctagtgttagttgtacagctttccaaaacacctgtttttctattattagaaagtacagacaaaagctttgaaatttcagaattcaaaactcaagaacctgaatacttggatgctatttcaagataataaaggaaatttattgttttgaaaatgtttataaaacacaagttgaaactcttttagatttatgatgtcaatgtatattctatatattgtaaagtataaattataatactaatgagccttcacattaaaaaattaaattctcatagttagggtcttttatcctgtacagtgttttctgtttcaattctagcagagcataaaagtcttaatgtcaagaacattactaaaatatttttaaggaagtcattgttattagtgtggctcatataccagtctgcaatgggaacacaacttaagatttgttaagaagacaaacttactgaattctgaatttcagatatgtgatggcaatatcatgaaaccagttccatggaacacacaattatcttatggctctagaattgctgagtatattcatactttctggactatatttaaatagaatattatttccattatatatattcaatctctatttcttcatctaaaatcactatctctaccactttgagtggctgccaataaataacacaagttctaacatctcaaaacttaaaaaagtttataacatgtattataatagcaaaggtaagctatatcaatcaataacagatatacattatttagcataggatatcattaaagatggaagttgtaattgcaattttaacattttaaatgtacaagtggaatcattgtgtgactattagtatcagttgctacactactgatcatcagcaaggataaaatattttcttattgataacattcatcttattgcagaaaaacgctaaacatgataatatactataattattac

SEQ ID NO: 63153 - DNA, 2240 bp, Bovine  19866880644772
  misc_feature (1)..(1): n is a, c, g, or t
nttttaaattgtaccaattgtattatactggtttcagttggtttgagacattttgaccccctgttttaaatatgtaactccatagtgatgaacttctaggataaatcaatctgtctctaactcagagtatcctaaaaatggcaatagaaactttgataaatataaagtggctacagaatcttgcttctgtgaaaacgtttgagcttcctaaaattgttgtaaactctcttagaacttgtttcctggtggttcagcagtaaagcatccacctgtcatgcaggagatgcaggttcagtccctacatggggaaaatcccctggagaaggaactggccacccactccagtattcttgcctgggaaatctcatggacagaggaagcctggtgagctacagtccatggggttgcaaaagagttgaactcgacttagtgactaaacaacaacaaaagatgaagctggtagaaagctatagaataccttcgcttttcaatttgtttgctatagttaaaatgcgatgtcaacaccagagtttttgttttttagtgaatttcctgtctgcagctgttgaagagttaaagaaacatgcttgaagtgtctaaaatacttgtttctcttgcccagaagaatattccaatacactttaaacatatcaaaatgctgattttttattaattcataatctattagttatttggctgggagaaccattaaggagaaattattatagatgccttaaaattacaaagcatctcatttcacgatgaacattctttgtacctgttccatgaaatgacacaactgtggtgactgatggctggaggaaggtgacagagtaaacttgcatgtcaaggtatgctcaagaagttgactctggagggacacgtctgcttgttttaaagtacaacacctgagaccaatctacatcttggcagtgctcattaggaagccaactgtagactaaacactctccctcagaggggctttaaccaagttggagctcattaacaaggagtccatggtgaccagaaatgtcttctgcagattatgcagacagaccagctttcttcatgtaagtctggttttaataattcctcccaaaatctttctcaattagagcaaattgacactacattttccttaatacatttaattaactcttcaatgatatatagggcattgggacatattctgttgctccaatcacttatttctcttgaaaatttctcttgaatctcacttaggccttatgatcctctgatattttctctattaaaaatgtaaatagaaccctggagcgactaatttgaaggttaacagttcatctgcaaatgatgtagaaatacaggacaggcacagccttgagaattaaatgttctttgaaaggccaaagcgttagatttttttcagttgttaaaaatgttctcttgtgctctaaatttgtattaactctttagcagcactgaaatccctttttgttgttgtttggtcaaacaaaaatactgcctccccaaatgcccgatatgattttaggaaagttaacatatttgttgtacaaaaaaaggcatacagtctggagttaggcagtcctgaatttaaaccctgatctgtcactcactagctctacaaacttggaaaattaacctctaagattatttctttatctataaaatggggttaaaaatggcacttctcagggttgttatgaggattataaaatttgatacatacaaaatactcagactaatgcctgacatatagtaagctctcagtaaatgtaagcttggatcactgctgttgctggtgttatctataaaacaagaatgattaaaataacacataggtagtgcccagcaagtgcttatagtaagcctttagtaattgatccttcctttccctaaggacctctgtgaaaagaatcagtcacatatttacaaggggaaaaatgcagcaaattgatataaatgggttccttattatataacaataaatttaaaacaggcaaaaactattgctgtaatgttaaatgactgcgtatggcaaaaagaaactgaaaatacccaacacaaggtcaagcgatcagccttacaagttaaaaatatcagtacatcgttcctcctgttatgtctttcccaactctcatcatcaacactgggatctctgtagactctctctgatgaaataaaaccaccagagttcagaaggactacaacaaccagagctcataattctggagccataa

SEQ ID NO: 63154 - DNA, 1620 bp, Bovine  19866880663329
  misc_feature (1)..(1): n is a, c, g, or t
ntgtgaaaatctgttaatacaattaattcccactgcttaaataacaaagctactcttgtaacttgtttgtttgtttgttttttttactcatattaaagtcactaactaatttcatggtaatcactcattgattcatatgtgatattgttcatttctctgtttgcttcatttgtaagcagattttgaaagtctgggtaagatttaggagaaaatgagtcatgttttatacatagcaacatctcttgaccaagaaagaactcacatctttacaaaaaaccatggctttttctcttttagtcgtatgaattttcactttcagaactaacaagtcaattcatataattaccttgtattgcttagatatgtgcattgcatctcacaatgattcttcctgactcctccatgcttttggcaggagaaagacagactcacagctattctgcttgttagattaacatcagaaagcagaatttgcatctggccgctaggcctttactcatcaaatcggcaaatggaactaatgtggaataataataggatagctggtttttgagaaccgaagactaaaagagtttttataaaacatgcagttcacatttttaaaaaaatcacaaaagccattaaacatggaatccatctcatttttcatgtcatctaatgttatcattttcttttctaggacattcatgattcttgtgctacaagtaatgttgagaaattattgataaccatttaaaatgccagtcacataaacagtgtttcttgtctttggataaaatcctataacccgacctgtgcattttgcacattttaaaattatatttaaataatatcatttaattagagattttttttaagattatagtgaaatgtgatcctaggagatgatcacaaaaacggcaaatgctaaatatgaattttctgtattgaatgcataagcatcttttttacattttttcttccatcttatcttgatagagtgattgaaaatactccagggaagagagaagtttttaagaggttcttttaaaaaatcaacttaattatacagttaacttctctacatgcatattaatgtatgtggctatttaaagtatatgtgcatccttctctttctatcaaaaagtgagctaacataatttatcttctgaatgattgaaactaccaatattccctggaagaactagataatgccacttaaaattttttataaattcagattttttagttgcaaataatagaatggttaagaattttaattgagtgaaccaaccttcaagatgaccacgctaccctgaaattattttttgtttccctgttttacatgatcgttttctaccttgatttgtacacgtagaacatgtgcaatcagatgctagtcattttctcacattcataccacagtgtcactggaattttctccaggtctttttctgtgtctgtctcaatacagacactctctggtactcctctcagactaaaggtagatgataaaaattgaaataggattgagacctttgcagacatcctctcttcctcatttgccagattgtattgtttgctttgaaatacatcttggagacatggttgaaaaattttagagcagtgtgcatcaatttt

SEQ ID NO: 63155 - DNA, 3304 bp, Bovine  19866880665417
  misc_feature (1)..(1): n is a, c, g, or t
nacaagggccaatctgctctttctgaaatgtctgctcaatgacttcccattcgacatctccacaactggggcctcccccttggatatcagataccaaattagacttgagccgtattttcctgcctctttatagatctagttccagaatcttggtgtcctctccagactctctcacctatgtttcatgtctattataccagcatgtataaagaggtatattttaattccctgctgggagcaaactactaaatttataaataccaattatttattagctaatttttaaactatcagaatatttctccctgagataaattattgtttttaacatgcaagtttaatgcaataaatgtttaatatcactgacgcatatttatttatatctcatcttgttgcaagaaagaatttgagacacagtcagaactgtacctagcattgacattacttgactaatagtgaaactagtaccatatatactacaactcagtatttttatgaactaacaaagggttaggaatattctttgccatctttattagtctattagctacatgttttgattaatgtaagatttagtctgatgatacaacactgtccagaatcaggtagcattaatgcaaaacgatgtaatttaatacacaaaatactctaatcaccatgggttcacctgttgtagaataactgcaatggaggactattgcatatcaaacctttattttcattgtctcacatactgaaaatttagggaaatcattctgatttagttatattttactctatcttctctggtatattaggtattttctatttttctacatttatcatgtgaaatgttggaatgtaatagaaaactcaatatgagttgtattcagcaaaaatggaacagttgagcataactgtgctgaaattagctgatgtatgtgtgcttgtgcatgctgtcatttcagttgtatcagactctttgcgaccctatgaactatagcctgatagactcctctctgtccatgagatttttcaggcaagaatactagaatgagttgccatgtcctccagggggtcttcctgacccagggatcaaactctcgtcacttacatctcctgcattgtcaggtgagttctaaagaactcgccactagtgccacctgggaaaccccctatgaaaaggaaatgtattcacattgtaagtatcctcagtagagcagaaggctccatagattatacctctttcattacagttcatcttacaacatgttcaatgctgcctccacttttgcactgtgtaaatattttctgatggcatcaagtcaccttttatatctgctttcccccaaatatgaaataagcattgaattatcatttttatatttaatatgctaaattataatgttttttaagcagaatgagtgtatatttaatgtttatactgtaaaatgtttaaaatgctggattaaaataaataaaactcagttcaaaacttttctctcaatttcaaatatctctatggacaatgatcctttggaataatgacacttaaatggatgcacttgtctttagatgaaaactggcaagaaaataaggattcgtgttctttctttctcacattgttagctatttttatgggttaagatattttttcctctattctactgtaataatattccaggaagtagtctttgaatcacttgccaaccctgctttcaaactcagagccagaagaaatgttttcctatgtgctcattatggtacctttttcataaggtagcatattttgttctatataaaaattaggaattttttttgatctttctcccagtagactataagatctttgagggtaaggactacgtcttgctcacagttctatctttcatgcctaacacagttcccaatatatgatttgttaaaagaatgttccatggcaggaaccctataatttaattttttgcagccttcattctaccaaggaaattctctcctatggtctgtgctcagttaacactagtatattgactagtgttaatatactagtcaatatatatactagtcaataatatactagttaatatactagtcaatatatatactagtcaataatatactagtcaacacttgactcctattttcatggagacaagtgttaatgaaagtcaaatcaggtactggctctgacatcaatttaggtatagaaatttgaagaagttaatctgtctaaattttagtcttctcagttgttgatgtggataataagactctgatttttaatgcagattgtgtattataactgaaatagtgcctgagaaggataaactactctacaggacagtggttgttcaactttagaatcactttgatgtcatttgaatgacattattaaatgatggctgagcaccactcagaaactctggggtttgggaatatgaatttctcacaagctctcgggtgtgactgatgctgtcaatgcaaagatcatgctttgagaacaattgatacagggaactgttactataaaatggttaaacatttttgtttgctcctgtattcatattataatcctttaatatttacatatttcagttattttactatcctaggtggatatgttattttctatttcaatacttagtagtttaaaaacttttatattttgaaaatttacttaataaaaaatgaggtaaaatattttctatccataaattttaatatattaaaatgaaaaattatttgatcagctctacagcaagatgaaaaaatatattaaagaactttttagaaaatgttttcaatggcatgtatattgcattatgatataaatccatgggtcataaaatacagttgaaacttacagaaagttaataaagttgaataacaattaactcacaatgtactaagctcttaacaaaaataggtttggatcttgaatttaaacagtctgatacattaatctactcgacccacactactaattggaatgcatgctcgcagcatactatgcgatagacttgttgaaagattatttctttgccagagcatattcaatattcaattattttcttgttaataatttatcctgcataatagagaaaacacagtaaataaccatctgtctccagagcagcttttatatttacaaatatacacaacatagaatctcagcaagaggcacgtagaaagaaagaacattccaggttaactgcttaaataaaagaatttgccagacttctatcttaaacttgctgctattcttggctcctagtttggataaaataatgacaacccaagagggattacaagggggagaagatag

SEQ ID NO: 63156 - DNA, 1973 bp, Bovine  19866880689775
  misc_feature (1)..(1): n is a, c, g, or t
nacattctgatttttaaaagttaaacgatgactttgactttattaagtgttatctcctctacacaaggatgtcaggttttaaaaggtcattcaaatgcatagccatctacatatatcttctttttcaatacatactgatactctcttgaatatagaacagtgttttcaataaatggtacctgataaatgtgcttttgctgaaagtatattggttaggaaaaaagaaaagttctatggtggaagtggaaaccattattaaagtgagagaacaaaaatccatttattcttcacaagcaatttgcatatggttgagtttgagacttagaactgttctgaatactctcatctcattagtattgctgggttctttctttctcattgttcattttcccttattcaagctcagtaaggcagatagtcaattttattaatcatgctcagaaaaattatttactgtattggaagttacttggctatataagttatgatctatttgaaatttggaagttaatttagagaccattctggagtagaaactagattaactaaatagaaaggtcttttaattattataaaatctggtatctcattatatgtaagtttatctggttagcttaaatgtgtgtcagtcctgtaacctactagggctaacaatataattactgacatataaaaccatcatctacaaaattaacatacacaaataggttgtgcttctatacacttggaaaattgtattaaagaaataagaaaaagcattcccatttacaatagcattcagttcagttcatttcagtcactcagtcttgtctaactctttgcgaccccacggactgcagcacgccagtcttccctgtccatcaccaacttctggagtttactcaaactcgtgtccattgagttggtgatgccatccaactatctcattctctgtcgtccccttttccttccgccttcaatcttccccagcatcagggtcttttcaaatgagtcagttcttcacatcaggtgaccaaaatattggaattttagcttcaacatcagtccttccaatgcatattcaggactgatttcctttaggatggaatggttggatctccttgcagtccaagggactctcaagagtcttctccaacaccacagttcaaaagcatcaattctttggcattcagctttctttatggtccagctctcacatccatatatgaccactggaaaaaccatagctttgactagatggacctttgtcggcaaaattggctggttgttgtattgtctgttaattctcattgctaaataatgttctcttgactgaataaaccgcaattcattatccacagttgattccatttttggctgttatgtattatgaacattcttctagatgccttttgtgaatggatgtgccctctgttgttgggtaacagtctaggagtggaattgcagggttgtaataagatacttctgctttttcttgtcttttctttcaacatattttccttcacaaatttcatcaacaatttattctggatcatcctctaaaatgtgaatgattcgctattttatattccccatctctctgctctcttaagcatcagcaaaagtatgcattagtcattaaaaaaaaagtccaagttcaagttcttgactgtcatcccctctgagattgtggactcaccctcctgctacatctccacgtaaagaaggattacttcccattggaagtttggactcagacatctacctggtctgctacctgtgggaccacatatgaaatatgaaaattaattttgtccatttaatttaaagcctaggaagaaaaaaacatgtcaggatgaggacatcccccaccccctctttctagaaggccccaccctggttcccctctgggcttctaagttgaaagggtttaaagatagaatgggatgcctccatagtgggggaaagttccaacgcctgcctgaccacagcag

SEQ ID NO: 63157 - DNA, 2955 bp, Bovine  19866880772524
  misc_feature (1)..(1): n is a, c, g, or t
naccccggcccccttatttcttctttctctctgaagtaattgtgaacccaggttatggaagctgttgatcctggagaatgcatctaatattctgaggatggagtagaaaaaaaaatctcattaaagacaatcaattaaaagaagcctgaaagttttcttgatgaggggatacactggctttgtgttcttttgaatggctgccttatcccagtcactctcttagacttgaaggaaaggcagtcaacctatacagactgtattaggagccatgcgccccaagttcctatgactgacagagggctttcacttgtacccaggtaaagcaaggacaagtgaagctgcattcccatgcttcagtgaagaacaacccttctgacacataatgcaacctaaatacagcagcaaaaatgattgtgttttccactttattccaccatttctctctgaaactttgacatggctcaaaacccattatctcccaaaatctatgaaggccaaggatacatacagtaaaaagtaggcaaaaaaaaaaaatacttaaagggtattagtaatttgtaaaatagtgaggcaaaactgcataagtaatatgtcccaataaagcaaagttgctgagtcaaaaaaatcattaacataaaatgaatgaggatcatcaaaggaatatagttagaaattattctataactaaatcctgattcataacttaaaaaatataatagtggaactaaaaagataaaagaccagctagagctcaaagtggaagaaattactcagaatagagagaagaaatgcaggaatataaggagcataagggaaagataaaagaactggagaacagatcctaaagatataccaacagtaagtatttcagaaggtgaagaagaaatggaaatcagagaataaacaaataatccataaactaataataaacaaataatccataaaccagagaataaacaaataatagaataaacaaataatccataaactaaataaacaaataatccattaactaataataaacaaataatccataaactaaaacaaaaacttgacccttcagatcagggatacatataaaaatattttcatgacatttcaaaaagatccacacaaaaaacaaaatattttaaaatatatgaaaattatactggtagattttatataagctaccaaagcaagaagatggtagaacaacacatagagattagaaaaaaggactacaatcctcaaatcctataagcaactgaaaaatccgttaatctctcaatacattacaacagtctcctgggctttccttaacttgagttatccacgttaatagaacctactgaccttttggtttcagaagttcatagaaatctctggtctataatgtcccccccatctactcttctcagtatttccatgaatatagtcacatgtttacatttcttcctttacttcagtggaatttggagacaataagggatataaatgcttgtacttgtgtgtatgtgtgtatgcacatatgtactcttctactgtatcttatacaaaaataggcttcccagttagctcagtggtaaagaatccctctgccaatgcaggagccacagagaaagttggttcaattcctgggtcagggagatcctctggaggaggaaatggcaacctactccagtattctcgcctgaaaaatcccatggagagagaagtctggggggctacaatctatggggttggacagtctatggggttgcaaagagttggacatgactaagcatgcatgtacattaacgcatgcacaaaagtatttaagatattttggttaaatgaatatgcatacatataaggatttttgtcatgttctttcagtgattagaagacaaactatgtgcatagagtaaaggaggtttaggagtcaaagattcctgttttgatttgcccctctgtactccatttaatagatggaattagtagatataagtatataagtatagtaattatcttaacactaccagggatcatatcagtgaattgattattttaaattgctgttgacagactccactccaattaaacaaaacaatagtgcttcacatcatattgaattgtccacttagatttttctctattaatacatgtctttcgttaatgattgcataattgcttttctacaatttctaattcatagttttgctttgttttctttttaattttacctagggcagactaagaaatgtgctcaaaataagaatgtgtggttagaaggcatatattaagttgctttgctggcaggcagcatatatttttatttttaaatgaaggtagtgtctatcttttgctggcaattgctactggcactcagccacccatatcctaattttgcaatttttatgcctctgtgctaggcagatgtttatctaaatcatttaaatctctgtctcctacattttagacacatttagtattaagagatgctccctgtataacagcatagattaaaagttaattaagaagaagttaaagaaagagaaaagtaattactttttccatagatatttgtttcatttttggcaggttaaaatttagaaagtcttgaaaatcaaatttttctaaaaaaaaaatcattattgtttgcttcttcatacactgagaaatgccaagttaattaagaaaagcaatccacttagtaatgcaggataagctaatggataagcaactttgctcattcagtagattattttataggattgatgtttttaaaagctctatatgtaaattatccatcaaaaatggaaatcatcaacatgtaattagaaattctcacaggatttcaaatatagtagggtataagaaagaatttgaagtttttcccaagcacttctaaaatatataaactctagttgaaaaataagtgtaatgaagtgattttacatatctgattttatgctactgggatttaatggggga

SEQ ID NO: 63158 - DNA, 1909 bp, Bovine  19866880828902
  misc_feature (1)..(1): n is a, c, g, or t
nattttattatttgaataggaagctggaacctcacatttacagcatatttggcaagctttggaatgtaatgtagaaatcagaaccatctacaaaagatgcattcgccatactctctgatgttgagtatagccagattttataagtgaggccaggtcaagagtctccaggtgagaaaggagcttcagtatctgtgcctctccaatgggacataggtgactatcatttttctggccttgggaaactctgattccaagtagtaggcagtttgttacttcatataagctgaacaaagcaaagcaaaagaaaaagcattctattagatgtctatgcaaatgttcttaggactagagcaatcatttaaatcaggtgaggacaggcagttctgcctctcatcacctcgactatggccttaaccctcagccttgctttgaaaaccagacctcactttgtatcctcagagcaatattaattcagaacttacttggatttgttccttgggcaaaaggttaagtgatccataaatttatttccctgcagatttggaaaaagaaaagtaaatatcacagtgatacgttaggcaggttctgcagcatcaaaatcgacttcccctcctgttgccagcgtcagtgccacgtggtgaatagaaaataattaaactatttgtggctcactcatgtgaatgatgccagtgaccagaaagatcaaatcctcaaaaaaatctgattaataaggaatggctctaacctgatccttgtttgactaagaactaaatcccattacaaatgtgcaaagaaggataattcagctctgtgaaatggctttttgttaacataactccactatgaagaaatgtatagtgtccccaaaccaaaacatacttgttgtaaggtagaacctacatttttcatatctaaccttagattttgtggttccctatccagtgactcaacattagtgtaataaggacctttataattcctggcagatgctgctctgtggtgcagattttgtgattgaaggtaatagccttcagacttaaatgctctcgtggaggagggtatgcttgaaaagataatagtggtggagagattcttagagtttgccgcatcctctctaggcaacaatagctcagttattgaatatccatcaagtgcatgtcattggtctgtgcttactgaaagttttcatgttgaatcccagaatcttttttctaaatgaagagcattgccttcatgtctctttgtgtgtccaaatcattgttcagtttgcaaccagaaactggactttttcctctgagagttgtaaaaagatgtgccacatgcagaaaatcatagagtagaatgagtcctgtaagatcagcccttttgtcctcttccctctcttaacacaactaagggttaccaagtgtcacaagctcaaaggcttgccatgtgctccagacctctgtgcctctgctcatactgaagccccctccctaccttattacccctccttcactctcctattccttaagctacaaactccattcagtcagtaaacttcttattgagcacaatattcagcgttcatccttggcaatatatagtctaatggggaagacaggcagttgaacacactacaggagagaggtatagctactgtggaggcctataataagaggttctagacttagttgagaggtcacaggaggctggactagaattagaaagtaacttaataaggaaaaggaggtgcttggagaaaagaacattccatcagagagaatctaactctgggaggtgggagatacaagggggcaagtgatataaaaattaaacagaaggaagattatgtaaaccataggacaaatgggaattcatcaaaggataggcagggagtaagatgatcagatttagatttcttaaaact

SEQ ID NO: 63159 - DNA, 1851 bp, Bovine  19866880902063
  misc_feature (1)..(1): n is a, c, g, or t
naagttaaataagctgggtgacaatatacagccttgatgtactcctttcccaatttggagccaatctattgtttcatgtccagttctaactgtaggttcttgacctgcatacagatttctcaagaggtaggtcaggttgtctggtaatcccatctctttaagaattttccacagttttttgtgatccacatagtcaaaggctttggtatagtcaagcagatgttcactgtttccattaattaataaatatttctatattgctagggtgaggcttgataactatatatctcaggcctgatctgaaatttcagaaagtaattttctgccagtagataactagctacttcatactattgcattcagctaagcaagcatatttgttgtttagtcactcagtcatgtccaactcttttatgaccccatggactgtagcccaccaggctccgttgtccatgggattctccaggcaagaatactggagtgggttgccatttccttctgcagaggatcttcccaacccagggatcaaacatgtattggcaggcaggttccttaccactgagccaccagggaagcccaaccaagcacatactgggttttgttgttgttgttgttgttgttgttttttaatatttgtaagacacagtactagtcctggaccatcagaaattaacagatattcagttcgtattttcaaggagttgatgatttcaatctacctgacagatgagacctcatacgttctttgagatctctgaaagaaaagacctcaccacactattggcaactgccacacttaattctcagttctttgagctatttgtgtgtgtgtgtgtgcttccaattccttaagaatcaatgcatctccatttccttcttattccaggtgtcagaagagagaaagaacatttggtcaccatttttacataataagccttcattccctgagagttattgagtcatacctctgttttctctttctagattaaataattccaatccctttaaccttttctcaaaggtcctatttgccagccttcagtttaatcattttcactattccgctctggagtctctccaagttttctgcattaaaatttgttgctttgccattaaggtcactctaagacttattctttcacctaaaccaaggcaaaagaaaagcagcacccacccaacccccaaagtaagagagtatataggaacatagatttcttctttgaggtattcatgcaagatactcacatgctgaaagcaaattagtacttacggtcaccaacattaaggagaaagggccaagaccagaagaatttctaaatagtgccaaccattgtgcttgacaattacctaaattacttttaagcagataaggctattaacagcaaacttgaagtttgctctagttacagctgaagttctcagataggtgctactaaaatcactgttaatgagatcaaacaggagtttttgattcggtataatacccctggctgccgagcagactgtccagagattactatgctatttataggcagcaactttggtgaatcctgggaaactgcaaaagattcatctttgtattctgtcaatcaataacaattagtatttcctgagctgagtcacagacagagagaacagacttatggacatggtggggggataagaaggagagggtgggatgtatggagacagtaacatggaaacatatattaccatatgtaaaatagatagccaacgggaatttgctgtatgactcagggaattcaaactggggctctgtaacaacctagaggggtgggatggggaaggaggggaggagggaagttcaagagggaggggacatatgtatac

SEQ ID NO: 63160 - DNA, 968 bp, Bovine  19866880915007
  misc_feature (1)..(1): n is a, c, g, or t
naccaggctcccccgtccctgggattctctaggcaagaacgccagaatgggttgccatttccttctccattgcatgaaagtgataagtaaaagtgaagtcgctcagtcatgtcttgactcttagtgaccccatggactatagcctgccaggctcctccatccatgggattttccaggcaagagtactggagtgggttgccatttccctcccttgaggcatatatatcccacaagaatagaatataatcaagacaaatcaggccgaaaatatttttcttgacttctatgcaggtatcacttgattgtggcagaggaaaatccaatatacattttaaaacaacttgtcattaaaataaattaaagaagattcacaccaggacaaatgtttttttagaataactagctccaccaagatgtatgcaatctaattagcatgatagatttatgccaatagcattttccagcaacagattctatggttcctaaaggcagaatttcatagcagggtaaggctaacgattacagtgtgtgcacggtagtcctagcctcagctccaagcacaaaagcaaatgcctttctcttaggtgttctgacaggatgatattaaagagcaacatgtgtcagaagatataggaaatcagctgccctgtttggcaggttttacagtggaatgtttgtactgtcagggcgatgggtatgacaaacctgagaggtgacagtaataggagcatttaggtaagagaacaagcttaatagagatgccactgttgacaataacatgcttatgttaagagtctttgctttcattttctactggaaattccaaagctcacttttgaaacaatgttttgttttgttttgttttgtttcctctaaatcttacaaaaacaccttttagttctttgcaggactaggagactaaagttccagtcatatctatttttcaggaaagctcagatcaggataca

SEQ ID NO: 63161 - DNA, 1478 bp, Bovine  19866880965653
  misc_feature (1)..(1): n is a, c, g, or t
ntgctgtatcttaagatcaatttgcgtgaaggccaattgaaacttacgctctctctgactgagctacctaataggagaccatttactattgctctgctgcatgagcccttctccctggctgggtggctggctgctgagtttatgccattgttcataaggggaaattgggacagtgtcgacattgagtatctgtaagagtcacaaacagcttgagttttaaagggctctcagagagcatctagttcaaagcctttcattgtaaggcaaggtgctgaggcctggagtggtaaagtgaactgttcagtgttgcacaattagcttttgacaaatctcagggaagaactcacaccacctgaatccctccttagcatccccgtgttgagctgaatagtgtttcccccaaattcatgtccacccagtatttcagaatgtgaccttagttggaaaccatgtctttgtagatgtgatttattacaatgaggtcacactggattagggtggaccctgatccggtgatagggggaagggtctttataagaagagaaaacagacacaaagacacataggggagaaggcaatggaagcagaggttgaagggataaattacaagccaaggaccactgaggattaccagaagctgatgtgaagggccaactcattggaaaagatcctgatgctgggaaagattgagggcaggagcagaagtgggtgacagaggatgaggtggttggatggaatcaccaattcaagggacatgagcctgagcaaactccgggagatagtttaggacagggaagcctagggtccacgcggttgcagagactaggacaagacttagcgactgaacaacaaaccaaaagctagaagcagcaaggaagaattctattctagagcctctggagggaggttagccttgctaatgccttgatttcaaactcctagtcttcagacctgtgagagaataaatttctgctattataagtcacccagtttgtggtctgttattttaagccagctgggtttttttgacagtcctaggaaatgactatagtctcttttgcttaaccatggctcatctcaggcatccttgagatgaaaagcccacagtgtactgccactgccagcaagagtcctatctgcaaatgaaaaggacagcattttaatctgtaaattgaatggctcttgcactcacacctgacaaacacacttactgttgtttttgttccaattagctgtaagtcaccttaaatctcatcacatgaagcagtgatctatctaaattgaatgtaaatatattgctgcttgcttttataccaaacaagaacagaacatggagaaattacgtaggtgttgtgcatcttgaaatctagagttgataaggaagaatagattattggaggtcagggtaagagaaatattgatattctgggcaccaaatcaccatgaaattgactgcattgcaattttcgaaatcctct

SEQ ID NO: 63162 - DNA, 1642 bp, Bovine  19866881106432
  misc_feature (1)..(1): n is a, c, g, or t
nataaaagagccctccgtgccctagatgccgtgctgtccatgacagcaacccggagcacttgagatgagagtgaaagtgatggtcgcttagtcatgtctgactcttggcaaccccaaggactgtagcctgtccatggaattctccaggcaggaatactggagtgggttgccatttcctcctccagggatcttcctgacccagagattgaacacgggtcttctgcactgcgggcagattctttaccaccgaaccatttgagatgaggcctgtccaaaatgagatgctcagtaaatgtcaaaaacagatatcagactttaaagatgtagtatgtctttgaatagaagagaaaaacaggaaaattacttattgatattctttatatctacatgtgttgggcaacaatattttggatatattaggttaaataaagtgtactgttaaagttaatttcatctccttttactttctaatgtggctagtttagaaaattgaattttagaaaatttacttaaatttgcaaccaaatttagagaatttaaaattcagcatatgactcacatactattttcatgagatggtactggtctcaaggaattacagaaggatgaagaggtgttaggagtggctatgagaaactaatttttacataatttggtaggaagaaattctagatgttgtggaaaagggcataacttttccacaggggttctcaaaacacaggcccttgatcaacagtatactgtgaatatctttgaaatgcaaattctccagccccaccagacacttactgatcagaaactctggatattgtgtccaagatctgtgtttctatgtttcaataaacattctaggtgattttgatgcaagctaaaatttgctttaggaaaagcagaatttggatacaaactgtagaagatagcatagtttgagttttagaagatgcctcaaaatagactaagcttatcccaaaggcaatatagacttttagcaatgaatcattcctgagaagaaattatgagcaagaaaatggtggttaaatggttcaattactttcaagtttcagcattgacctgagctgtctttattgtgtttttttgatgtgtgaatgtacccacatgatagctttgagaatcaaagagtcatgtgtgaaacttggcatctgaaactattttgaatgctttaatgacctcactttccaaaaacaaattaattatcattggaaagaaaataatacatatttattttggggacagaaaaaggttggaaaagattgtactactcagttttatctaacttccacagaaaagatagaaatcctttaagcaaccaactttctgtgtctgacagcaaatttagtatcatctttaaaattgtcttctttattgatgaaaagtttgcaaacccattttcatttccttaaaatgcttgaatgaactcactagaatggaagttatgtgttcactgcagggggcggcgagacacatagggtgtgcttccctcaaagtgggtacacacagccacacgcacacacacaacacaatatccacacaacgttctttacgatggagatgaaacagaaaactttccagtttcactttccatgttcaaaggcacaaaatgtcttgcaactaaaaagaaaaa

SEQ ID NO: 63163 - DNA, 1438 bp, Bovine  19866881142401
  misc_feature (1)..(1): n is a, c, g, or t
nggttggagggaatgagagtagggatggaacatgaaaggagaaaagtaataaaatctacaaataattgtctgttacatattgagagttatggttaactcagctctttgtatttgaggaagaataagagaaagaagggagaaagaagctggatgaacagaagggacataaggaggaaaggggaggaggaaagaagtagaagaaggagaaagagaagctaaagcagaagcaacagataacacttattgttacaactaaatttttataaggataaatggttcctagtgctgcatagaaaaaggaagatatcaaacattatgaaagacatagtgaaaggataacagaagagcaaaacttcaaagtaaactgagtccatgagaagagaaatggtaatgtcatttacattacagaagtgcccatcttttttctccagcttcataaacagctatagtaccctttacaaaacacactctgatggcacctacagcatattatatgtggggcagtttaacttagagttttcaacactcccagtttatgatttgcacattcatgactattgcttcaatttactttgtaaatagaatcttacctgtctcttcatagctaaatcccagaatttagaatagtacctggcagataacaggcttacgctaactatttgtcaactgaatgagcataatttctacttttagacaaacaaaaatacaggggagaaaataataaaattcttggctagaaggcatgactgaaatgcacatatatattatgccaaatgcatattcattattccacttatcaaactcactatttcaaaacatttacaaagtactgattttcataatatcaataatatattgttatattcctttttcaatttttctttctttttgttgtagactgcatagtaggggatgctgcatgaatatgattttaaataatttttgatattcactccagttatagtataagtaagatactctgagatcaaccagatttgagaaaatcatatgtgaatattgtttgaaattcaattttagataaatataactgagtgttatcatatgtgccatcggggccagctccctctctaggagagcatgctatttgctctggattgatttgcacttctgttgaactgcaacttctcttaaaggattatcctattaagaagtatcagcttggctgattaaagataattatctattcagttttgtatacataatctactaaaaagaagatagattcttgtgctacttgactttgggctatgaggtatgtgtagactacagatttcaactgttattatttttaaattgagtacactatcatatgctactacattaaaatagtacattcctcttaattacataactatgtacccctaggaaaaattcaaaggtaagactgtactttatttctttatataaatgtattttt

SEQ ID NO: 63164 - DNA, 1975 bp, Bovine  19866881359440
  misc_feature (1)..(1): n is a, c, g, or t
ngaaaaacaagatatttagtaaactaaaaaatgcttatagatcaaaggtgccccaaattcaactaaaaaagttattcctacacagttttctcacaaatagttaatgtcccttgaagtgaagtgaagttgctcagtcatgtctgactctttgtgaccccatggatggtagcctaccaggctcctcagtccatggaattttccaggcaagagtactggagtgggttgccatttctttctccaggggattttcccaacccagggatcgaacccgggtctcccgcattgcaggcagacactttactgtctgagacaccagggaagttggttcagattgtcccttacctttctcataattggaaataaaacacaaacatatgtgtaaataaatatttgatctttcctagaacttgcatcttataattaatagtgtgatgggattttaaatgttaaagaaatactaatttgccatcaacaagggtgggggaattttgtttactagttttgtgtgattcaatttgtgaaaatgtgcttcattgatctttgcaaaagaactttaattggaaatgaatatcacaatctatttgccacatcaataagcccaagttgctgcagttcattaagtaccacacctgatatttagctttccacagggaaaaaagtccttgatttaatacacctaaggatggccaggtgggaactcaaaaaacaatttgaattagtatttcttttactcatccaagctgttaaaatatacaccaaagtgttgcttgagataaatatgccctaatacttgatctggatattactttttccttttatataaatataaattattttcttaaatacaaaagtaatccatttaaataatattctttaaaaatatcacaaataaatgaggaaaaagtctttttctttttttaataccagtgcacacaggggttgtcggatcacctttacaagcaatctgaagctcagtggggtggggagaggagaaagaacaggcactttatgttaggatgaaaaccataggacagataccaaataaacaatatcaacagccaccctcaacagaatagataccctcaacaaataagaaacagcagtggagaacaagcaacaaagcactcagtaaattcctttagatgaaagaactaaaaataatgaactaggtgcctatgaaagatttagcagcttttagctatttggaaaatgaattcttacatcagtcaacaactggattttggggaatcctctgtgcttaagcttgaaactgattgatccatgtggggaccaagcccatggctctagttttgtttcaatcaccccctccacgaagcagttaggctgcaggctgtggattcatattgtgattgtgagcacaataaagtcatggtagtgccaggctaattagcaacctcctttttccctggagaataaactctcaccatgcaattataagttttacaaacaagtggctaacacttttctgatggtaggtgaagtgagagggttaatatctgaactatattttaaatatattcaaaattctcactaaaatttacaatttaaacattttaaaagatgtgttcctctattcaaaaagtatatattttgaatatatattcaaaatataacttcaatattcaaatatatattcaaaatataacttctataaaactttaggaaaatgtaatttattttttgcaaaatgtacttcattatcaatgtttctgtgatgcatttttccatcaggtgaggtatgtctgtatacaaattagaaacagaatatttagattttctctatcccagctaatcaatgcagttttgtctctttaaaaaagttaaccagtttattcaacaaacatgggtaccatttttgcatgagacttcaagatgaggaacaagtagggataggagacatatagataaattacatgtgataaatacttgggatgattaaaaaaaaatgacagtt

SEQ ID NO: 63165 - DNA, 2021 bp, Bovine  19866881539342
  misc_feature (1)..(1): n is a, c, g, or t
nacccaggagtgtgtcagttgacagggtgcacatcccttctgtggatttaggagacaaaaaaaacaaatgcagtgttacagatgacttgtttttggtcatgcaaaccccccccattcccctgtattttagaaaaatctaagaaatttgaatgtaaattagatagtgatttagtgattatattattaatttttgttttgtttggttaaaaaaaaacatattcctttttcaaagagatgattactctctttgaggaagggatgtagggatgaaatgatatgcctgatacttgctttaaaatactcctggggaaaaatatagatgaagcatgatgcaaaatcttgagaaatgttgcatctgggaaatgggtaaatggaggttctttatataattttctcatttttttggcgtatgattgaaaactttcacagtaaaaaaatttctgctttgccatttaaggtcctgtgaccttgggtagaacatttaatctctccttgtattctggtttcctcaacagcaaagcagggatagctgtgctatgtggattgaatggaaaagggtcagtgcacagtgcagggcctgccacagagcaagcattcaataattatagattatcattagtaacgtgcatggatatgatcaggggaaatattttccaaccacttaccctctcactgctggtttgagttcctttctgatccctaagtcagccttatgttatgaaaaatgaaaatgtatacagacaaatgttaaagctgatgcttaattctaattgaatatagctctaacgacacatataatctcaaatgacagacataactgagaatcagtcattgaatgatgagaggagggagaagggagaaacttatgaaggcaaatataccacgaacgatgtttgctggttaacacactttatatttaacaaaaatagttttttaataatatattattttacacatcaaatattggtgctagaatcccctttttacagttgagtgtttagtttttttttttttctcactagttttcaggcacaccatttttcaaagattttagaaagtgaatcgttttttaacaggcatcagctgacaaacaggatgttgatcccttatttaaacagagctgtagttaaagccgagaaccaaaggcagaggagatgtaggagaattgaggtgacagggtggctgcaaacaaagctttcaaaaggaaaaaaaaagattaggaagcaacagatgaagccagaaatctgctgttcagagtttggagagaatttctcaatgacctaggtagaaggaagctgtaaagtgtttatcagttgatgagaaattctgtcacagtatcggttcatctctccctaaaggggcaggggaggggtgtgggtggaaatgtcagtgctacaaaatcttaaaggaaacatcttgtagtgagacactgtgagaaaagaaacatccaagaacagcaaaataatccctctctttggctggtaacaggccgctgagcagccttcattctgcaagccctctgaagagagtttctttatgggtattatactccattcttgaaaattcttgcagtgactatcactgagccaagactttgatgcaaaacgcctgtaccctgccttgcctgttgctctttccttctgttttctaaaaaggacagagtaactccttaataatagatggggtactatgctacatggctctattaatgatgtttctgggtttcaaaccttattcctgtcatttattattattatttctttccaagagtgtagatttttgaagctggcaataggcaacctcagggcaaagaaagctctataatacatctctgtctagacatacactgaagtgtggagtagtgcctttactttggagtgcaggaataaatcatgcagaattgttcatgaatgattcatgactgtctatatgatgtttctggggtggtaacagaaaagcaccaaccttggtgcaaattggtgttctaaggaaaagtggcttgatgcgctccctcctatgat

SEQ ID NO: 63166 - DNA, 1740 bp, Bovine  19866881562506
  misc_feature (1)..(1): n is a, c, g, or t
ntaaaaggctgatttgcaaaatagcttctgaagatgtaaatggatagacttaagtgaatatgttaatcctaataagtacataaaatgggcaatgaagttttccaaattctttacaaagaatctcatagttaaaggagttgaaagtcgagtggaagaattattagttggttcactaattatggagttgaagttattacaaagaataactgcaatttcaaataagagatatgttattaattatataactaaatatttttgttttaccttttaaagaatttttttagtttctcttttaaatagtaattttaaaccatagagatcataaatgtttgttacaggaaatttaggaactatagactagcaaaggaaagaaagtaaaatcatttattagcctactgttcaaagatatacactattttaatttttccttttataaattccttatttgcatttatgtttaggaagaccattcctgtcctaagagtgaattgatatttagattaaaaaatccctttatgatcacattttttagattgaggtctttaatccaactgatagttatttttgtgtaatgggtagtaatagaatgtaatttcacttttgtaaaaaaaataattaacttttatatttttagaataatatattctttcatcagatgcttggatgtcacatgaagagtatgttaaattgtaatgcaaatgtgaattactttctgattttctgttatatttatctatttttgttccactatcacactgtttaaaattattatacctttacatattattttaatatatctggtagattgaatttcccaagcttcccaaatacattcatgtacttaaaattttccaacttttgccaacttacaaaagaaaattacatcatatggaaaatttgatagatttacatttatctttagagaaatagcattctaacaaatttcagttttcacatttagaaattagtcatcatttttaaattacatttaaattgtcttattatatttacaaatagttctttgtaagattttgtgactttttaaaactttcatattatatatacatatatatctccccccacagattaatatttattttaatgttgttaagcctagtatctgttgattctaagtagatatcactgttatgcattactttcataattttgatccacttgaaattaaagcttaaaaatgtattatatgaaataaaaaacataatggtaaatggaagctaaatatattatatatcattaaaaatgttttgttattgttgttgtatacttgctaagttgtgtccaaatcttacgtgatcccgtggactgtagcccacaaggttcctctgtgcatgggatttcccaggcaagaatgctggagtgggttgccatttcctcctccaggggatcttcctgacccagggatcgaacctgcatctcctgcaatgcgggcagattctttaccattgtgtcaactgggaagcccagagagatctgctctctcaaatttttttctctactatcttactaaattttctttatagcagtttttagtctattttcttggatttttcaagtatattctaatatgcaaatggtagatgttctgtctcctgacttttttcctctgacttctttcttttctgattatattagctagttcatgcctactatctatttgaattttcagtaatagtgtaaagctttgtcttgttccgagcttattaagaagcctttaatgtt

SEQ ID NO: 63167 - DNA, 859 bp, Bovine  19866881608588
  misc_feature (1)..(1): n is a, c, g, or t
nctgtgcctaatgaattggtaatgccttatctttctcttttaactctctttattaaaagagagaaactgttaaatagtagatatttgtttcttttgaatgtatttctttagctcctgacccccctccttatctctcaaaaattgataaaatgagattttacatttcagaccataggtacagacaaaactagtttagaactttttatggagcagaggaatgctaaagaaaaatatttcatgctctatttagtgtttccacttgcatatttcaattatgtgccttttagtgtacattcttatgtttgtttatttgtttatggagcagttttaggttcacagccaaactgagaataaggtaaaaagattttcacactccctgcccctactcgtgcacaacctcccccatgatcgttgtgcctcaccagagaggtacacttgttataacttgttgcggtcctttaatggaccagaacctggcggtccagagttgacgataagaaagtgaaagagagaaagaagctaatattccctggtttacacagagaatcaataaaacccttgaacagggcttgcaccgctcatgaaggcacagggcgccctctcgagggggtcttgaaagcccaggtaggagaatgagctcggagggtgtctatgctccagagaattagtcggagttggggagagagacaggggaacccaagcctctagtggaggaagggctttaatgatctttctgtgggtatatataggctgttgtacaagaaatttcttttgacaatgataaagatcagaaaaccaaatgtatagcaaccgttaccaagggaacaagggattaataaggtcacgtcaggagacaacc

SEQ ID NO: 63168 - DNA, 1809 bp, Bovine  19866880434351
  misc_feature (1)..(1): n is a, c, g, or t
nctaaaaggagtatcatagaatgtggtggtggttattattgatattctgtagtggagaagcatttctatgttttttatgtttattacaaaattttcaaatatatagtatggtaggcataatagctccccaaagatacctacaacatcatccctgaatcctgtgactatattactttacaggacaaaagggagtttggaggtataattgaggaaatgaattttaagataaagagatggttaccctggattatccaggtgaacccagtctaattaaaagcagagagctgtctctggctggagtcaaagtgatgtgacagaagttggagggaagaaggtttgaaagatgttgatccacctttgctgaagggagaccacctggaaagaatgagccatgagccagattgtggcagcctctaggagaaggtgatggcaccccactccagtactcttgcctggagaatcccatggatggaggagcctggtaggctgcagtccattcggtcgctaggagtcagacatgactgagtgacttcactttcacttttcacttttatgcactggagaaggaaatggcaacccactccagtgttcttgcctggagaatcccagggacgggggagcctggtgggctgccatctctggggtcgcacagagtcggacatgactgaagcaacttagcagcagcagcagcagcaggaggatagatgtacctagctgacagccagcaaggaaactgagagctcagtcctatgactgaaaggaattaatctgcccttagaagcacattagttccccaagccttgagaaaggaactcagccttgctgactagttaaatttgattttattatattggaagtagaggtcccaattgaactattctgtacttgctcttctgatctccattcaagttaacaaattacagaagcaatagaaaactaattcatattttaaaaatgaaatatgataaacatctatgcccactgcttaaattcaacaaccctaaacatcgtcatattactcatttatgttgtattttgctcaattatttcaaagtgtgttttagaagacctgacttaatcactaagtacttaatcatgcatctcttcaaaaaaatactctcctacataagcacagtatcattatcacaattaacaaattgaaaatacagtcagttctgttataatgcttctcatgaaatgtgaatttgttccaatgcaattaatacattaggaacaatttgagcataacaggactttgaatttgcttatgactatgatgttgtcagaaagctataaatactttcagcttttctattatttggaacaggatccaatcaaatatcagattgaatttggttatgtctcttaaacacctttttttttttctaatgacactgattttttgttttgttttgtttttttgattgggccaactgtcttaatagactatcttagattgtttctgggcttatctaattgtatcctcaaaatttaatttgtttctcccttacattttctgtaaaatgttatttagaaccaaagttttaattacagtcagttatatatttgggaagagcaactcacaggtgaaaactaaataacccctcctctcctttctttcatcaactgggtctatttgttattctgtctaaatttctactgacaagtcaagaaaaatgtttaattcttccctttaccagttttaagaacaaggagtaggtgtaatagaaataggggatttctaggtaaaacgcagaagtaataaaagagaagattagtatacagtaggtataggtatttttaaatgaa

SEQ ID NO: 63169 - DNA, 977 bp, Bovine  19866880876702
  misc_feature (1)..(1): n is a, c, g, or t
nctccaactttctttagataatccagttatgatcatggaatttaatttatttctcccattttagctactcatttcacttccagccatggtaggtaagggagattttgtttgtgttgctttttactcccctcaaaatgttaaccaaagatacgcagatatgcccacctgtttaagagccaaagtgacttccaaaagggggttgcttttaattggatctatttatattctttttcatttggctggggcagtgacccatgccaggggcacttctgcccggtggcttgccccaaattgatacagtacttgacctgttacactccatttcctgagctacagtcctgatagagtcgatttccataaccctcagaaccctgacatcactgggatgacagacttttccttaaacaatagcctgcccccaaaccagcctccaatacactactctattattagaaatatatattttgttagctataaaatcatttatactccacagctgcttgattgttggggtatttccttatgaaagttctttaaattcaagctgtcacttcaccctaagacctgagcagtggtgagtgactccagatggagcttttccctccttcctcaattgattattatagtcatttattttttctgggatccttgataactttttcattaatagaaagattaacagaaatttagtgaaatcttgagaaagactcagtttgtataatgaacatacaattttctgaatggctgctagtttaaaagcagatttctatgctcttaaacagattgcgagagatcagtatgccatggaaagatgtccaatacatattgttatgttgttattttaaaaaattgtaaaacatgctccacataaatatgcatttgacttacatgtgcatatatatgtataatatacacacatacatatatataaacataaatgaagagagatgagaaaaagaataataacgcacatactg

SEQ ID NO: 63170 - DNA, 1426 bp, Bovine  19866881226450
  misc_feature (1)..(1): n is a, c, g, or t
naactgactcaatttgattctacattgtgaatcacttatcattcacatggttcactttatagacattgtgatctactgggtgaattccagattctaaattaaatagcacggagcatgacagctctccatatctataaacttctgtttagaacaattgtagattgcttaaaattggtctaaagcatctggtaggtgttatttcacttaaacatggtacatttttatctaaattaaaattttggaagattttaggaatcttttaaagatatcacagttatgctgaggagttggaaataattgggactcagtttcatgaccacctactgcaccaacatgcaagttcctcagacagcatttgttctgagtccccaggccactcaattctgactaggtcaaagaatggtacataaaatgaggaagatatgtgcaatgaaatatctgggaaactcttaaaatggcaaagtcctgagtttcaatcttatataggcatagagtgcagatagagtgctaaaatcttgattttttttttttactactagaaaatcaagtgattctgatagaggttgcagtagttggaatactcccttttccccagctcataatctcctgaacctgtgactatttaccttacacaagaaaggaaatttatattttgatattgaactccatgagctgtttgtttattttggatattaagcttttgtccactgcttcatttgcaaatattttctcccattctgaaggttgtcttttcctcttgtttatgatttcctttgctgttcaaaagcttttaagtttaattatgtgattgtggtaaatgactttgagatggggaagaagagcctagattacccaggtgagtccaatctaatcacccagtccttaaaagtagaggacccttcccagctgtggtcagaggagcaggctagagaggtagctcagagacatttaacgttgctggctttaaagatggaggtagatcaccgtgaaacaagaaatgtaggttgcctctgaaagcttttatgaaaggcttggaattttttttgtttttctttttctttttctacaggcttcagaaaggaacacagaactgctgacacagtggttttagccaatgagatctgtattggacttctaacccacagaactatactgtactcaatttatgttgttttaaaactgtggtgttggagaacactcttgagagtcccttggattgccaggagattcaaccagtcctgggtgttcatttggaaggactgatactaaagctgaaactccagtacttcggccacctcatgcaaagagttgactcattggaaaagactctgatgcttggagggattgggggcaggagaaggggacgacagaggatgagacagctggatggcatcaccaactcaatgcacatgagtttgagtgaact

SEQ ID NO: 63171 - DNA, 1629 bp, Bovine  19866881335635
  misc_feature (1)..(1): n is a, c, g, or t
nattcttggatatttgacattttgattctcataaactgacgtgagccagcctcagagaccatgggaataggggtattatctgccttcattcctcttctaactagaatccctccagtgatgtggcagtgttatctttgccttgtacttgcttttctatttattacctgttttgattctatgtgactagagctttttgactgttcatgtatttacacaaactccagccattgtgtcacaaaaggttttaatgtgctaactgccaagtgagccccaatcagcaggatgtaacataaaggtcactaccctgcagtcatcaactggatttagctttcagaggagtttcttttgatcagtcaacagctttctgaaatactgaattaattagcagcctctacaaattaagagctttcacataaaaacatgaattctcagtttgtcttatgaagtttgaagatctgacaacaccaagcccacatccccatgaggcagtatcttccaggagctaattgggcactgcctcctttaagagcataccatatgctctctggcttgcccatgcatcctccactcttaatgcttcacaccctggtcagttttgctcatttctattacctatcttgcccctgaaagattttgagttgggattaatctgaggcataatgtggttttaaaataagaagaagaaaaaaaaaaaaaaactttggagttagacaaacctgggaacgagtccagcctctgccattgacacatgtgtgaacataagcaagtgatgaaactctgctaagtctgtttcattctccaagaaatgaaaatagaaagtcacctcaaaggattataaggaggcctaaacatgacagcacttgacaacaccttgcccagctagctccatcctagtgatcactctcccatttctcaaggggacctcttgcatcccttccaattttgttcatttcactttgctagaactcagtttctcttatgttggactcactgaattgggtgtctttatttcttttcctttaccatttcttttgtttcaagttatattttctttgtgcaaatgctgcttacctcagaaatgtcaattgcctcactggtctcatttttgctctctggtcttgccaatcattttaactgtgtaggacacatgtacatctactggatctgacttgtcatctcctctgtccacacccagtgaaagaaatatggagatatcccagtggttgagattggaaacaaccctttactaaccaaccctacaatcccctccctgctccatagaaaacaaagtacagactttcagttatgagatgaataaggtctgaggctcaaaagtataacatgatgactgtagttgataacaactgtgttgtataattaaaatttgctaagagcagagaacttcaatgttctcaccaaataataaataaaaggtaaatatgtgaggtgatggatgtgttaattaattgaggagaatcttttcagtgtatacatacagcacatcaccatgttacacactttaaacatcttaaaattttatttgtcaattatacttctgtacagctaagggtggtaaacaaggtaatattgcccacaatatatgccctgcactttcagggaagctttttc

SEQ ID NO: 63172 - DNA, 1621 bp, Bovine  19866881497461
  misc_feature (1)..(1): n is a, c, g, or t
naaaactattcctgaatgcagtgtgtctcaaacttcagtgtgcatataaactcccctgggtgtctgatgtagttggtgtggggtgaggcccaagtctctggttctaacaagttcccaggttatatcaatgctactgatctgagtacattttgaatggcaagtccacagtggataccttccagcaagcatttagatctccaacaattttataattaaaagtatcaattttcctttctgatgggggagagtgatgctaggagggcatgggttcagccaaagaaatgaacatggtatttcatgttctccttgcctccagacttggttctttgatgtctgggacctctctaggtttcccttctagacattctgggtaggcaaagtcaaagagtttaataaaaatgcagtagaaaaccatgcatccaatctgaatccctcactcaaacactcttctttgtgaaaagcgatgagaagtctgtgcctgacattctagttgctgcagggcttgaccacccattggtcatacaatctggtcttccagtatcaaaatgatgacacagcagtgcttcagtaatgagaggaaaatgtttctagaatgagcctgcaaaatgctgagtctccaacagataaatctgagaatgagagaggggggaattaatcaacaatttcactatagccacattttttactttcagaacaaatatacagcttttcccaaatcactcccttatgcaaacactataagaaaaaagcaccccactacaataaataatgagtctgtttattaacatcacagaaaagaatactctgaatttctgagggaagttttatgttctgaagactaagcctgaaattttattcaaacaaaatcttgatcaaaggccctgtcaagagaagaaatcttagaatccggttcttacctttttttccaggtattttgaaatgcatgaaactcaaataggagtttcccacaacccctaagcaggcacagaagctgtctccagtctcaaatttgtggcaacgtggtagattatgaacaaatctaccaagaacacatcgttttgagaattataaatcagactggctgctccactcacagaaaataaagccattatcataactttctcaccaggatctgaaagtcaccaaaacatgaaagcctgttatacctcctgatatgcagtaaatggatattaaagcatatggactagcaattatatcttagagtgataatctggcaatctttgtgctctctgagagcatagtaaaagtaaatataatcttaaatgtggtagatgaccaagacagtctactagatttacttgactaaaagcttgatggtcttctctatgccctaacatcccttttcttacagaatttacattagaaaacttgtgattgtgaaccctttccttgcccctttgatatgtaaatcttcctaaaagtttcttaccagtttcaccacccagaaatgtctgtctgaaggacttgggtgtcatctctttgaaataaagtcaaggaaacaaccataggtgtgaacaggtacacagggtatttggggcctccaggctctttcttttggaggagcttctacttcccgaagggtaagttcctcatcactcat

SEQ ID NO: 63173 - DNA, 1242 bp, Bovine  19866880357964
  misc_feature (1)..(1): n is a, c, g, or t
ngcttctctgtccatgaaattctccaggcaagaaaactggagtggtttgccattcccttctccagaggaacttccttaacccagggattgaaccctggtctcctgcatcacaggcagattactggagtgggtaatctaagaatactggagtggggccattcccatctccagtggatcttcccaacccagggatcaaacccaggtctctcctttgtgggcagattcaaaccatgctctattgctattgctaagtcacttcagtcgtgtccgactctgtgtgaccccacagacgggcagcccaccaggcttccccatccctgggattctccaggcaagaacactggagtgggttgccatttccttctccaatgcatgaaagtgaaaagtgaaagtgaagtcgctcagtcgtgtctgaccctcagcgacccccatggactgcagccttccaggctccatccatgggattttccaggcaagagtactggagtggggtgccattgccttctccaaaccattctctagtatgacattaaaaagacatacaccttcagggctttatttctaagttctggataatttttgttattatccaacaccaccagagcaatctatttaaggtagatttttttttttaatggacttcagtcttgtagtacttacatgtcagtaaaaaatgtaattaatttaaacatagtcattaaagggggcttgaggagaactactgagagaaggaaacattttgattgattctttgagtggaaagtagttgaagttagatccccttcactaggaggacacggtgtcctgctactgtcagactagagaagagtcgagtaagagaagtcggaagaaatgagaaggccttgggacctccagcgcccacagagacagttgttccagggattattcagaaagcagctgggctggaaatcaggtgaatccatcctagactgtgatagtcctatttcctggcccccttcttgcccatgaaatgttttgtttaaaagagggaaacattctatacactcagtaattaatatggccaagctaagccaagcttaggcccacatttttggatagcaggtttattaatgggctggttgagagaactgaaccatgtggtgtttgggaaaattggaaattttaaaaataaatacttagcatcttttctctctgactgttaagatatgttcatttactaattcttaggaataaaatttccacattgaagattaatttgat

SEQ ID NO: 63174 - DNA, 3397 bp, Bovine  19866880424799
  misc_feature (1)..(1): n is a, c, g, or t
nctgaactgaactgaactggagctgttaactaatctatctgtgataatcatttcacaaaatatatgtgtatcaaaccatattgtacactttaactcatacaatgttatatgtcaattataactcaaaaaagctagaaaaaaatctgctgcttgataaaggaagaaatcccaaaagtgacaccaatatgacttatatatatatgtgtgtacacacacactggagaaggcaatggcaccccactccagtactcttgcctggaaaatcacatagacagaggagcctggtgggctgcagtccatggggtcgctaggagtcagacacgactgagtgacttcactttcacttttcactttcatgcactggagaaggaaatggcaacccactccagtgttcttgcctggagaaccccagggacgggggagcctggtgggctgccgtctatggggtcgcacagagtcggacacgactgaagtgacttagcatagcatagcatacacacacacatacacatatatatatatacacatacatatatgcactatatttttattcctcagggtccaagatctataagggaaatgggagaaactaacatttaatgggagaaactaacatttaactagcatctataatgtcacacattttgctaagcacattacttttattgtctcgtttgattagtttttctggcataatctcatcacatgtaagtgtagtttttaaaaatgtcactcccatgttgcatgtaagccaaaagagagagtgcatcaggagaaatcattttaactgtaaaaaagaaagttaggacagcaagagacagatcatcatccgcagtctctctggggcttgatcacagcttccttaaatggcttggatctcgtttttcacacttacagatgcctgtctttgtgttgctccctgccctcatgtgtatgtatcttagttcccagcaaggttacagtcaccttaagagctaaaactgattgctagtggcctcaacctacagcagcttgtagcgggtttcagttaggccagagtttgaggttgggtcacagtgttgagagcatcaaatcttaaccactagaacaattattggtcagtgacaggccctagcccttaagctttgcaaaaaatagaattctcataaagaaggaaagtaatcaagtaaatatttattaggaggaaaagggtctctacctgtagagagacacatgggcagactctgagagagtcccgctctcatggcagtttgaattacttttatgggacatttcctctgggtttcctttggccaattatatttatttgcctggctcaaagtccatatctggtatatctcaggatcctcccatgtgggcgcactcatctcgtagccaagatggattcaacttaagaggcctatggatagttagcattactccccttttgacttccaaggagcctttctacattgtgtagtcagggaggtcttctgacttcaagaaggagaaatatggagtctcttatcttctatctggccagagcccagcctcctctcccacttgtcccactattaatattttggagtttcagtccacagggaatgaatctccaatcactttaccttggcggacctatctatctcctgcctcaaaatcaggccctatttttctgtatctcttgaggatccaacaaaacattgggccagaaagaataagccagcaccctgaaggttgcatatggctaacagacttgttttgtttagcttgaagactgctggagaaaagaaaatgaattgaaaacatttagaaatcagaagatttcacaaaatattctctatatcccttttcttctttataaaatggaaaacatgggcatcttgggccagcatttctgcctgggaactgttatgtggggaagttagacatgagggacaagaggaggcctggcctgaaagggatgcaagcctgatctctaagatgcatcccagacacacccaggagggctcacagatatgctacaaagtaaccacagagacttttcaactcctgcacatgtgccctagacatacagtggatacacaataaacacaggggattctccaagtaaacttaggcagttaagggcccagtaagggctcatgaatattctatatctaattataacagactgaattatgggaattggactataaagaaagctgagcgatgaagaatcgatgcttttgaactgtggtgttggagaagagtcttgagagtcccttggactgcaaggagatccaaccagtccattctaaaggagatcagtcctgaatattcattggaaagactgatgttgaagttgaaattccaatactttggccacctgatgcgaagagctgactcatttaaaaagaccctgatgctgggaaagattgagggcaggaggagaagggggcgtcaggatgagatggttggatggcatcactgactcaatggacatgaatttgagtaaactccaggagttggtgatggacagggaggcctggctgtggttcatggggtcgcaaagagtcagacacgatggaacgattgaactgaactgaactgaattatgggaagacaaaaataacacagtctgctgttgtataacttacaattgtcaattggccttgaatgtatccccactgcatttcctttcgttgactggtgatgtgtacaagctctactttgcacacaccataaccaaaaggagactgggacgatgaaagcaagaagccaaacaggctcagtaggaaaaatgagaaggacttcctttgggatcagcttgctcctgtatttttggagtacctgtctaataaaatatctttctgcttgagcctaactgagctgtgacttgtctgtcatcttacactctttggtctgtcactcctaatatttgctgtgacaagaaaagaacagagaaagagaaataagctgacttgacagaaccatcagctatagttcaagagcagttgttgttcagtaactcagtcatgtccaactctttctgattccactggattgcagcttgccatgcttccctgtccttcagcatctcctggagcttgctcagctcatgtccattgattcagtgatgccatccaaccattttgtcctctgtcatccctttcttctccggccttcaatctttcacagcatcagagtctttcccaatgagtcagttctttgcatcaggtgaccaaaacattggagcttcagttcagcatccatccttctagtgaatgttcaggagtgatttcctttagaattgactggttggatctccttgcagtcaaagacactctttggagaaagagttttctctagcaccacagttcaaaagcatcagttctttggcactcagccttctttatggtccaactctcacattcataca

SEQ ID NO: 63175 - DNA, 2493 bp, Bovine  19866880433511
  misc_feature (1)..(1): n is a, c, g, or t
naatgctcctttacgccctgggagaacatcgtgaattcttctttaattctgaattttccttctatttacactttaaacaaacatgccagttgtttgcttagctaacaagctctgccttcattataagccattagtggctggcaataattgaaactgtgtttgggtttaaaaagtacaataaacccaattaatcccactcttagtaatatggaatttgtagtgactgacttgacctaggctggagtttgtgtctgctctcttcacaaagccagagttgctgaactgtcttatagccataagcaagtttgatagtagatttttttcataagaaaaactaaacaggttaaatccacatgtccataaggagtcaggcagcaaatataaataagcacatgggcagagcaccctttaagaaatacctgatcttctctacctgcctttgatggagacatggatagaaggaatatttcacttttctcttaatcctgttataagaaataggtagagggaagcacatatagtcacatgattataaatgacaagtggagtcagccagtggtgaggagatggaggagtggtggggagctggcgagcccaagtcccctttgaaagggtcagctgctgttcagctgcagttactacataggaatgtgagtcgagtgtagtcacatcttgcaaattttaaataaaattagaaaatctggatttctagtgaaatcttcccatttataaattttgccaattgatttttttttttttaagttaaaaagcagctgccacagtgcagattagtggctctcaaagtgtggtccctggatcagcaacatcagtatcactggatactttataaaaaaggcagatctcaggccccacccaggcctgtgaatcagactctttgaagttgtgggtccaacaatgttttaagaagcccttcaggtggactgccgggttcagcaatactgcaggcaacacacatgaaaaagttatcagtaatttatacgaaattcagatttaactgtgtgtctggtatttatctagcaactgtatctttaggtgattctgaaacacatctcacatggatcaagcgaaacatgcaaaagagagccaggctgcctatatctgaatcagctttgatacatactaactatgggatcttggcagagcagttgtgtaactgctctatgactcagtttacctgcatgtaaaatggggataataatatctctctcacagggttattgttagaattaaatgagttagtgaatggaaagtccttagaatggtgcctgagaaaggttaagcaacatctaagagtttaccatcatcagtcctttatttttcctttcctttttctccaccaccatcattccaactgtcagggaatacttgaatacagcttccttcagttctcttatccttgaacaaactttgattttgtgatagaactgattctacaccctaggccctcaggtagccctagtgcttgttctcacacaaagtaacctcttgctttgaaagctagctgaaaaatggtgtggctgtctgtgtaccagtggctgcttccagggctctctctctcagcctgcgttccgtgctgcaccaaggcctgtgtctataaccacctgccttttggcttcatgtgtgccttcaccagcccccagtacgccactgaatcacatttctgaccacatctcgcagtttcagatccccagactgcctgacggggccgtggatgcttgttcgccgttgtgaaagcaaactgatggccccctcccgattaaatttctgagtactctttgggaaatccccaccatttctttctctagacttgatttgcaaacccaaagtgcttgcactgtatttcaaaggaaactcataaccgcactgctcttactgagggtggtgcaagctgcctaaatgtgccccttcatgaagcagctttccatgctgccacatggtcacaaatgacagacttgtacacacagagaaaaccaactggatgagctcttcagcttctcagctgcgccgtgttattgctgttctgggaatgaagcacgatgcattattttattaaataaagattttccctgtatcacagtagaggctaattttattagctctctttatgggaacaaacgtcatcaccctggctggggaggccgggagttgggggtaagggagcggagagaatcacatttggtcatccacgtgctccagtggaggctgccaacatgttttaattggtaattacttaccagaagagttctccagatcctgcagaaaacgcacagctctcagttcataactcacttacagatgattcagaagacatcttcagctacaataaatatcgttgatatagtttgggtatggctgtgcccctggtgtccaaaacaccggagtgttcaataacttcaagaagtgaatcctttgttctcctctctgagaatccggagactccttaggcgaacatgtccttagcttcagaaacag

SEQ ID NO: 63176 - DNA, 1639 bp, Bovine  19866880434557
  misc_feature (1)..(1): n is a, c, g, or t
ntttattcaaacttatgtccattgagtcagtgatgccatccaaccatctcatcctctgtcgtccccttctcctcctgccctcaatctttcccagcatcagggtcttttcaaaggagtcagctctttgcatcacgtggccaaaacattggagtttcagcttcaacatctgtctttccaatgaacacccaggactgatttcctttaggatggactggttggatctccttgcagtccaagggactctcaagagtcttctgcaacaccacagttcaaaagcatcaactgtttagcacttagctgtctttatagtccaactctcacatccatacatgactactggaaaaaccatagccttgactagacggacctttgttgacaaagtaatgtttctgctttttaatatgctgtctaggttggtcataactttccttccaaggagtaagcatcttttaattttatggctgtaatcaccatctgcatttagtcacttagaaattgtgaatctaaccactggacaagaatgacagcaaaattactaggagctcaaaacacacaccacattatggcaactgctattattgatataaaaaaaccataatgtgatcatgattgcacaaaagaaccaacatttgcacatgcaaagcacatataatttgaaaaatataatttctctggaatttgcaaaataaccaatcttgttttttttgaatgaccgttacatgtagaattttttatagataccactaagattaactatcctaataggcctttaaattatgctgataatagtacataatctgtgctaaaagaagcctacatgttattcccctaacaaaccacctggcttgctctgtgctaaaagcacgtcatggctccaatgacatggagtctcttgcatcatgtcttatcaagtttccacaattttgtgactgcgggattttctcctataagacttctgttttccatcatttgcttgtgtggcctctggccacttgcaggtgtttgtttggaaaggagaggcattttccaagatgacacaataagctgatgttctaaatcctgggagcttgagtcctgcctgtttctgattctgggagactttatatgattggccattacccatcctctctatccccatcattgccactgctgcctgtgactttgtcatttaaggctgctaagcacttttccctaaagaatagcctaagccatagaagggctgtggggttcactggttcattgtgttacttgttggtgccttggaaagtgggtcacctgggagttgaaattaagcactgaagagaggagggtaatccgttcatacctttatgaacaactgtggtgagagcagcactcaaaagtggatgataatcatttgtggtttcagaccagactgaagggcgtctatggactgactagctccagctttagccatacagctgacaaaactatagatgatctcaagtacatcagtggtggattttaagttattatgcattcagattttaattcagataatagctttaaagcatcactattcagtatgaatatgtgcaagtcacatttgtcatttaaaatgttctcactgctggggctttccctggggtcagggttaagaatcgcctttcaatgcagagga

SEQ ID NO: 63177 - DNA, 1626 bp, Bovine  19866880467481
  misc_feature (1)..(1): n is a, c, g, or t
nccttcctgaagctgtgttggctttgcagaattctccccgctcattagaacaacaaaggatgcagctgctcgaactgtagcctgccatgttgacatggcaacgggtggctcctggcatggaaaaagggccctgttgtttatgggagatcccacagtataaacacatggcctgcagaagaaagacaaagaaacaaagggggagaatctttcaaatgagttgtcactttccttaccaccatggtcgcaaatgttaagttgagctttcaaagagaaaatatctgagactttgtagttgattggtttcaaagcatcttgaactgacatctgccaaggcctatgtgaagagccgagtggttatttctcccaaatgaattacttaaatatgtaaagaggttttttttctaaggggaaaaatattttttggataaagttttaaatactagtctgccaagttaaaatttacattaccttgcccttccccttaggccttcaaaacaaaaaagttttagagacattcttacaaaacttttggaaaatattctggaaaagaaaatatgtttagtgatactgagatattaatacttggaaaaacaagccggtggtctcaaatgcagtgctggcgggcagatacccccaatcttggaaaccaccatttcaaatggaacccttgtgggaatccttgtgcggaggccaagaacaggggttggcacataaacaggactgtaggtcacaacaaccaggcttgtgatgggaaggccaagggcagagttgttaccaaagcaagtataagaaaccagtggcatgacatgggggcccattctgctaaaattaaaaaatacaaacctacacacaccaagaataatcccttccatgataagtcacaaagagaaatggaaaaaaatctctgagatcaaagaaatctattcttttaccaccactgagtagaaggcacagacagacccttgggaagaggtcttaggaaaatgtttccacttttcgtttttcaagagctatggcaaatatgatataggtttaatcagcttgatttatggagtaaatgataaaagtggagtgctacctctctttcataaactggttttcctttttagaatagttaacactattatgactgaagatttactgtattcttacagtgagcaagaacacacagaatgatgaccccactccatcagtcagggtccgggaaggaaaacacaaaccattgtaggtcttaataaacagaggtaatttaatttaggggattggtcctagaagtaatagaagtactgagaagccaaacagcagatagcgatgcaacccagagattagccacagtggtaaggagctgtgactccatgggttggaggagctgctgttgctgagtgttctgagcttacagcaacaggagtcatttgacagaagccagaatcacagtggagaatgtctgatgggtgcagggaccaaggagacccagtcattgctagagatgccaaaataagcagaaagaggagaggaaatgtgtgtgtgtgtgtgtgtgtgtgtgtgtgtgtgtgtgttagtctctcagtctctaggcaagaacactagagtggatagctattcccttctccaggggatcttcctgat

SEQ ID NO: 63178 - DNA, 2772 bp, Bovine  19866880609644
  misc_feature (1)..(1): n is a, c, g, or t
naaattgaggattagagaatttaagttacctgctagtaagtaacaggtaataaggagtaggtttgagagtcaacactaagtctttcagattacaaagactgtatactttgtaagatcaactagcttttaaaaataacccctccatatatatatacagtgaaatactactcagccataaaagatgaaaaaatgccatttgcagcaacatggatgcaactagagattattatactaagtgaggtaagtcagaaagacaaataccatataatattacttatatacagaatctggagaaggcaatggcaccccactccagtactcttgcctggaaaatcccatgggcggaggagcctggtaggctgcagtccatggggtcgctaagagtcggacacaactgagcaacttcactttcacttttcactttgatgcattggagaaggaaatggcaacccactccagtgttcttgcctggagagtcccagggatggggggagtctggtgggctgccgtctctggggtcgcacagagtcggacacgactgaagcgacttagcagtagtagtggtatatacagaatctcaagtgtgacgcaaatgaacttatctatgaatcagaaagagactcacgatacatagaacagacttgtggctgccaaggagagtagggagggaagaactgggagtttgggttagtaggtgcaaactattatctatagaatggataaacaacaagatgctattgtatagcatagggaactgtattcaatatcctgtaattaaaccatagtggaaaagaatatgaaaaaaatatatatgtgtgtataactgaatcactttgctgtatagcagacattaacacgcattgtaagtcaactcgatgtcaataaaatacattttaaaacaacaaaaaccaaatatataactaaaagtaaaaataacctcttgcctttctgatgtgccagcccttgccttcccctcaccccagcacatgctcttcagagtttgtccaataagtgactggttgtcgaacagctaaaagctgtaaatgctttgtcacttactttgaatttagttgttgaattgtcagtgtaacacaattatattttattaaggacattttttaaaatatttaaaaccatagagcttaatggaaaacactctgatggacagtaagaagactggtttcaatccttaatgtcaccatgaatccaaacaagctgtgagaccttggatacagacttaatttctgggtgcccatttctctcatttgtgaaatgaggaggttaaagtatgtgattactaatgtctctctctgttctaaaaacatgggcctctatgcctcttcttgttttgcttttgtgattctaaaatggcttcagagtacaaatatttcttaaaggagccttaattactaaatgcaaatcaagagaagtggataacattggggctttcagaattttttggaatatataagttctttactcttccaagcaaagctacattttccactgtgtttcccagtccaacattcccaccaaaagaaaagtgtatagtttcttaaataattcatattggaacttagattccttgagggtctggcaagcgttaatcttggataaggtgatgtaaaatattgccaatagccaacctcaggttgccaacccaaaatataagtccctccttgttcagtatatgaatttataacgtaaaccatttaaaagtctacctggcactattgaatagaattgacactgttgggcaactctgtaaagaagaaataaggcaattttgtggtccaagtagttaagaatatgctatacttaaagaaaattttactgcatcatttcagacccaataaagaaaaaactggccacgtgagtgactcaggatcgtctgtcatcagacatgggcttaatccggagaaggtcttcatgcaggttcattacttaaaggtaagcctccctgagtgacaaaagccaggactttttagattttacatgtgaacagtgaaggttagtaacaaggttggggcaaaacaaacatatcgtcaacattgtaaatgacatttgattgagcagattctgatcgtccaacaattaaagcatttcacacccagcatgaagcatgaatcaaaggaaggggaactgttcccttccctgtacctcccttctccccgcttcacgtcagctttgaagagcagagtcttaaaattgctgtcaggttcctactagaagacagagtgattttttttaagtattttaatttgtaaaatccttttctgatagctaaaggagagaggagctgggccccttttccctatttgtccgtaatggacatccaggtttcatgtaagctaagggcaaatgagacagtgacaaatgggttgaaacagagtagttgttccttaagctccaaacccagccctactagtaacaatgcaaagggctgcctgggcaggtcagtccaaatgttctaggtgagcataattgctggtgggtaagttagagttgattttctaagtatttttccgatgaacccatgatgggcatcttttttttctccttccttccttctagggctatttccttctccggttccttgccaaaagacttggagaggacacctatttttcatttttaaggaagtttgtgcacactttccatgggcagctgattctttctcaggtaattagtgagtcctcttgactccatgatatacagctggagaagggtgtggcatgtggtaactagattgtgtattaacaagtagggaaa

SEQ ID NO: 63179 - DNA, 1334 bp, Bovine  19866880628160
  misc_feature (1)..(1): n is a, c, g, or t
ntggaatggttgaaaaagaatgtgagatcttcctatagtgtgatccctcatcaagcagagggagtgctggcgtttccttgcaatcctaaaccaaccagtatttcctgaatgcaagtgctcccaggatgactgacggtaaaaagggcacagcattgagctcacctgtccatcgctgaatgtgtccagttcagacgcagagcctaaaatggtcctgcaggagcaccagtcacagaaaggaaagactctccagccatccaggcagtctgtgggtctctcatttatgagctgtgggcgtgggggattttccttcataacctaacagaaggaagtctctgaatctctcaacttaactttatcgaactcacagcatcgtggctgcatttagcagttactttttgccttcttattttctgtaaaaaagtagatagatttcagcatgctgtttcctacaaaggatgtcaaaatgaataagaagttaagatattactatctacatgtggtatttatcataagacatttaagagagcttacataaatacaagatactctcaagaaattttttaaaattagaaaatattttcctgaaaagaggatattgaagtcaatgaatattttctccaacatgtcatctagataagacaaaattcaggcaagataaaggaagggaaatattcaatacaaacagaggtctgttaaaaacaacttagtgataattttttttaagaccatgtctcaaagattagaaattatgaatttgtgagcagtcatgtagttatcaaattttttagaaaaacaatttagtcttggaatttggggactcgcttcattcttgagatcaagaaaaccctttactgtttagtaagtggcaatgaaaggtaaggaaaaatgaaatgagtctggaaataaatggccagtttcttggcttcagataagcatttctcagagtctttcatgatattattgtagagcacatggagaactaaggcctgggtaatggtatagtctggtggatttatagttgattaaaccaaagaggtcaaacaggcaaagcatcaatgttatatgggaaagaaggcctttaaaggaaaggtctgtatttgagcttgcaatggagaaatgtgcttctcagatttgtaaagtatgtaaaactcatgattcaaaaagatctctaaagactaaagagatggacaaaaatcaacaaaatgaaatgtaatgtacatgaataaaaattaaaacctacatttaggctcagaaatcccactgttaaagtacgcaccccgatgttaagtttgtatagaacacacacacagacacattctagatgttttagttaa

SEQ ID NO: 63180 - DNA, 817 bp, Bovine  19866880638072
  misc_feature (1)..(1): n is a, c, g, or t
natttaccaggagtgcattcgaagtattcctttgagattgttcacagagatttttcaaatttatagttaaatactcaaggtatatcattacatcttaatagctgaaaacccattaacattctggataatagccttcttgtggcaaacaaaaaggtcttctcattggaaaaaaaaaaaaagtatgcaaatacctataaaaggaaagaaagaaattaaaatgtagaaacagatgttgtaataaaatacccaagttcttcgtaaaagttctgaatcaaaatgtagtcttattttagaacagcaatccaactaaaagaaaaattattttaaattatttcagtccctgttgtgtacctaatttctttcaacatattttaaccaaaaaatgaaaaaaaaaaaatggcagaggaaaggaaatgaaaactctgacaaagcagatttacttaaaatcacttttgtatttctaaatatcaagaggtattctttcatcaactacaaaacaacattacttgtttgacttttcaagtaaaattgagccctccctttttattggtttaagtcctcctcactttccttctaactttatctgctaatctcctagattatttcctttccttctagaatcttatttcaacaattaaacctattgaattttcattttctacctccctacaagctatttcctcatcaaaatctcacctagccttaaaaggatctggcttctggcagacttgtacagtctagtttcaagctattttccttgtcatggagaccacacccccttcaaatccttgtcctctagtcaaagggcatactcagg

SEQ ID NO: 63181 - DNA, 787 bp, Bovine  19866880643584
  misc_feature (1)..(1): n is a, c, g, or t
ntcaaagagaaaagtaaataaatcagagggaaaatccatttcccttgttttcaggtgttctttcttgttctagcctcattgtatctgctcccatcttgtaacaggcagcacattcacaggcgggttaggaaagttggagcagtgaggctgtggtttggcgtagggtacgggtgtggaagaagggctgtggtttttgctcaggcaaagggttagcagagccaaattgtggtcaatattcttgaactgagacagagcacatattttatacttctccaaacaatttcttcatctgatcatttaagtcttttagaatttccaccactttggtctttattacacctatctctttacacatattagagataaaaacttttgtaaacaaggatgccttattcattctttcattctacaaacacatattcaagccactctactgggtctattgtgataggaagcccactacagtctgatgaagggagacagagatggaaatatccataatacaagacagaatgcattaagtgctatgatgaggggtaagacaatcactgtgggaacagaggaagtgatgattagttccaactgtagggtttcagagtgttccctgagatgatgacttttgagctgattctgacagctggggaaggaggtataggaaagaaagaaagagatggtgtataatgttggctgggatagacagagaaaaatggcttagcgggattagaaacggcaacggaaaggggaccatggtatgtaggcaaagacacgggaaatgcttctgtcactt

SEQ ID NO: 63182 - DNA, 895 bp, Bovine  19866880703634
  misc_feature (1)..(1): n is a, c, g, or t
nttttgttttctggtgtggcacctttcctgtttttctctttcagccaggtgtattcaggcctggccttccagtttcaaacaaaccatgagtcaaggaaattaacaattttttttctcattataaaagtgatactgtctattagagaaaatacaggaaatctaagaaggtgtaaagaagaaaattgaaaactactggtaatccagttatccagagagctacttactcttaatattttggtatttgtccttgaaatcttttggtggaaataaatattgaaaaagaatgagagcatgctttttattcgtcacttctactttgtgacttccagggtggttcattcagattactgttttttaaaaaaaaaaattcagtgattttgaaatgctgtgtctttggaaagatctttacttgtcataaaaaacaatccccagtatactggagtaaacttctgtaaatgcagactgtggtctgataccactatctcctgaatggatggttggactgggtgatgagggcctctggatgactccttttacctttgacttctgtgtgtgacagtcgatgttaaatgtggcagcagaatgctatttttcctcttctctcagtgtgaatcaaactgacatccgtttcaagatctgagggtatgctgccagctcgcctcgtgacttgtgtgtcgagcttgcagtcacaatatggaaattatggaagatgagcctctctgttcagcaattaactgtggggctatttctgttctactttaagaattacggtgaaattgatactctcgacttatttctaaggaatatgcagttacacaatggtctcctgctttctggcttttattaaaatgcaaatagtcttttttttaaatgcaaatagctaacttcaaagtag

SEQ ID NO: 63183 - DNA, 2284 bp, Bovine  19866880810257
  misc_feature (1)..(1): n is a, c, g, or t
ngggctattgtaacttgttccagaaagtaacattagaaatgtcccaatttccaaacgatggtgaattggcagaacctgatagggtccatccaatatccattctctctctgttccttaccatcaatctatgactttatttggggcagcactgggcccagaaatcactcaccttctcttgcagccgagtgtgttcccacaacccagttctaaatgacaagatgtgagcataagccacggggtggatcttaaagtttatttttgttgtgattttcttctatcatatgcctgtgttaacagaagcttgtatgaagtacgaattcaagcatttttctaacccaggaaaattttaatacagaattgaagatcatgaaagccaggtgggcaaacacctggaaatagcataggggcagagtccttaatagggtacaacacccattcgcccttctcacaagaatgttggactgtgattagactccaaatttggaggtcttttcaaatgaactcgacaaagcagtggcagtagaccaagggaaggaaggcaggtgaggtgtgagtcttttcctctcctaaattcagtaattctgaatgtcacaaaggttctttgtttaagaaagctgcatgttccaagcaattcccggaattttttaaatggcttccactttcctggagaagaagcttgtaatgatctgcttggctctctgcctttagagcctctactggagtcacttaacccccaatttgtaggttcagccctgctctcaaccccatccccaggcagggggagtccacccagtctctcctgcctgtcctccccagtcacctggctcatctatgaaaagcaaggatcctgttagtctctggtagagatggccattttactcctgggtagaagtaaaaaataaatgatttgttaatttttaaagcccatttataaatataagatgaaggtgaaatcttaaaaaaaaaaaaaaaaagtgttccaaaacatccaccatgtatccgcactatgaggtggtcaaggcatttttaacacgtggagaccttctgtttccaaatggtcacaggaggcttaggcaatcctttaggatttattctgattttccaggaaacatcccatttaaaggaagaaaaaaatactttaaaagaattccgtgaagcctccactatacaacgtttaacatacagcctcttcccttaaaaacttacacatttccatactatcccacttttattcaggcaggtaaaaactgtgcttttttttttaacttaaggaaagtaatttgatgaaatttaacaaccctaatgaattaagctgaggaaaatgcagaaggctttaataagagcaaacctattgaaatgaaagagcctatacattgttctactgacagacttactagcagagcaaaccagatgtaggttgccaagggaagttcagcttgtaaattgtaagaaaagagtatactgccaggctctgctgggctgttatttcttcattaaaatgcactgtcaatcaggttgaaaagaaatgtctaattaacaccatagggcaccaaaaatttagtgtcagaaactcaactgctatcccgttttacaactgtatctctctaagcaactccatgcatctctttcaaccttcctccccgaatagagccccccttcgactcaatattctagcttatgatcaaaagcatctcagaaattgcaaaatacattgcattagtctcctctttatagctataaattaactagaactaaggtttctagcaacatcccttcttttgcattaggccctgcatcaatgtgaggaccaaaaatacaatagaacataaacaaccaacaggttccccctcctagatatggaataattaaaagagctctagcctgggagagtctagtgctggcttcaccactaaacagcttgtgtggcctggaggagtcttctttcatactcctaagtctcaacttcaccactcatcaagtagggataagtaacaaggtcttgtcagcctacttcaaggattgcttccaggatcaaatgagatggggcctagaagagggctttgtaatatttgatgcacgattattaataccctgtgtcagcggagttgtgtgaagtccacatgtgtttggttagtaggaagcttactgcatcctgatgcttcctgaggggttacgtagctcccctctgctcacacattgctcatattcaggtcatcggggccattgcaagctcaggatgaatccagggatttgggttggggtaaaagtcctaggagaagggaat

SEQ ID NO: 63184 - DNA, 798 bp, Bovine  19866880873219
  misc_feature (1)..(1): n is a, c, g, or t
nccgcaccacaggaggtgagcagcccatgagcaagtgagcttcacctgccactccccatcgctcacaactgcctgaaccaaccctaccccctaatctgtgaaaaactgtcttccatgaaactggtccttggtgccaaaaatgttggggaccactgtttcagggcattcggttccactggaagctttttttttttttaatctcagggaaacattattcagaggcttctctctctgacactcaggtagagcctgtgccttagcatcacccaccctcttgtttccttcaggctttttaaaagtctacagtaatgtagaatgtgataatctcattccacattaaaatatcctttttatcatgagcaacagcaaaaatcaggaagatcttctcattatacatttcctggtaaatgcacacctttaagaatttcattttgtgtgagaaagtcagaatctgattaagatagcagtttacaaatgttacatttggaggccacacaaaaaatatttcgttttgttctgattggtattgttgggctgagttttagtttcttttctcagctacctgaaatccatatatttgggttataccatcaccatttgttagagataggtgtcttcatagaatttgtagtagtttgggagaagttgaatgttctagaatcatagcatgtatttttgccacactattagcattctagctaaggggagtttattgttccagtttttgtcattataatagagtcctgtttaatgttgcatgatccgtgggttgccataaacttggtacaaattggagtg

SEQ ID NO: 63185 - DNA, 1014 bp, Bovine  19866880877804
  misc_feature (1)..(1): n is a, c, g, or t
ncaacttttggtgaggtattcacctccaaatatccacaatctgagatggctattaaaatatactagtgctttttccaagtgcatgtctatgtgaagctggattttcttatgcttcaaccaaaaaaacactgcatcagactgaatacaaaaatactgtgagaacctagctgtcatcttttaagtcaaaaaataaagaagtttgcaaaaatgtaaaaacaatgtcattcttgttagacaatttttttttcttggaaaaggtcagttttttgttaaaaaatatgctatttgtactaatatttaatcaatttattgttattttaaaaggaaatgataaatattaaaaagatttttaatttcaagtacggtaaatattgatagatagaacccacatttttaaaaaaggtcactgagatcctcaataatttttaggaatatacagtggtactgagaccaaaacatttgcaaattacatttccaacatactgaagtattctaaaaaaaggaaaacagaattggatgatgaagtaaagggtcatcacttacagcaaaaaagcctcattcacagcatcaaagaactcagggcagagtacttcctgaggttcatgtccatggtaggtgagcagagcctctaccagtggttcaaaatctggcaaagtaagaagtgggacacagattcgtgacagggaccttactcgttcaggagacatcctatggaataaataaaatgagcagtaagtaccaaaatcttagagccacacatagttaaaggcatataaaatcttcatgctgaaagaatttaattatttctttgagttattttttgattttaatttctttgaattatttctttcatttctgaggttataactaccaatattcatcacatttgcaattaaaacaaagacacctaaaatatttattaactagctaaaagtaacaaaaaaaaatccatttgatgttaacatgaataacattttttgttaaaaaataactatattttacaaaacaaaaaaa

SEQ ID NO: 63186 - DNA, 3674 bp, Bovine  19866880883177
  misc_feature (1)..(1): n is a, c, g, or t
nacattactttgccacaaaggtccgtctagtcaggctatggtttttggatgtgagagctggactgtcaagaaagctgagcgccgaagaattgatgcttttgaactgtggtgttggagaagactcttgagagtgccttggactgcaaggagatccaaccagtccattctaaaggagatcagccctgggtgttctttggaaggaatgatgttaaagctgaaactccagtactttggtcacctcatgtgaagagtttactcattggaaaagactctgatgctgggagggattgggggcaggaggaaaagtggatgacagaggatgagatggctggatggcatcactaactcgatggacatgagttttagtgaactctgggagatagtgatggatggggaggcctggcatgctgggattcatagggtcgcaaagagtgggacacaactgagagactgagctgaactgaagatgagtgcaattgtgtggtagtttgaacattctttggcgtttcctttctttgggattggaacgaaaactgactttttcagtcctgtggccactgctgagtttgccagatttgctggcatactgagtgcagtgttttcatggcatcatcttttaggattttgaatagctcaactggaattccatcaccctccactggctttgttcgtagtgaggcttcctaaggcccacttgacttcacattcctggacgtctggctctaggtgagtgatcacaccatcatggttatctatgtcatgaagatcttttttgtatagttcttctgtgtattcttgccacctcttcttaatatcttctgcttctgttagctccataccatttctgtcctttatcatgcatgaaatgttccctcagcatccctaattttcttgaagtgatctctagtctttcccattgtattgttttcctctatttttttgcattgatcactgagaaagcctttcttatctcctcttgctattctttggaactctccattaaaatgggtatatctttccttttctcctttgcctttcacgtctcttcttttctcagcagtttgtaaggcctcctcagacaaccattttgccatttgcatttctttttggggggatggtcttgatccctgtctcctgtacaatgtcatgaacctctgtccatggttcatcaggtactctatcagatctaatcctttgaagccatttgtcacttcccctgtgtattcgcaagggatttgatttaggtcatgcctgaatggtctagtggttttccctactttcttcaatttaagtctgaatttggcaataaagagttcatgatctgagccacagtcagctcctggtgtttttttttgctgactgtatagagcttctccatctttggctgcaaagaatataatcaatctgattttgagtattgaccatctggtgatgtctgtgtgtagagtcttctcttgtgttgttggaagacggtgttcgctatgaccagtgcattctcttggcaaaactctgttagcctttgacctgcttcattttgtatgccaaggccaaatttgcctgttattccacgtatctcttgacttcctacttttgcattccagtcccttataatgtacttctatacttcataagtaatgaattatacttcatctgtttcataaataatgaatcttgtacttctcagactctttctatttctaaaattagcaaatttcacatcaacaagctgtgttcctatgactatatgcatttgactgtctgaggaaccatccccagaagcagtatatgttggtaatttaattcctgactttcattaagaatagtcactgtatcctaaagaatgaacacacttgcaatagaagaaaactgacttcctctgaacaagtaatctgtagaattaagtattttgtaaccattcccagtatgcccaatgctacatagtaagcacatatggaaaaatctctccttttcccctgaattgcctacaagaaaagaggtatggcagaaagaagtacagatatagcctgaggagagatgagagctatctggaagatgatgtttgagcagtaactttcttctagaacgtatgcaaaccagaattcatgttctgtaaataactagaccttgaatgtcctcagatgtcaaattccacagatatttgttgagaacctactatatccatggtattttacttaacataggcatgaacacagaggttaggagtcccaaattctttataggcctttggaggatggctggaggatggaggtaactataaaacgaggcagggaagtcaagggccatgagagtgatacagagggcttcgcagcttgagaggagaaagaggatttggagcgttccagaatggaatctgtttcacacatctgtaaatgtgctcatttctgttttggtgattaagggtgataagacagtttctttgctgtactgtagctctatttattagtatttaatcctttcccatttactccccaacaccccacctttcttaagaaaaatatcactgtacagtaaatctttcaaagcctctaatggtgttgctgagacaatcatttaagcatttaaaacacacaccacatagtacatttattttagaagcagcagtggttagccactggaaactaaccattgggtttgataaaggggggaattttatatgttatggcttatgacagagaatggaaaaatgctttagtgagatggactggcatttaaaattgaaacacaataatagcaaaaagtgctgaagtcaaagaactgcttagaaatatggttactatttgctgagagaggccttttgaggtggccagatatatgcgtttgcaaccacagtcagttcagttcttccctaaatgtggaactgtgaccctgattgataccagtgagagttatttacttgcagagaaatatttagatgattcataaatccagggcaagtaagaaataagtgtaatagcaacacggttttagtagacttatacattatacgtaacttaggctggaaaccatgcaaaggtaatgggtgatcttttgagtcttctgggtttgcttaaaaattctccttttttcccccaaagctattatattctgtattgattctagtccacaaaactgaaagaaaataatttttttaaaaaggtagagtggaggtatggaagagagtcttagcatttgatttatgacttgtacaatgtaaaggaaatgatcatgagagctggaggatgagaatttcaagaaaaagtatcagcaagtgaaaaagcatcagaaattgacgttgggcaaattgctttactctctggacgtcattatctttatttgtaaaactagagtgttagaagagaaccttaaggaatttttcagcttgagaattccatgaagtagactagttaaaatggacagaaggaccagatatggtttttgtttgcttattttctttccagtttcattgagatttaattgacacataacattatattactttaaggtgtataacataatgttttgatatatgtgtatgttgcaatgctttgttttaaaaaatggtggccttggaggtgtttgaaacgttggtaataggatggaggcatcagttcagttcaattcagtagctcagttgtgtccgactctttgcgaccccataatcgcagcacgccagg

SEQ ID NO: 63187 - DNA, 1012 bp, Bovine  19866880948443
  misc_feature (1)..(1): n is a, c, g, or t
ncccaggcctccactttggaaacccagcgagacatctgcctttcacctgccacagttccaggagttcctgaggcggatgtatgaaaccttgaaagagatggtgagtagtggatcaaaatgaagtaatagtgttattctgtgacatcaggaactcttcaccagacttcattaagcctgaatgcagtcagggacttgtggtattgacctcacatactgaaggattagacagacaaattacctataagtaatggagacaggaagtggtttgctagtgtctgatttattatgactccagtcttttccttcttgaagagttatattgtcacatgagacttcctgaccaatcaagttgtttttaaataaacaagactttgacacttgttgtcaggtcataattggggttcttttaaaggtctttgtatctctcaaatattgaagagtttgaagaaatgcttactcttttctcaactctgttctaaaatgggctcaactaagagatgataaaatttaagatctcttctttcaggtattttaagtggacttttcttgtgactactaagattatgagtgtcttcactattgttatgtaagttattgtgttcaaaatttgatgtatttttgttttgacataaaatttcttagttttattgcaataggtatttttgtgaattagtgcattttcatattatgaaaacattatacttattttctaatttcaaaatgagaagcaaaattaccatttaatataggtattcttgtgttaaaattttctttccttaatcaaaggagcaagtaggaaatttgaagaataattcatagtgatgatgtcagttctcatgtctctagaaagtagaaatgttgcagtctgtatgaacaactaatgctaacttttttaacaagacttttgtaacttgaccttaaagtgattctggaaagtccagggctgacactaatgctgagacatatgtgaggaatttattgcttcagcagtaggaaatgcgtatcatttcag

SEQ ID NO: 63188 - DNA, 3304 bp, Bovine  19866880958583
  misc_feature (1)..(1): n is a, c, g, or t
ngatcacgatttgtcagaactcttgactatgaccaagccgtcttgggtggccctgcatggcatgattcatagcttcattgagttatgcaagccccttcaccatgactgtgatccttaaggggatatggtcttctgttgttgttcagctgctaaatcatgtccaattctttgcaactccatggactgtagtaccaggcttccttgtccttcactattccttcagatccatgaccactgagtcagtcgcgctatccaaccatctttttctctgccacctccttctcctctgccttcgatctttcccagcatcagtgttttttctaatgagtcagctcttggcaccaggtggccaatgtattgtagcttcagcatcagtcttcccaatgaatattcagggttgatttcctttagtattgactggtttgatctctttgcagtccaagggactctcaagagtcttctccagcaatggtctttagtatgtcacataaaatttctctgatctctgtttcaatccttaactcatatttaactttttaactaatatctactgctatcaactcaaactattttagatagatgaaagaaatatacttttctgatacttagaagtattttactcctataactttcttattctcatatgtaatgatcatactcgtaaacagtactctcacaccattcttgaactggaactagaataattaaaaaacaatgtaagtgaaaaaacatgatttctgagttgaataatatcctccaacatagttctccactttaaccacttgaagggtatccagataggccactgaattgtacctatcaaaggaaataagtctattcattgtctaataaagaataaaatttgagactattaatcaataaaatcttaatggatacttcataaaacttttaattactggcagcctatttttctatcttgggcctgggaaatatttatttaattctttaaataattatttaattctccagccaagaattcaccttgatcctctttccctacctgggtaaaaggcataaatccaccattggcagaaatactataaataacatagttgtcctgttaacatttttctaaaaatactgattgaaatgtcaattcggcaaagcaagtctgcatctatatcttggaataatttagggctcagagtcttctgaatgcctttctggacccttcaaaatatgtagagatttccgtctctggtttttaagttgtagcatgtgttattgggaatttgaagagcttttccatgactcctttctcatcacactgagtttctagtgggttgggaccgagccatatttcttctggcctttaacaaagaaaaagaaaagaaggaggaagaagtaaaaaaagaaaaaaagggagtccacatgtctttggaccttaggatgcagtgatttctttgaaatcaaacagagggagaattattgcccctcttctgtgtcatggactgatgagtcaacatttgaaaagtccttgaaagttcttagatgaaagagcacagatctgtatgaagtattattattataaaaataactcagttttcatgtggttatattttttccaaaaagaatgttcttttgtttgctgtttgtaatcaattaaaaaaaattaaaaccaccaaaagtagaatattcttgcagaagaatattaaatcattaagacttttctgggattaaaaaaagcaatgcctttgaggatgctcaaggtgctgcctggatggtaatattggagaactgcattaataaagtttaaaactttttataattatctttaattaactatagcaggaaaatttctaataactattttctacttttttttctatttaggtttcaagagaaaccatatttctccaggatcacaaaataaaatataattctcttgtattttttacatatccattccttctttttttttttttttttgaagagaagcagcattccacattcaggctgtacacaagaaggactgtactcaatcaactactcatagtttcctcatcctccaccaagagtaggacttatgatcgtctcacttcactgagcacagtggctgtgattagactgaactatgttgggaatatatcatgtactacctaaatctttttatagcatgctgatgaaacagagaataagatattactgttttaaagaagttgtttgaaaaaaaatactaagcattttctcctgtttattaagccgataaatatgtatgaaatacgtgagtacaataaatagaatagagaaaatggatttttttctttatggtccgcaggtaacagctaggattctctaggttgatgaattcttgtgtacaaatcagatacagaggaagagaaaagtgaaatgcattggagttttgttgttccttcttccaacttggtccaagtctgagttacttttcagagctatctcataaccatccaggcaactgtaatttattaagttgtactctggctccaaagatgtcaggtgtttcccaaagtgatgagctaaagaccacacctcacatatgttagctccaaaaaattagaatcagaactttaaaattatattcttagtcaaaaggtataacaccttctttcatattctttcaaattaagaaataaagtagaggtgtggggaaagtattcaagtattttagcagggagttttctcctaagtttcctttggccactaagccaaagcatttttgacagataattggactagaaatagtgcccttggaaaccatcagccagcattcccacccattaattaggtgattcattttcatcttttttcccctccccaattttccccccagtttctttttcccacccttttcttgctggtttttctttgcatcatctaatacctctgctctcctactctatttatctgtgttataactcacagcctctggatatagttcctattcttattgcctctcacagcctcttggtacctctttgacagatcctcctgttgtaatacttagaaagtgaaagtgaaattgctcagtcgtgtccgactctttgtgaccccatggactgtagcctaccatgatcctgcatccatggtattttccaggcaagagtactggagtgggttgccatttccttctccagaggatcttcccaacccagggatcaaacctgggtctcccgcattatagtcagatgctttactatctgagctaccagggaagtcgttgtaatacttaacctccctctaaaaaaccttaaccctgttgtaagtgagaaacctctcggaaggctctcggaactgctccaacttc

SEQ ID NO: 63189 - DNA, 1493 bp, Bovine  19866880971918
  misc_feature (1)..(1): n is a, c, g, or t
ncccccaaaattaagtttcacacatgatcccggatgcttgttcagtgaacctttcgtagtttgtgatttttctaaaacatttaataataaatgtgtttcctttaaatataatgtttacagattttatactgattatcttttctttctgttttatcaagcctacttattttaaccttcatttctgcagatgaaagccccaaaatcctaatatggtgcttgtgttgtctgattaagaaagatccacagaattctagagaatcaaaacttaattcctggacacggggtaagtgtacaaaaagccctgtactgctttaaattcaactgattatttaaaaatgctgctttgatagtctagaaactttcaaacacatccttcactgttacattatcttgctggttataaagtttttcaagagatttcatttttgtttgattgtgacttccgtatgagatagatcctcagggtgaacctcccctatgcctacaaaagctaattttgagcagttttagaaagttgctcttaggtaattgaaagaatgtactctctttccttctatgatagcaactgtttcttcctaccaacctacattaaatacttatataattcctcttcagatacttctatgcctctctcagaatgcattccgtactaaaactgaattttgtaagtgccctgggagcactttattttgtgtcctgaagttggtactctggtcagtgtgctcagactagcatctggtactgattggctgttgctgcaaacaccgtcaaatcagttacccaaccatgctagttcaggtagctgacagcttcctgaattcccgctgtctgtttctgctttcttttgaatgatgggcacaaagaggagaattttgtaaagctgtgcttagctgccctcaccaccagtaacttggctgttctttcttacctcttgctgtcctgctgcagtaaccccaaggacttacatgaatgtcaaactccacttactatgcatatggtccagattagctgcttagtattatgaaatcacccacccaaattaacgcacatggttttgtctgactggtgatatcattccattcactgctttttaccattcctttgttttatacaaagtggctggcagagataacagtgtattttttgttagattaaaaggagaattggaaggacggtaagaagtgaaaaggattgagtgaaggaagggaaaaaaatgcaccttttaattggaaagaaagttaatgttaagagctaaagaaaggaactgataaatagaattagggaagaaaagatccgaaaaacaggctatagaagtagaataacatatttagttttttaaatttcttaatcattgcttttgttgaatgtttgctctcttaatgattatttaggacatatatttttattggctagctcattcagtcctggaataggccatctaataaagtatttttagaggcatcaggttcagttcagttcagtcactcagtcat

SEQ ID NO: 63190 - DNA, 839 bp, Bovine  19866880992213
  misc_feature (1)..(1): n is a, c, g, or t
ntttccctgtgattttgcatgaaatggtaaacaatgtaaattcgattgaaaattgttcaatacagattctagctttgactcatgttcccaaaattttgttcttgcgtgtattatcacatttgagctctttctcaggaaggcaaagaggactacatgacattaacaatattttttaacatgcttatgagattaacttaaatttgttacaggtcttattttttacagtagtatgggaggctgttgtttttttttcccccagataatgaatcaaaagaggacccagaaagttgagagattccctgcttttcatttttccccctttggccaaagacatgcaaataacttgccacaaataacaaagacgtctgcagagcactgccagtatctgagcgaagaagggttattgtggaattgattccagtgtctttggccattcctttggatgctcagtatggcatgttaggcggagcttgggaaggaggcagcagggcattgtctccaggcagtgcagaaagctaacctttttatagcgtattataaattatcctcatgctttcatccctttaaagacctaaaacatttggacttgagaatctttttaaaaggtgtgcttgaatcctgttttcattgctaagtgaacaacacccatctagaccaagtaagatccattcatggcccctgatctgggtcccagccagaccagatctctgcttctgactctgccaaggtccagcagagcgctgtacacagaaggccagatactgggaccaccagctgcctagatgcttttcaggccttttgtgtagttattggtcttgaacattatttcttccaaggaa

SEQ ID NO: 63191 - DNA, 1127 bp, Bovine  19866881022448
  misc_feature (1)..(1): n is a, c, g, or t
nattatatcccaatttttaaaaaggctcagtggtaaagaccacaagtagagtggaatgagtcaggtaaattactagtgctcataataatgttacctgtaaatattgaacaggattccagtacagagatagaatatgtatttgtaagctgatgtgacagatgattacttgagtagcatgatttaacataagcagccagaaaaggaagaaaaaataatggtgaatatctgaaatcacattttattgaactggtagtccattcaacaccatttcacagtgccctttcctcgaatagtgccatgatgtcattgaagcttctctgtcatttttaacaaaacagaggtaaatctattaagtttttccaaaacatatccaaaattgtgattttcaaaatgaaatttgtgaattctataatgaaatcagagaagtcaaaatggctaggatgatactagacctatactccacatagagaaaaccagacacaaattgcactatgtggggaatctcattaaaattgtctccaaagttaatgacaagtgtgattctcagagaaagtagaatagggtacttggcaaaatgcttttctctagtggatattgcataatattcatgatacaagtatggaaaagcagttactgttatacaatagtacatgctaccagatctttttctttacatttgaggaaaaccagtgatgagcagattatgaatcaactcttcatctatgtgcagtgctcatatgaaagagaattgcttgatgagtttctgttcagtgaaaacccttgtcacagggaagaatgttttgtttgttttggttggtgattatcttgtgagccataaaagagaatgaaaaggtatgttggaatcagtagtgacaggtaaggaagaagaagggacattgctacatgaataaaagaaattgcactagaatgtgaataacagcattatttcattctcagagaacagtgggtgatctgcacggtgactcttaatcctgattgtagttgaaaggagtaatgaaaagtgtgtcaatttatcgcagtatgaagaaaatgagcagcaaatagcttagtggaggtgaaggtgcctcacaaaagattttagaatgtggaatgagttaaaaacttat

SEQ ID NO: 63192 - DNA, 1457 bp, Bovine  19866881073242
  misc_feature (1)..(1): n is a, c, g, or t
ntccactggtgattgtggtaagcaaatagttggaaggctaaaaacagggcagggcaccttggtcaaagaaagtacgtggtttctaaatgactatgcagcccatgtggggaactcttcaaggggctgaaggaaagggggtatgagtgcaggggtggtaatctgaatcagcctccctgtgtcaacatgtggctgggacgctgcgtctatgggaaagtgtccatggaaaggttccaggcctgacgccactgtttggggaacttgctgagctgaggccataggaactggacaagttgaagaccacccagcatttctggatggcctgttccctatggattagcagacataattttccaaactaaataaattttattagttgctgagggagaacatgctatcacaagtaaaacaaacagcaaggagtccaggcctactcatggagctgctgccctcagctttccatccgagcactgtgggtggagaagggtggctagtctctaagcgggtcacctccccgccagtaagttctggagcggcttcacacagttttgcagagcatgccaaggagcattctccttgttccctttaattcagctcttgttgaaaaagtaacactggaaatacaggttgttaagaccatatgtgtcaataaaatacattactaaacaaatcagaaatatagctaccaaggtgaaaggcaaagagcattttgcttaaaagtaaatactttcaaaaactgctttggagggtgaaaatgccatgcggtggggtgagccactggaatctacagtgtatgctcaggggaatgacgtgaagggcacctgcatgtggagaacacttactgcgttatacagacttccgggtcgattctcatccaatatcttacagatataacaaagataagcaatcagactcctcagaaagttcagactcttgggtaaattttgaaataagcttagagtagacagaaaaaagactccatggttgtaaccatgaaaattatgttctgacccttttttaaagcatcaaataatttaattttctctttttctttctaaatcttaccttaacaaattcctaggttataacatttcattaaaaaaaaaaaaagaaattaagggcttccctagtagctcagtggtagagaatccaccttccaatgcaggacacagggttcgatctctgatctgggaggatctcacatggcgcagagcaagtaagcccgtgccacaaccatggagcctgtgctctagagtccaggagctgcaactcctgaatcccatgtactctagagcccgtgctcagcaacaagagaagccatggaaatgagaagcctgagagccacaactagagagcagtctctatacaccacaactggacaaaaaaccctgcccagcgtcaaagacccagcacagccagataaataaataattttttaaataaattaaaatatagactgt

SEQ ID NO: 63193 - DNA, 1013 bp, Bovine  19866881089404
  misc_feature (1)..(1): n is a, c, g, or t
natcttgaaatggaattccaaggtttccatttgatggtaaagaggggaagtggtcattttcagcacactgactgggaacatgaagggcagatttggtattccgtctttccggaacaatgtctagactttctgaggagtcacctctataaatagcacagttagttaaccaagaaataaaacatttctacttcaagctacttcgagctccactctggggttaaatcagggtggatttttgcaatgtactcacaaatcccatgaagtaatcagttttggtttttttttaagtaatacatctttaaaggtgagcttcctcacatctttggccttttaaagttactgcttcttttgaggaaaaagtagctgggatattcttccaattacattttagtggggagtaaagtgacaaggaaatctctggcccgctttatgcaaacaggcctacagggcttggacatggtgggttccagctgcacaatggctgtagtacgacataggcaatgttcccttgagcaggactattcatatactgcgctttgcttgagaactatttcccgagttggtgctttcctccaaaggagtctagccttaagagaaatacacacaccgctccacgccaaagcacagacacaacacagtccagaggccgggagcgtgtgctcaccccgtggagtggcttcaggagtgagaacgcacacgactgggaatagtccaactcagacaactctgcacattcaacctcatgcttctttttcacccacagtgtatattctattcagtaatgatgcttctgtagagaaataaccaaggggaggaacaaaaaagtatgagccgtttctttgcaatggaaaaatggaaaagcctggcttgactggccatttcaggctcaagggctggaagagattaggggcctatgatgacatcaatagagagagaagattacaaatgtaggtagagggggtgattgcttcaggaaggcctttcaaaggcctgacagcttctcttgaaggatg

SEQ ID NO: 63194 - DNA, 2552 bp, Bovine  19866881124077
  misc_feature (1)..(1): n is a, c, g, or t
ncttgggggaggtccgcctgagagagtcgagagcgagcctcaaaaggaaacaggttttgaaaacttacttttattttagaagtcaaaaaacatacacatgcacttcgaattcaggtgactattaggtcagcaccttattattcatagtcttaatggaaaacacccagcctggaggccctgagaggccacagaacatttggagagaccatttcactttgtacaacctgtacaacacgtttatcttttgtttttgcaacatcttggtaactatagaacttctagggctaattctggatagtcccaagagatggaaacataattaacagtgctccatataaaatacaagttactagaccatcacactttaattattctcagaatctaactctaatgtaataggcatcaagttacttctagaggaaagcacagcagtcctatgctatccgagtcttccagatctttctgatacttccgcagggtcctgtcacggccccgagataccgtgctctgataagtgaagcagatgatgcaatcaggaagcacgttcttcaggttacccttccaatcactcggtcacgtcacaggcttattccagcctgcttggttgtgcggcaccgagggcccaggatcctgaggagagcagcccacgccaatcaaggacttgcagctctgtattgtaattacctccttgaaccgtaaggcaacagaggggttacatcctgccaatgccacaataaattaaacacaataacaccctctgaaatccccctttaaccataatggaagctctgcatgtctatacacatgatcctgataaatgcttttgtaaatcaactgacttcaaaactgtttgggggaaaatggttttaaaccgtaaagtggagactgaaggttatacaatgcaatgtttaaccggaatgcctgctttctctctctctctctgtcatcctgggtttactgataggctcaggcctgagggccacaggtaaaaagagctcaaagaagatttagaatcacaaggttgcagaatcaaatcaaactggaatttttccatagagagaagacttaaagaaaatttaataaggaccttgaaagcaaggaaatagctcagttactatattttgccactgaaaaaagaccagagaaaatgaaactatagcatgtatctttccgttagaaatagatttacctgacaataaaggtaatgttttgaatgggctgccaggacttctaaaagcctttgtttattttgaatattatagttatttttatataaggtacattcttatttctcaccttaatatgcaactttttttttttttttttttaatgcaactgttttgaaagatgagttcaagcagaatttccctaaaagtatctctctttctctttgggctctttcaatctttatatctattttcttttctttttttttctatcaaacattgtaaacgtctagatcagcagggtttgatttgggccagctaactcacagatgaacgcagcatggctgctggtcactgtgaccctatccacggtcccctcaaaggccccaagatgggacggcaaagaggagcctgggagacggggagaaggtaaagcagggccgtggtcacactcttgacctggtagggactgatcaggacccaaaaagagagctgggatacaggaagaaggcagcagattcaattatgattctctcacacagcctccaatttgaaagagagagaaaacctaagttctaactggattaaccaaacagaaggtatctcggtggactttgtgtaaactcagcccatctcagtgcgctgtatgagagacagacacaccctgcccccaacacaagcctcagctcagcgggcaggggaacactctccagtccagtttcctggccaccaacttaagatctgagtgttcaccatctatctctcttgaactaactttctccatctgtacaagaggaaacaaatctctgcaccatatctcccctcggtgacaaaagcgagtaagaaagccggttggagcccacgaggttcctgtaagatggaggcctggaagcatgacacctcccggagagctttgtttattcagagtgcattggtctttactccgactcttacaaaaatgcacataaattccagagctgccccccacagagggaaaacactggattggtcaggttctgaggacaccctgctagcctgggcccctgacactggattaggcaatggggcccatttggtccactgagcaccacactgcccaggcctgagttactgagtggaggggagcctgggcagcccctgcatagaggcgggggttcgaggatggcagcctgacaccaaaatagctgtcagaattctttgtagttactttgttgttctaaccatttttctgggggtgtcattttgtatcttttaagtatttgatttttcctccagtgaagggttagaagtttattttttgaatgattttctttgttaattgattcctcctcttgttcataggggcttccatggggctcagcggtaaagaatccacctgcaatacag

SEQ ID NO: 63195 - DNA, 1940 bp, Bovine  19866881251426
  misc_feature (1)..(1): n is a, c, g, or t
nctgaaattaaaagacttgctacttgggagtaaagctacaaccaacctatacagcatatttaaaagcatagatattgctgacaaaggtctgtctagtcaaagccatggtttttccattggccacgtatggatgtgagagttggaccatacagaaagttgattgctgaaaagttgatgcttttgaactgtggtgttggagaagactcttgagagtcccttggactgcaaagagatcaaaccagttagtcctaaaggaaatcggtcctgaatgttcattggaaggactgatgcttaagctgaagctgcaataccttggccacctggtgagaagagcctactcattggaaaagaccctgatggtgggaaagattgaagccaggaggagaagggaatgacagaggatgagatggttggatggcatcactgactctatggacatgagtttgagcaatctctgggagttggtgatggacagggaagcctcgtgtgctgcagttcatgggatcacaaagacacaactgagcaactgaactgaacctctggttgaatcagattgagttttttgaaagaacctgtttatcatcttcgggaaagttctagttgaaactggaaaatttttaattttattctagctcattacgtattatagggacttcaatattgttcattcaaaaattcagtacattttagaaactagctattagttgaccttagctttgtacatgtttgttactttgcaagagtactcttaaggctcaaatcaagttaaaattagggtagatggtgtgtacctatacagtcagactaaagctgtatttttttcctgtcgacacttgaatagaaaaaagtaacctaagaatcatgctacagtgtacagtcttattcaaaaccacatatactatagtatttttaaaacctggaaccaaaatgtagaatcattgtgtttaatagcagttaaactacatctgatattacttgtatgactctgctgctctgtttcagcttttggattacattagtggtatgagaatgatttttatatttaagtaagatacactgcttcactgcacagatggtatcagttttgaattacagtactaagtaaaaaaattctagaacaacaatgattttgccagtccgttcttactgattatttattttggatgattgtagtccttttgaaggtagcagacttaacctagaaactggagccaagaaccgaatgggtgggcactcctcctattccctactacaggtctgctcatttttcccaagagaatcagtgcaagttctccgtgaatgcaagactttacttccttaacaaaactactgtcttgattaacttcactctgctcctcgtttaaataaccacgggtcaggtaagtactctgtagctctcatatccctatgaccttggcacagtccctttttttttttctcatttttttttcatcctccctagattagctcatccctttccatggctacaaataccgtctatctgttgatggttcccacatccatgtctttagctcagatctgtctcctagcctacatactcattggacattttcacttgtgtgcctcaagtatcttgttctcaacacgccctaaactaatgcatctttcaatctaggtgtgtccttattgttctcttccttcttttagtacacagtggtaccctgcatctagttccctggtcagaaacccgaaagtgaaagtcactcagtcatgtccgactctttgtgaccccatggaccccaaggactgtagttgtctaggctcctctgtccatgggtttctctgggcaagaatactggagtgggtagccgttcccttctccagggatcttcccaacccagggactgaacccgggtgtcccacattgcaggtggattctttactgtctgagccacaagggaagccccggaatgctggag

SEQ ID NO: 63196 - DNA, 1036 bp, Bovine  19866881313992
  misc_feature (1)..(1): n is a, c, g, or t
ntgcctccccgggccgtgggtcccgcgttgcatccctggcgcggagcccgggatcggcggcggcggcgcgcgacaacggtgggtaagatggccctcgtccgggggctcttgcgcgcaccggtgcgggggcggccaagcggggtagtgacggagggagctgccggggcgaaggtcacggcctcggctcgtcgcagacccgagggcccgcagcgttgaggcggcctctggatgccctaaaggtgccggtggctcccccaggtgaagccgaggaaggctgcgtcgtgaggccgtcgatcgtttcttttcttatgctgaggggtggccctggggacctgtcgtcctatgtttaaaatgccctgtggtttttgaacttcaggtcgcgaaatgggtccgagtgaaccggagaccccgaaaacggaaacgaaaggacagagaagaagtgtttgagaaggtaagggtccccgaaagagagcactggatggagttcttgatcagtctccccatctgcccccctccccccaatacttgatcacaacaatagggtagcattttttttttaacgttttaattaaatttgcagtaaaccttagatttacctaggtatagttctatagaaatactgattgataatccaagtgattatcaacgtactttgttctcaggaagtgaaaatgacccaggatgcagatttctttcatgctctttaaatagagcatcagaacaaaaagccagttccattacattattacattagaccagtaacatttagtatggtatatggtattattatgatataatatctctaaaaaccagggagtgttcggaataaatgacccacagagtaaggtttctctgtttgatcctgagagagaccactcacacgcgttaatttaggctatagatactctgaaaaatggagagagaagatgaaagtagtgtattacttttgaaacagtggagggattttgtttacttaaagcaaatgagaaatttgtttttctatatttagaatttcagtatgctcctttgcagaagt

SEQ ID NO: 63197 - DNA, 1059 bp, Bovine  19866881521650
  misc_feature (1)..(1): n is a, c, g, or t
ngactgataagtaaagagcacagagaaataattatcaattactgaaatatcttcagtgcacttcagagcagagaaaaatgataaagctccctattacacgtggcttgttcttaaaagattttgattgtgcaataaaaggcttctgaatgcttatgctagttcctgactgttgcatacccaattttcttaagtacctcaatttgcgaataaacggtgtgcacaaacatgcccaagaatgaatgtaaccggctctccctccaccccctcctcctggggttagacagggtgttgtcctgtttattcttatctcccagccaatgtgtaatagaagaagcaaaccataacgtgctggtacaaagggcctgttgttttcagccttctaattgtgctcctttctattggggaaggaagcagtcataaatttttgtcattatcttaagtagcaaggtttcacagtttggggagtttttctttacttgttccttgttagcttccagttgaatttttgaatcccctgaactaaaaactgccatacttttaaacaaccctccgataaattttagggacttgtgacccttgatttcaaggcaggatgcaaccatagtgactcttcccttggggaaccggatttcaagccctaaattagtgcacctttcagctcaccaaggtttccagctcatctgctctctctgatgtgctgtggatttgggggtctatgtgtgagttttaattctttgttattgtcaccatttgtttcccagactttaataaattcttaaacttctttctgcatggattgttttaaaaaatattttaaaggagcacgtctttcccccgttttcctgtataactcttctgcttttacaaacaagtgggtgtgaatgatagaaagcagctcataccttcctttcttcctataaaattttaatccttcgtttactggcacccctgccgttcactggagcaatgaacagagtgtatcgtgggtagcaaggtccatgggtctacacaagggggctcagtccccctcaaagctttccctttgtgcttatttctcca

SEQ ID NO: 63198 - DNA, 685 bp, Bovine  19866881886965
  misc_feature (1)..(1): n is a, c, g, or t
ncattctgagggtaaagcctgtgtttctctcatctttgaatcatgcacaatccctcacgaaggacagatatacaggctatattcctagaaagaagggaaggggcgggaaggaaggcacttagctggaggggtgatttcagatcctggaaaaagcttcctctggcaaatctcatgcatctggtctgggatgcttgacagttctgtcgaagcctaaggtctgatacagttacaaaggaaattttcaagggaaaggaaacacttttaatccctattattcacttggtgtctagtcttagattactgcaaatgagattcaaattctttctggaaatcaggttttgaaagggagtgaaaagaaggaaggctagggagctttcatttggggcaccaaaggaaaatgtctcctgtttcttcccggtgccctatgctgtgaagaggtcaatacatttttcagttcagttcagttgctcacttgcgtccgactctgcgaccccatggattgcagcatgccaggcttccctgtccatcaccaattcccagagcttactcaaactcatgtccattgagttggtatgccatccaaccatcttatcctctgtcatctccttctcctcccgccttcaataaagattgaaacatcagggtcttttcaaatgagtcatttggatagtgtcaaatcagatac

SEQ ID NO: 63199 - DNA, 919 bp, Bovine  19866881942555
  misc_feature (1)..(1): n is a, c, g, or t
nccgagatctctgtgcagcccgtcaccatggctcaggacacactcagctgccagagccccgagagcaccagctccacaagggacctgctctcccagttctcggactccagcctccactgcctggagcccccctgcaccaggtggaccactttcatctttcgctgagaagcactatgctcctttcctcttaaaaccaaaagccaaggtaattaccaaaacagaagactctattcttcaaaaaataacaaagcaggcgcctttgaaattcattagattgcttcttcagatgtgatacatatcaggcctcctaaggagtcagcccatttagagctggaggccattttaatgagctcatcttctacaggcatgaatctatatgtggcaaatgtttctttcaaatttgcatcaactccttgcatttttaacatgttatactttgtgagcttgttttaaaatgcatttaccatgattttctgtttttattgctctggaaaaacgacccctacatgctatttccaggcagtattatggtaagaatgaggtataaaccaaacagctcatctttgtcgagagaggctcggttatgttcctctgggtctgatctcgggccccttattctgttgcaggtcgtggtgatcttccttttcctgggcctgctgggggtcagcctttatgggaccacccgagtgcgtgatgggctggatcttacagacattgtgcctcgggaaactagagaatatgactttattgctgcacagttcaaatacttttctttctacaacatgtatatagtcactcagaaagcagattacccgaatatccagcacttactttatgaccttcataagagtttcagtaatgtgaagtatgtcatgctggaagaaaataaacagcttcccaaaatgtggctgcactactt

SEQ ID NO: 63200 - DNA, 1489 bp, Bovine  19866881038483
  misc_feature (1)..(1): n is a, c, g, or t
ntgtacagcataatagttagatcactgtattcactccactccaaccagacaatcaatctagctataaaaaaactgaagtctactctgttaattcacatccaactaattaaacggtgcagacctgactgatgtatctctgtagtatcaaatcatataaagtcactgtttcattatgtcacagggctgtcatcggttgaataacacctggaaataaatatttatcacaattcagtcagagaaaatgatgattttacttggatggggtgaaaagatctagaataattaaatgaattgatgcaaatatgacatattcataaataaacacaccagtaatatctaacaacaacaagaaggaggggagaaatacctcaatttagaagttcatagaattgttgaagagaaaaatgcatgcttttggaacacaccccatgtttgcaccggtcatatttgttcattcaccatatgttcttgtttcaaaagaacttctactctcatggatcaagtaacgctacagggataaaaatataacttttacaaaattttaaaaaatctaatataacagttcattatatataaccaagaaactgatactaataatatcattatagatccatgatgaggaaagaccatgtacttcagtgccgatttgatctactattatttatcattaactctcatttatacatgctaataggaaaagcaatggttagggacatacaaaaaagataatgaaaaatcccttttaactggttctgaaaagcatgcttcctttacttttcccacagcaagtttacacttttaactctccagcaatgattacagttaaaacttacttcacttacctgagaacattctaggtgcttgaggtaaataaagagaatcatcattttgctacagcttgttcctagagatgtcaaatgcttcagcaaataaggaaagaatatttcctgagagcttaatatgccaagtgctgtttaagtgcttttaaacatactgtcattgtatccacattaccctgtaaggtagatattacttatactatctttatgtcataagtgcaaaaacaggttcaaaatggtaagcttgcccaaggtcacacatcaaccaaaacacattattactcaaactgctaagtggactgtgatatccactttgaatagatacaaatactgcacccttttgtgtatcttttttatccagagataaagctagtagaaactgttagaaacccacagaaaagatttgccacagcagacttcctctcatccccactaaataagaccgttgcagggggtaaacagatgtttccaaccactgattctactacacagtgggtttataaatcaaacgtgaagtatagacatcatgcattttattacacaaaagacagtcgctggagttattttaaaaactctaagtaaaatatgatatattctgtagtgtattctttcagaaatatatgagtatcacagcatttttatttacaggt

SEQ ID NO: 63201 - DNA, 890 bp, Bovine  19866880207817
  misc_feature (1)..(1): n is a, c, g, or t
ncttcccaggtggcgctagtagtaaagaacctgcctgccaatgcaggagacatgagacaagggttcaatccttggttcaggaaaatcccctggagaaggaaatggcaacccactccagtattcttgcctgggaaatccccgtggtcagaggagcctgggaggctacagtccatagggttacaaagagtcagacacaactgaagctattcagcacacacacagaaatgtaaagtctgcacatatggatatgctaaattcattcattgattttcagaatctcagatcctccaaggattttcctgaatctccacgatacctcagaaagcttgttttgcatccaattctcttagttcagtaaaaatggttcagaaattcacctcgctagcctccagtgtacaaaattgagctctttctcttggacaaattggtcttgggcaaagtatgccacataaattgcttccagatcatcttgagcctgtgggatgactaagggcttaagacaagatgcatttcacagcatcattttgtactcttcctagtaaacatggaggaaagagaacaagagatacaatctgagtttgcctggatgcaaggaaatctggcatctgaatgccacacttcttgggactgtataatactctataatagcggagcatcaaaacaagtaatagtgtaatactttcatgatgataacctataatttaaagaagcccataaaatgtagaattctgagatctccagcactagcctctgagagtgagtcacaaactcaattctcaattcaaagcaattggcacttctgacgtttatgtgtaaatagatctcaaccaatctcattaaatattcaatctgtattcaaagttattaaatattgaacatgatttaataaa

SEQ ID NO: 63202 - DNA, 1489 bp, Bovine  19866880357863
  misc_feature (1)..(1): n is a, c, g, or t
nctgcacgtggtaggtcctttgtacacaaaggatgagctgaagtttgggtcatttgtgtagaacggggtgatgcttatgtctttatgactctcagttaccagtttgaaaaatagtcatgggatgccagcatgctaacatcctaggctcatcgtattagatgttcagcaggatgcatggcacctaggggctcaactgcagtctggactgctgaagaacagatagaaaatcacataagctgttaccccaaaggaaggggtggtcactgtgcgagccggcaagaaacatcacgagtaggaccatcatgagcccaaggatcacgtttcatgtcccccccccaacccctgcaggacaccatcgcctccccaaacccgcccaactgcaagtctgaggttaggggtcagggtgccccctcccagctgcacattctcgcatccctgaagctctgagtcaggtttcccgcctcctgcgatttcacagctccccgccggccaagctgttttgcagacccaagttggtaatgacagattcttctctcctggccctccactggtgaaaccacggaaagtatttgaaacacgcagccccgggaatgtgcaagcttccattcgctgggcttggcaaggaccaacagtttctcagccagcacttttgactaagacttgaacggctcaggtttcccaggagctcctcagctcagtgtttcaacagcatttatacctttttttttcccccctccttcagcacattaaccctaaagtaggttctggatcctccaatccttggaagcatggctttctctgttacaggcgcggttgtggatgggccacaggagagctggcctcggcctgggaggggaatctcctacccaccagggctgcttgggcctggacagcgtgaatcagagggttctctgctgaaagggatccctggaggacttccagattttctgcctccagagagatctggttaacctattccaggcctctgtaactttgattttaaaatatcctcccctggggttgaaggaagggagagaggatggaaagatcacagaatgtggacctagatacacctatgtgtcaacggcacatctcctccctttggagtttcatcatctgtaaaatggcagtaataataaccatctcaggttatggtgaggtttatttatttttaaaatttatagattttggctgtgctgggtcttcgttgtggcatgtgggctctctaggtaggacgcacagccttagtttcccctcggggtgtgggatcttagttcccagatcagggatcgaaccccagtcccctgcattggaaggcggattcttaaccactggaccaccagggaagtccctatcatgaggtttaaagggcagcacaggaaagcacctagtgtaattcctgcacacagtaggtgcacagcactttcctctcttccttgttcttggtcactgattttacaatctcatcacaaagttgtttggtgaatga

SEQ ID NO: 63203 - DNA, 904 bp, Bovine  19866880365382
  misc_feature (1)..(1): n is a, c, g, or t
ntggctggatatgtggggccgagtcttgccgactgacagcctcttcacccacatcctgaccacagaagggtgcctctgagaacaaagtctagtcccttaagaaacaggctaagggacttccctggtggtccagtggttaagactccgagcttccactgcagggggcacaggttcgataccgggttagggagctaagatcccacatgccactgagtgctggtgctggtgggtgcgggcactgaggctcagtcagcgaggcaactgcccctgctcacacaggaggggggcatgaaactggcatccagactccctgtccggccctttccagcacccaggagcagggcaggggatgtatggggcacacaatgggtcatcggttcccttgtggagatctggaccattcctctgccaagttcttggatgcatctgtccctgggaaccttcgttcacccagccagagtttatggagaagggacatggttctaggctaggggcgtagccagcggtgaacaagactcaaaccctacttcaaagagctcacaccagcttccgccggtagcaagctgctttctgttattcaacaaacattcaccatcggtctggtccatgcgcctgcatcagacaccagggtcagcccaggcacacgtcctgcgctcatgctcctgtggcctttcagatggtcagcatctgccccatccagggggaggagaagccacctgagacatggacaggtctcagctctttcctctgctcccaaggcaggccgcagagcatccactcaaacactgggagtggactatttaccaagtgcctcccttcctctggcaggaagtcgctcccagcacggtggttttttttcctcccccctcaactctttctgggcctcgggttggaaagagcaaag

SEQ ID NO: 63204 - DNA, 1749 bp, Bovine  19866880430305
  misc_feature (1)..(1): n is a, c, g, or t
ngctttctgcccaagtcgtttcctgtttcctaaacatttatctcctgcacattcatggttttttctcgtatcatccctctgcctggaatacttcttcctttccagaatcctcctggcaaatgcctgcctgtcctttaaaactcacttcctgtctctggcattccctgactctgcgagtctccctctgctcctggaggactctgcaccactctctcttcagagatgagtgatggtgacaaagacggtggtgatggcggtgacgaagatggcaatagcttaccgttatcaccctcttcttatggtctaggcactatgttaagtgctttccaagcattgtttcagtttaatttttacaaccctatacaggagttgctatttgcacccccatttgatagaaaagggcttccctggtggctcagatggtaaagcatctgcctgcagtgcgggagacccgggttcgatccctggattgggaagatcccctggagaaggaaatgacaacccactccagtactcttgcctggaaaatcccatggactgaggagcctggtgggctacagtccatggggtcacaaagagtcggacacgactgagcaatttcactttcactttgatagaaaaggaaactgaggcagagaataacttgctcgagccacacaactggaagcgaaagagctgagatatgtacacagggaacctgttttcagaacccacacccacaattgttatgccaaaccacttccctgtattattatttccatttttattacatttaatttattgttacagttattaaaaattgatgatagatgtgttcctttgtccttgtaccctcagggcctggcaccagggtggacacccagggagcactgaaggaaaaaacctgccactgttcactctggcagttcagttcagtttaaacgaatcaaagctcagttcaaaggcctcgtcctcactgctggaccccctgaccaaccccaaccagatttgagagctcctttcattgagccccttttatgtctttatgcttctccagtggcagacacttttagtactgcaatgcacacatgtgtatacacacacacacacacacacacacacacacacacactgaggattcttccagagggtgcaagagcagctgccattgatgaagccctactgctcatcagcactctggtgacttacatacctcaactcattgatgcctctctcaatttaatgaggctgtatcccacttcaaagacaaggaaagcaaggtttggagctggtaagggaccaaggaaccatgccagggtttgactccatcaccctctggctccaaaacccatttattcctcctttacattctcctcatccagtctcccacatccctgaatttcccacccctacaaccttgggcaggcttccctggtggctcagaggttaaagcgtctgcctgcaacgtgggagacctgggttcagtctctgggttgggaagattccctggagaaggaaatggcaacccactccagtattcttgcctggagaatcccatggacggaggagccttgggtgggggttgcagagtcggacacgactgagcaactttacttacaacctttggcacacagtaggactgcaataaatatttgctcaattgaactggattatggtgtgggtggtccaagaaaaatgtgccacaactcaagcatttcaagtgaaatgcatagtttccaaacccaagcttggaggagcccgctatttttg

SEQ ID NO: 63205 - DNA, 1742 bp, Bovine  19866880439189
  misc_feature (1)..(1): n is a, c, g, or t
ntttatatgtataaggcgctcagaccagtgcctggcacagagtagttgctacatagtgggctattgtttttataatgccacaaatacttatggagcctctgggtgctgggaagatggggtgaataaggcagagcttttccaggccctcacggaacccagcatctactagggtgaccagctgtcctttttgctagagccctttcctaggatgtgggtttatcagtgcccaaacagggaaagtccgtggtgagctggattggtgggccaccctaccatctagtggggatacagataattaagaggccatcccaggctgtccagcagaaaagtttgggggtcatggaagcactgagttgggggtgagtgaagcttgggatcagggagggcttccgaaaggagaagggcatttaagctgagacctggaggatgagagaggatgagctgagtgaaggagaggtgcgggagaggggagtgcacaagcagacaaacgcatgtgggcagagctggaaggcagtgaggttgtggcccccaggtgggtgctcggggaggatgtaaggggcagtgtggcagagatgaacatgcatatatttgcttatatacaacggttgtcttttggggaaagcattgggggagggggtgctggagaaaagggttagaaatcctatggagcttttgaactgtgggaatgtaatacctataccaaaagataaaataatctaaaccaacaaccacgcatgcctgtgctcacccctcccctacgcccagctcattccagccgggggcctgcagacagcgactgcaggaccccctgacaagggctgtcccagtcccaggggcaccaagctggcccaggaaggggaagagggcgcagccaaatgtctgctgcctgggccttccccccaggccagctgtagacggaactaaacaggccagcttatcagctgttgccactacgtcccactcagtggagctgggctcattgctggaaaagtggcccccagccctttgccagggacagcactggcccagggtgggggaccctgggaggcattttcccaggggtcagcctgtggtgggaggtctgggggagtgtagagagccaggcctggggtccaggagttggtctgctgcagactcactctgggatattaaaggataaactttcagtgttttaaaattatacaaatattgagggtgagagaaggggcagaaagtgagatcgtgggatggcatcatcgactcaatggacatgaatttgagcaaacttcagaaggtagtgtaaggacagggaagcctggcgtgttgcagtccatgggattgcagtcaggcatgacttggctactgaacaacaacaatctcccagaatgcattctctttgtaaaataatcacactgttcttcagcatatgaaatataagttccccttctctggaaatggatgtgttaggtaccaggtctgggctgtatctgtgaggtacacactctcagtcagtcctcacagacccatggggaggtgggcaccttgtgctcatttatcagatgagcaagccgaggcccagatggtaaaggtttgttcttggtcccagggcaggggagtggcagagctggcttcaagactccatccccaccagtcctgcccgcaaggcggggtgggacggagggcctgtcccggggtcaggagagctaggccccacccggtcttgaagggtgtgtggcctcggccccccgaccccgtcttctctg

SEQ ID NO: 63206 - DNA, 803 bp, Bovine  19866880448799
  misc_feature (1)..(1): n is a, c, g, or t
nctggccccatcactcagcgccttcactccatatgaaacactatggattctgttctctagaagagtgctgtccaatgggggagccacacatggctactgagcacttgaaatgtgaccagtctaaactgagatgcaagcataaagcacacaacagatttcaaagactgcacacaaaaaaagaatatagagataatttttatagtgtttacatgttaaaatgatatactggatatgctgggttgcgtgcatgctacgtcgcttcagtcatgttaaactctttgccaccccatggactacagcccactggggctcctctgtccatgggatttcccaggcaagaatactagagtggattgtcatttcctcctccaggggatcttcctgacctggagattgaacccccatcttctgtgtctcctgcatttcaggcagattctttaccaccgagccctgtgttgggttacatcaaatacattaacttcacctgtttatttttcctttttaaaaaataacatagcctcaataacatttaaaattacataggtcactcgcatatatttctactggacagcactgctatagacaattgaaagcattctttgtaaattaccgaaagcatttgtttacaaagcagggaaatgtagatgcaatttacacttctgcaatgctcactctggctgcaagtagagaaggaagacaattagaaaattattgtaataattggtggtgggcagtgataggggcctgaattaagatggaggctgggtgatgggaggcagatcctatagggtctggtggcagat

SEQ ID NO: 63207 - DNA, 1151 bp, Bovine  19866880449810
  misc_feature (1)..(1): n is a, c, g, or t
nacacacacacacacacacacacacacacacacacacacacagaaaaggaaatgtgcttttcagagcaaaaaatgaataagatttctcactctctattaagtcaccatgtcactttgggcaagtcacccaccgtcccagggtctcaattcccacatttgcctcgtttgagaggtaagacaagctaatcctcaaggaccctccctctcccaccttccatctccctgaggctagtagttgcctcctcagtgttccccagaactgtcccctgaccttggggactcactgctaatgctgggatatgagaagagctaaggcctgggccctgccagggtaggacaaggtcagccacagtctcagagtcaggattcagccaccaaccccggcctctggcttgcctacctgagatatctatgtccccttggtagcctcagaggttcaaaggggatgtcagcttgtagcttattatattttataataccttaagatataataaggctgtgatttcagagcaagctagaacagttgcaaaatgccacattgatggttttgagtgtattttagggccttgagctctcttcccaaattaatattcatagggacaggcatgccatttatttgcatatgtagattgttgctcattcactgcaggataaaaaagttttggggtgtttttgtttattgtagttattttaagcttggatgataaaccaatcaatttcaggcaggggaagggcagcttccaagggcaggagtaggttttaaagaatttttgatccgaggaaaggcatatcccagatacacaggagtgaatcataccgaccctgaccaatgagcagaatcaattccaggacggctctttcaaggtcatcccattcagcccctacttcagaaagcttggccatcccacatggcccccacaggtccttgggaaaccaaccccaccattatcacttaaggtcacagttgagaggcaggcacaggtttgaggtgtgactttggacaagtcacttgagcccctgtttctgaggatggtgacctggtttgccaagttgttgtaaaatacacactagagagtaatagaaatgaatggtggtgatggtcgcataacattatgtagtatttaataccagtgaaatgtacacttcaaaat

SEQ ID NO: 63208 - DNA, 3678 bp, Bovine  19866880464759
  misc_feature (1)..(1): n is a, c, g, or t
nagaaggaaatggcaacactctccagtgttcttgcctggagaatcccaaggatggcagagcctggtgggctgccatctatggggtcacacagagtcggacacaactgaagcgacttagcagcagcagcagcagcagcagcccatcccagcagatgaaggcaatattcccttcaattaccagaggtctctcctccaaagctgttgtcctcaaaggggctggccacaccccatccctttgcctgagacacatgcactcacgtgtgctgtctccccgagaaaggatcctccctccaggcttcaggacatttggtgatgggtcgcctgctcagggctttttgctctattcttggcaactcattctattccagagggattgggaacccaaggagactgccaagtccacatttacctgggccaaatccaaaagtcatcagcagatcctgtgtccattgccacctggaggtggaataggcagtcacccaaaaagtctcacccaaaagtcaaagtgaggccaaagattggaaatgggcgggggagagaggactatgggttgttctattacagacctctgggaacagccccatcccaccccttccaagaggagaatgaagcatggatgcagaaaaaactggccctggtgaactgaggcatggtccatgggaaaacctctgggctagggatcaagatagctggatcttcgcccaagccttcccggacctggcctcttctgtagaagggcgggttggatcagatgaaccctagtgctgtaagtgatatgattctgtgcaattttccagataaagggaagaccagtagcctaaaccctgatactatataatctggaaaaccagagttatatccttcctgaaacccagcccagccccacccctggacctgtctctgctattagaagatgctgctcctaggagctgccccactcctctcaaaaggactcagagccccccttcccggcaggcacttcctttcctagccccacctccattccccaggccaccctccttcaagcctgaatatctagaactgcactagtcagctgagcagccacctgtgtctatttaagctaattttcattaatctgagtaaaactcagatcctcagtcacacaagccacatttcacgtgctcagctgctacacagactagcggctaccatattggaaagtgtagatataaaacatttccattactgtggaaagttcttttggacaacactagtctaaaaattagcctttgttttcacaaagggcttcctctggcttccctaatttcttcctgcttcagagtcagcccatgttctctagccttctgctctggggaggatcctaggtggttttagaatggaccttggccacaagtgaccaaggagtgggtggttcctatctgcctgagaggtagccctagatacttgggtcacccacggaaacatttgagaggaggacagtcagttcaacaatcatccagtacctgagagaagttactcaatattcatgagcattccttagccagtcacctccttcttccccacttgatatgtcccttgctaattccccttgttcaaagatgctaaaccttgaaaaggggcagaggagaaggagccagagagtattttcggagtcccatgatttgagagatttctgctgatgtgagtaaagaagcttagacaatgccagagaaagaatgtccctggtgttgtctccatgtttccagtccagggggcacaggttcaatccctgatctgggatctaagatcctgtatgccatgtggtacagcaaaaaaaaaaaaaaaagaaaaccccagagatcattttagggttctcctcttcccagaaacttttcatatacatggctggaaaaatccccacaaggggttaaaagccgagaaaataccttctctgatagcatagaagtctgggaggattcagggttgggtagcaggatccagagagctaaatgggttatccagaaattacaagagccttttaaaagtagaaaacatatcatatgtcaagcctataatgtatagacagtaattatttttgactgaatatttttgtgtttaattttgtggtgacgatctcctttacatcatgtattcagcaatcactcttccccttgcttaatatgcacagtcatctttctcctcctatgtcacatattcaataattcctctcctttggttccaggggtggtgagatgagaggaatgtcactttttaaattggtaacagctgtgtttttgttttttcaatttcacctggaccaatgccttgtaaatagctcgagctccaaaaaagcaacatgggcggctgggggctcagtttgtcttgatccccaactcagcagcctttttgaggcctcttctctgagcacgagatgtgcctcaggaacctgctgctgctgctgctgctaagtcgcttcagtcgtgtccgactctgtgcaaccccatagatggcagcccaccaggctccgccatccctgggattctccaggcaagaacactggagtgggttgccatttccttctccaatgcatgaaagtgaaaagtgaaagtgaagtcgctcagttgtgtccgactctttgcaaccccatggactgcagcctaccaggctcctcagtccatgggattttccaggcaagagtactggagtggggtgccattgccttctcctctcaggaacctaagagaccacaaaagggagtgttgagcaactgtgaaggtccatcccagtcagtggaggacacctggccgccacatgaaagtgggctcttgtgtggggcgggttccaccacggtctatttagtttactgtggactctgactctgttcatatccatgagcacttttgtctgaattcccagatgttgactctgcttcccctcagatgtacaagagtggacagcagccaggatagcaagacctgggtgaggaaaccaggcactgagaacatacaaatttaaggaggctctgcctctcaggtgccaaccctacactcaccaaccgtgagagccaggatctccttaaatttttcagccctaggtgccgtgattgcctcacctggcctcctggctcttcagaagccttacagatctgagaatcagaatcaggagacagagagagacaggaagtaggggagattcaacaccatgaagaacaagtgactcaggaagggagttcattaaaatgcttcaagggactccaaactgcaagaatgttttttttaaagagaggaatttagcaagaaatcaatcaacacacacgctgataacttgttccatgacaaaaaagaaacaaaaaccccatcaatttctcagcctttgggtagccagtgtctactgccactaattaattttctagaactttcactctccagataccacaaaacatggttaatctgtcagccccaggaggcactgccagcacctgcttcagggggagcctggtggttttggaacctgtgccacatgagggagggtggggcacagaggtgcccagagcaagctcaggctccctcattctgccctcttctgtgacatccttgcagcacctgctccactaagaggagcagtgtgcaagaaggtaggacagtgcatgccacagcacaagcctccctgcctcattgtccccaaaagcaaaataaagagattgcatgcagttggttt

SEQ ID NO: 63209 - DNA, 1565 bp, Bovine  19866880466137
  misc_feature (1)..(1): n is a, c, g, or t
nggtgttattggaaggactgatgttgaagctgaaactccgtactttggcccctgatgtgaaaagctgactcatttgaaaagaccctgatgctgggaaagattgagggcaggaggagaaggggaggacagaggatgagatggttggatggcatcaccgactcgatggacatgggtttgggtggactctgggagttggtgatggacagggaggcctggcgtgctgcggttcatggggtcgcaaagagtcggacacaactgagtgactgaattgaactgaactgatgagggattcagttccacaactgggtagtttttagttgaggatccggttgtggttaaacatttttttctctctctctaatttctaatatacttaggagagtccttccagctacatttttttcaccagattgtcatcaaaatggaggtcagaattaaaggagacaggtatctattgaagagtggcatcaatgcattaaaagataccctggtggccttaaagacttaatgcagctttttaaaatagctaatttatacaccaggctactctagctcaccctggcacactagatcacattatacagaaaagtagatagaacacacatataataggcaatggccaggctccgttatgaccttattttcactgataaagacaaatctcataattcactcgtagcaatgtcagtcttttatctttccctggactcatgaggatacaagtcacatccactgagcctgctctctgtgtgacaaggaaactcaggcagccaatcatcgcaaaggtgattcattcatctgcattcagaaatcctgttggttaaaaagcaataaaagtgttagggacttttttttccccctttcactctataaaaagtggctcactgttaaaatatatgtcttcactcatctctcagagctgctgtaaaaataacatttggcagtgggaagtggaacttttgcttaaagaactggcgtgtgtatatagtatttgtatatttcttagatgtccacggacacttctcagtgctttcgtgttctagagacttgcgtggataaaatttactatggcatgggttcttgatttttaaagtgtttgtgcggctttgtagagtgtggggttgcagaatgaagtgataagagaaacaaggggaccggagcagtaggatgggcgacatgaagtgaaatatctaatttgactcacacgaaccagttggttgtgagaaaactctctgctctcttcccctgtgccccctgcctgctcttgctccatctcagagtcctcgttgcccacatctgcttcaccctctgtcctgttctctgagccctgatttggccacagaggccagttgagggccaagcaacccagacatggcctcagaacacacagcagattccagaagaccccaagttgctcaagggaaacaagaaagagcatcagaggggtggagggttgggtgtttccctgttgctgaaggggggtttccaccctgctcccccctgctggagcattaatccaataggggagcctagatgtttattttcaaagcaggagtcgcatcttc

SEQ ID NO: 63210 - DNA, 2989 bp, Bovine  19866880493467
  misc_feature (1)..(1): n is a, c, g, or t
ntgacattttcaaagaaaattttttaaaaataaagcagttcatttatatggacagaaaaatctaccaaaataaaaaaaagtccaaaatgaaaaatgaaagcttttcttcccactcagtaagtctttctttctaaaggtaattactgttaactaattcttgattttttttcttctaagatggggaatgggggaaaaaaacactgaattcattgaaagagagcaaacaaagttagtataaaagaaaaattaatttgtgtttacagcttgtaattatgagtaatgctgaaacacacatctctgttatatataaatctttgtgcacatctctgatgatttccctaaaataaatttgaactgtatgcattatggacattatatgaaattgtttttttcccaacagtttttaaactaagtatgaatgacattgagttttgtcagtttctaagtttggccccagattcttagaactcaaaagtgtggattatgatctactcaaaccattcaacttatgccaaatatgtggcatatttcgagtggtttgaagccacttgaaattgaaggtaagtatgaaaattacagaaagaggtggtagataaaggaacaatcatcattatttatggcatgatcaagatctttagtgtcattataattggagatacttgaaaatgtcacagccaaacttagctgatgactatcaaataaaaccaattgtacctatctattacttggcaaggtaccaagaggttctagaagatcattaacctgggaattagatgtgttcctgttctacccctaactagctgtgtgaccgcaaagggcaccacttaaaccctccaaggctcagttgtactatttaattcaagttctaaaattctaaaaggaactgtctcccactctctttacacagaaaccccatatcaggtaccagacaaggatttagttataaaggtctatctattcagagaaagcacacacaggagtaagaataaatagcagtatggctcagtagtaattataacgacaccaaattgctatcagtataatgacaataacaatattttatattttatgagacagtaccatgaaaacaatctggaacatcacagagaagagattccttgctccctgggagtatgaagtgaaaagtgaaactgaaagtcactcagttgtgtctgactctttgcgacccggtggactataccgtccacagaattctctaggccagaatactggagtgggtagcctttcccttctccaggggatcctcccagcccagggattgaacccaggtctcccacattacaggcagattctctaccagctgaaccacaagggaaacccaagaaaactggagtgggtagcctatccatcttctccagacgatcttcccgatccaggaatcgaactggggtctcgtgcattgcaggtggtttctttcccaactgagctaaaacacattgatgtaccaatcaatataatttaaaatatcttaaaatacatataaacccgagactatgtgtcatgcactgctcatttgtggggacgaaactctctttagacaaattctaagctctctacaagatgacctggcctctgagcaggagtatgaattataaaaagattgatagatgttacaatgactctacctgtgtaggccctgtattcttttatcatagctctcaaatctgtagattaaatggtcactctcattttaaatttcctgcctgtaatctttgcaaagcacttgacaggaaaaggatgatgctggggttttccattgagtagaagcaagaatggggaaaaaaaaaaaaactgaccagtgatgacaagcattcaaataaatgttctgggaaagatttgtttcatctcagaccagattagagattaagaatatccgggaccctggactgtgattgcaaaggaagtcaagacttccttccccacagctgccctcgaggaagctagtatgtcccaagtatatcttctttcattgtgctccccaagggagaaaagcaaagtagcacatctctcacggatgccaagccagggtgaggtccctacccccactcccctccaaaaaaaggtgccagatctgacatcctgtctggttgaagccacatccttagacagcaattgaaattgcatcagccttcaccttgctggggcaccttttcctttaaacgaagggcaagtgaccattaaatgtggctcccaaaataacccagtggtttcattgcatttggaatgtctgacatctagaactgaggaagtggatgtactgcctctgaagggggagggggaagggtggtgttaccctgtccactgtgacccttcactcagttactcaataggaacagctgccaaactcacaggagcttcaaaatctagacaatggattatattccttagctgtttatttaaacattacaaaagtcagccccacctggcagaatgaattataggcaaagggagttttaatgacagtaaaagcctttaataaagagtcagagttctctcatgactagagagtaggaaaatgtggtataaaaatgaattaggaaattccctggcggtacagtggttaagacgccaagcttccactgcagggggtgtggatctgatctctggtgcgggagctaagatcccacatgctacttggggtatggcaaaaaaaaaaaagggaaaacataaggtggaatttcctcatatggattaacttttgtttaccataacttgacttttttaattttgaatttcccagttgaatttgtcataataagagaataaaaggtcttaatttgtaagaagcaaatatggacttgctgctaaaataaaactcataggctgataatatcataaacttcactaatcctaaaatattaactgtgtgagcatggctagtacgaacacaggactccataatgtaaatggcagtgtttcatgaatggttcttattatctttttatactattctagtttttccccccat

SEQ ID NO: 63211 - DNA, 758 bp, Bovine  19866880499269
  misc_feature (1)..(1): n is a, c, g, or t
ncttgttcctctgcagaacaagtagatatcaaactcctgagcaagggcatttagggccttcagaagctgatccctgcttgttacctatggccccatgttccacccttgtccttctttcctgccccactgcaggcaggctacctgccccattcccatctcctagtctctgctcatgctggttcttccccccagagtgtcttagtcaccttagtcaccacaccatctttcaagacttggctaaatgcaacgtcctctaggaagacctcctgggtttttccacttgggtctgagctctctttccactgaactccccagtaactacatctgtctcctggtatacagacaattagtgtttatctaggtaactcgggttgaagatgtccagttgagtagctcctcctataggattgattccatgtctgctccttatctgagtccttctaaacactgaaccttccccactggcatacaagctgcagagccctgactcccatcctgtcttgcatctcctctgagcgcttggctttagcccaaagagtcttctcttgtggaaggaggtcttggtggtcgaggagaaagatgctagccttgggccagactcctgttggccctgcccttcagaaggcagatggctgcccagcacacaggctctagctgctgagctgtgtgtgggaggctcgtgtctgggtgcccagaataaagcatcagatccatggtcagtgcctggctctttccttcaaggacagaagtcataactg

SEQ ID NO: 63212 - DNA, 1150 bp, Bovine  19866880539509
  misc_feature (1)..(1): n is a, c, g, or t
ntctggctccccatcatacaccagaacacacttcccagacagcacaccaccttccttcccgctttattgactggatccacccagttttgaaaaaaaaaattattatttttcaagtcagcactcccaccatatgtggcatttatttccagaggaggccggctctgggtttccgtggacagatgttgctttgtgcctgcctgacacggctggcggccggcgtacagctgccccgagcaggtggccaaggacggggtccacttctggcccggcatcaagagggacaatttatgtggagctctggccccggggaccctctgctcattcctccacagccagggacccctactcacacacacaaactcagtacacaattaagacgttcaaaggaggccaagagggagacacagaaagctaggatacctccccccctcaacacatcccaatttccagccaggcgcagctaagctaagagaaggccgtggggagtggagagaagtcactgaccccttctatcagccatctgtgagctcctgccagacctagctagcgcgaagtggaggataaaggaggtccagacagatggcaaagcgctttgggaaggagggctccgtaggaatgcgagggccgatgcgaggcccactttggggtgcgttttgttatctcctcggctccaaacccccctcctttcggcacccacccgcaatctcagactgaaagaagggcaaaaaacagtcgggggaggcgggggagaagaccccactctccgccacttatctctctcatttgaaagtcagagcactgcactgcaactaaagtgcgtgtgtgcggagggggcgggagactggcacaaccgaatctaaaaatactcgataaaaatgctaatcccgaaggcaaagagagaacgaagaaggaatctgtcaatcacgaggctcccgctcctcacccacagccccagctgtacggactgcattcctggtcgagaaggaaagaagtggggggacaggaatgaagaaaagaaagggagagacaccaccacctctccgagcgcgggccgcgggggcgggaggcggcggcggaggaggggctcgggcccgcggagccgaacaaagcgggcctcaagttctatcccgcagctccctggggtgtgggg

SEQ ID NO: 63213 - DNA, 1292 bp, Bovine  19866880552024
  misc_feature (1)..(1): n is a, c, g, or t
nccagatgtcctgtgtttgtatacgcctgtcaaagattccctatcagggtttatgattttgctctggggtttggcctactctcgagtaggtctccttgattgccaatgtctgtccacaaacctggtgcctggggcccctttaccaagtcccagcctctgctctgactgcttcatgggacagttgtttgaatcagaggagatggtaaaaggaagatgttgagaaatttacttcttggcaaagggaagggccagcggactaatactggtggtgggcgccagggtggccgtggggctggctcgagtgcagcgaagggaatggggcccgtgctggggacgctgtcctgaccccgaagagcagctttcaggcctccctagttctctggccccgacaacgagagactctacttaaccaacaggtagacgcaactgtgcaggctcttagagaagtgacttcagtgaaagagaattgaaggttggctcccatcccctggcacacacatttttaaaaccccccatcttctgtgcttgtcgggtcaagaataggagtactgcctccatcccaccctcctttagtcttttttctgtagcctcagcaagcatacaggtcttactactccttcctcccttgtgatccggtgataggcgttgtgtcttgccagcggaggtggctgaagcaacagacctttcagtcttgattactcatggtaactgactccttcctgtgggtcatctggccaagactggattctgagtggaaaacattggctttctgtcttgcttctgtagcagcttgtcactcctctgctgacagttctgaaccagggggaataggggccatggtgtcccgtgtccataagccaaggactggctctgtgatgagggcattcgtggtcagggctagtctgtctgggcagcgcttcccagtctacctgtgtcagttctctacttctctgttttctttcccctacagatgtcaagccgtccaacatcctagtgaacagccgtggagagatcaagctctgtgactttggggtcagcgggcagctcatcgactccatggccaactccttcgtgggcaccaggtcctacatgtcggtatgagcacctcgttccatttctcgaggttcttgtctcatcaggaataggagccaagtgggtgtcttcccatgtggagccagacccttgtgcttgggtgatggggatggcggggaaagaaatgagggatgagccttgtggtccctccctgaggagatcacagtctcaggggagatgggctcggcctttcacaagcc

SEQ ID NO: 63214 - DNA, 1313 bp, Bovine  19866880552590
  misc_feature (1)..(1): n is a, c, g, or t
nttttattctcgcaccagtgtgaccgttccagtttagagccccagggattagggattagggagaggctcccagaagtgccgatttggggaccccagtgactccccggataatagctggagtcaggggtcccttgggcctttgggaatcaagtgccccgcagaaaatgggcctcagagtcattcgttaagctcaggaagaaatgaatgggggagccttagaacttatctgtagaggaaaagtttcattacaggatgctggaatcctatgggaaacaaagtatccgaaattcaacagccagtaaataggagagagttttgttttcaaagctgtgaactcgcaagaagtggagcaaaagggcagtctttggggaccttatatattctacattagcttcggtgggaagcaaaggaacaccaggatatcgggggtgctctggggcttttctctccgccaacacaattcaggggcgtctacccacagaccgctcactctgcggtagtcagcagttaccccaggcccccagggcctttctcctgcagcccctcccctaccagacctcttagcctttgtttgtttttaacagcaggaaactcccttggtgagaaagaagtgatccgcaaaccctctagcgggtggggagttacagagccctgtgaggtgtggcctaatccacaagtcagcccagaagctgcaggggtccctgcctggaaggagagaaagagctctggcaagcctgtcagctgctggggctgagcccagggctcccctcctaattccctgcctgcttggaccttaaaggagagtcccctgaaccccaaatggggcttaatgacctgctccccactcctggccggtgctcggaactaaccagcagccactataatctggtttcattcccttcctctggctctcatggaaaaagagaagggaggaaggcaatagacttttattgatggctttcttcattccaggtagaatgaagaaagtgctgccctctgatttcatcttcacagtgactcttgaactagatgtccctgatctcccatttacagctgaagtacctgaggcccagagattataatactggagagctctagctgcagagttaggatacaaaccagtgatttctgaggcctcagcccacactgcacccagctagctgccttctagagttgcagaggtagaaggtgacatcccagatggagctctgcaaaaccaaagttctttacacaggtgcactattgtgctactagaagaaatgtttgctcaccggaaaatgggctagagatagctttcctcgcagtctgttagg

SEQ ID NO: 63215 - DNA, 1712 bp, Bovine  19866880599971
  misc_feature (1)..(1): n is a, c, g, or t
ntccgagagcctcatgaaaaggcgctttcaggctcgggatgcagcagaagcaaactccagagtgagactgataaagcaaacacctcacattcttcccagcatgtgggtatagagagagatttctatcttctatttatagaatacacacacacacatacagcacttctctgtttttttttttccttaataaaacaaaaaagccaagtttgcattcactggggtaaatgccaaggttatcatcccatctagccgatcttccccttcatctccccactgctctcagctggtccccagtccccaagccccgctctgtttactggcctcgctggggtctgattagtgcagatgaaaagaggagccacgatcagcccataattaagagcttcacccttcgccttgatgaagcctcctaccctccaggaatccctccaggagccgggcttatgttgaaggctttctaatctccctgcacttaaaaaaagttaaaaaaaaaaaaaaatctgtagctcttaatctccaaaagagtgattccctgaccgcagaagagcagcagaaattcccagagtcaacatggaggccctgccaggagtctgcccactgggatcagtcgggattagagtcacctcctgagacatggtaaacgtcctcgtcctagggctccaccaaaccggtaaattctgctttctcctcgcccgggaaagctcgggctgcaaatcctgaaaacggcaccacggagaactgcagtacccattaatcagggtcagaaggctggcctgcccctgtgccctcacgccccgcggagaccaagtagtcttgacattagtcaggctcggagagaaatagcagcatatcctcggggcaggggaggagcgggaaggcagatgggtagaaaccaacaaattcatgaagcatccacctccctctcctacagacacagccctggactctgaggcctcagccttcccattcccaggcaggcaacagctgtgcccccagcctccagcccctctaaagatgaagggagaaaacttactgtgttcggaggccattccatttctcacagagcaattctctccatctttccatttctttgcaaatcagggcacactcatctggcctggccaacccagaggctgcctgagccccctccaacccaacccactacaggcctgctctgctcccctctcccacttgttctgtgggctgtggggttctctgaactgggggagtcctttgcgccctggcattaagttatggccacatccccaaaaccttcacagacaagccagtcactcagggccatacagccccacggggattggtccccattccctcctgctctgcaaagaacatttctaaaacacgagatgcaaacacagatgctcagatgggaaaagagctctgaggaagggggcctgtagaatgatccatcacctggtcaagtctcccccctaaactgatctgtgaaggtgaaggctggacagcaagccacgtgggaccagaatggcacctggacagacctgggagcctcacgtgccaacacctcatcccactgaagggcaaactactcccaggtgacttaaagtcctcaggtcacatagcacactgatgccagcgctcatggaagggaatagcagagttggactgacatggcttcaaattctgactccaccttactggttacacagcctggataaagtcatttaactact

SEQ ID NO: 63216 - DNA, 1799 bp, Bovine  19866880611995
  misc_feature (1)..(1): n is a, c, g, or t
nagcccaggaatgaacccttcaggaccagactatgggttcctgggggatccaggcctcccaggaagctgctctctgcacaccctctccatgcctatacacacctccccacaaccatcctccaccccagagccctctccacgttcccctcttccttcccaccccgtccaggacaacttctccaagcctcagtcccctttactcctgccttactcctcttatagaaaacctccagcacagcagactgcccttctacactcatttcttgctgcttcctacccaggctctcaactcttcaggggaaagggccctggtttacacagtttccacatctcccacagcactgccgtctcacttagagctgaataggtgatggatgaaagctcttcagtggatggcctgctggaaagagtaaggcaggttcttcttggcttgatgaaatgcccgggaagaaaccagccccaactcatggtgtgatccggaagcacttcctgctgcctttggccactgaatgaatagggaggagccgcttcttatcccaccctctaggaggcacctggagcatggagaaataaagggttgggctttggaatcaggaccccaggctcaagttctgattcctgctgggctcccagagaaatctgcggcttctcttcgagcctcagtggcctccccttgcagagtggcagatagggtcatgggaacttatgtacagtgtctggcacagggcctaacctacgaggatgctccctaagtgccagcgcccctcagcctccccaatgatggctctggggcccatccagtgcccagcaatgggtatcagcagctcggggcagtgatgccccaggtcccatcaacccggatcctggaacgtggccacctctggagcaggactgccaatcagttccccagagacaggcaaaaacccctgctctgacacctggcaatgagcagctttgcacgagacaggcagcccggcagcgccagcaggcgtggctgaagtaaatgagagtgtacccctcgctacctgaaacaacatcatcataactgtcagagcaattttccacctcagtagtttaacacctgaattgttgatgcactcctcccccaccccgccaggctcactctctccatctcacttcactgaagtcagcctcactaggaactagccagcccttctagaattggtggcaaacagtctttgcccccaagagccaagaggctgcagaattaattggcacacggggtcttcagagaagaggagaaaggaaacaggctcaaataatctatctggcatctgtcaacatctgggttataaataatccagagatttaacagggatcccaccgttagactgcctgtgacttcctgtcatgaagatgcagctatttactgggatcatatttattttcctagaatgagaagcaaagctttggagggatgtgagagacagaggcatctctaagatgccatctgtctgttgggacctaccagagaaagacacacacgctggggatgatacttaaaatcttctaactggtgggggagaagaaatgaccaatcatccttacgctgggcctggaggtacccctttaagttgatggatctcggtatggtctcagtgaaggtcgtgggtcccaagggagagcctggggtgacagagaagcaacccagctatttaccaatcagcatggaagtggttcagtattttaacaaccatctctctctctctctctctctctctctcacacacacacacacacacacacacacacacacacaccttcctccctggttactc

SEQ ID NO: 63217 - DNA, 1391 bp, Bovine  19866880622968
  misc_feature (1)..(1): n is a, c, g, or t
nttttgtaggtgcgaattgtaagccagggtttgaaaataggtcatctgactgcatgttctgtatttctctccctgtatcatgcttcttccttccttctctcactcatgtgtctttaagtctattcaaatgccacctcccccatgaagcctattgtttctgtctgaatctccattggccttcctctctgtctcttctaagtcaaccttgtgttaggatattttgtgcatatcatgttcctctgtaagcctcttgagggcaaagactacatcaatttcacctctgaatttctccctcctgaatttatatacataggtacacacacacacaaatatccattcagtgaatgaatactttagtcacagaattctttaatccggttaaatggaaaatctaagccaactatgaaagaaagatcaaaggacgatttatagtaaaccacacactcgctcctgtattttttcttcacaccctgttcccttctctcatatcctggttttcccaggcgggcttccatggggcttggctcattcactctggctagagaatttcctaacattctgtttattagtagtaatagcagtaggactattactatgaatagctgagatttacagaacctctaaatgtcatcttccttgagtgcagagactgtggagccccttggccctggctcaggtctggcccactcaatattttcttttgttttaattgaagtatagttgatttacaatgtttcagttacatagaaaagtaattcagtttcatatacatatatatattctttttcagattcttgtctattattataagatattgaatacagtcccctatgctatacagtaggtccttgctgtctacctatttatatatacatatacttccaatagggctgcccaggtggctcagtaggtaaagaatctgcctgcaaatgcaggcgattccagttcagtccctgggtggggaaaatcccctggaagagggcatggcaaaccactccactattcttgcctagaaaatcccatggagagaggagcctggcaggccacagtccataggattgcaaagagtcggacacaactgaagtgactgagcatgcacgcacacatactttcaatatgtggggtcttttggataaataggcctgtttattgccaggcatttgcatcagactctctaaatacattaactttcaaaactacccagcaaagcaactatatgcaaataaaatggacaacttggaagaaatggacaaattcttagaaaagtacaactttccaaaattgaaccaggaagaaatagaaaatcttaacagacgcatcacaagcacggaaattgaaactgtaatcagaactcttccaacaaacaaaagcccaggaccagatgcttcaca

SEQ ID NO: 63218 - DNA, 1335 bp, Bovine  19866880655633
  misc_feature (1)..(1): n is a, c, g, or t
ngacatgagaaaatggtgtgtcatcttgaaaaaggagctctgagaggggttaggtcctgggctgtagagcagacacatggctaggagacttgtggttgcctttctttctggggtttcaggccgtacgtgctcacgaggcatcccttcgccccagacctcattacccagccagctggggctcttgcatcgtcattgtttctcttccctggctgtggagctgagacacgtgagcatggaaaattcttcccctcactgctccaccagtcaaaccccagcaaaccttagtcccagcccgggaccgtggacccctaaagggaaatggaggcagagcgttctggctccaggaataagctaatggaaccttgttaattactatgtaaattactttaatagcctggatccccttcagacaattgtttgggggcttaaggccctggactgggaagatggggtctccgttgaggggaaagagcagcctttccttggcccaagaccctcttgtatggtttcccacagggcagaacagatgcacagatgggcaactggaggaaaagatgggttcacacctgcccctggacggtgggatcctgaacgtgacactgagatggaggaaccgacgccatccttgaaggcgggaactggaaaggacctcagatggtctctagtgtaccctcacccccttattgcatccaggagaaacagaagcccagaacaggtgagtgacttgtccaaaatcacacagcaaggcgactggacaggcaaggactagtctcctatctccagctcatgcaagcatgctcactcagtcatgtccgactctgcgacggttgtggactgtagccccccaaggcgtcctctatccatgagatttcccagccaagaacactggagtgggttgccatttcctcctccaggggatcttcctgacccagggatcgaactcacatctccagcatcttctgaattggcaggcagattctttaccactgtgccacctgggaactccaatatttttatttatttatttgactgcaccagatcttaatcgcaacacacgagatggagttccctgaccagggattgaaccccagatccctgcactggaagcacggagtcttagatactgggccaccagggaagtccccatctaccccagtggttctcaaacaggcacctgtgggatgagctggacccaggggtcctgtctaaaacatcatatagtgagactttcccagggcacaagaaaataattcaaaggtaggcattttactactgccaggtttataataaatagctaatgagagtctgctgatggcacagggagctctgtggtga

SEQ ID NO: 63219 - DNA, 663 bp, Bovine  19866880664075
  misc_feature (1)..(1): n is a, c, g, or t
ngaaacgggttggctctgagcggctgagcagcccctcccgtgaggcctggagttgtttttcttatctaaataaactctgcacaaacatggccgcattactcatgagtaagttatttgcaatagcgtattccacagatggggaaattagttcacactggaaccacgtcttaacctggtaaatgaatgggcaagaggaaggagttttagacctaggtcgcagcagcagcagcggaattcaaaacctactcttttgagcatgccccctccatctcaagcctggggaacacttctgcacctggtcctacaccctgtgggccccatgaaggatgggcagcactaatctgtgcccagggcagagggccagtgacctccaaggacccaggaccctgtctcccatcgtgtccacattttcctgccagcttcttctttttttcaagtatttctttaaaaacatattttattattcttattgttattttattcatttttttttttttggctgtgccatgcagcatgtgggatctttgttcccccaccaggaatcgaacccatgccccttgtattggaagcacagaatcttaaccactggactgccagggaagtcccaccagcttcttaagggaagagggtaggaaagcttgctttatcctcaggccttttgtg

SEQ ID NO: 63220 - DNA, 3488 bp, Bovine  19866880665805
  misc_feature (1)..(1): n is a, c, g, or t
nggtgttctttggaaggactgatgctaagctgaaacttcatactttggcccctgatgtgaagagctgactcatttggaaaagaccctgatgctcagagggattgggggcaggaggagaaggggacgacagaggatgaaatgtctggatggcatcaccgactcgatggacatgagtttgagtgagctccgggagttggtgatggacagggaggcctggcctgctgcgattcatgggatcgcaaataatcggacacaactgagtgactaaactgaactgaactgagaggacaaataatccagtctcattcactgtgagatttcagtagtactgtatgtttgataatgctgtaaatgacagattactcttcaaataagataaatgaatggctataagccaataatttaacacttcatatattagaagaaagaatggtaagtcttggatggctgagattaaagccctttttatagttgaggacagtgacattgttaatgttaatttacagtggacaaactagatttttacactgataatttggccacttattagactttcagggcagggataattagtattgctgttcagaagagatgctgtattattatttataatttcatgagtataaaaagtaactttacagattgggaagaagatgaggaccaacctggaggccttgcagaagaagctggaggagctggagctcgatgaacagcagcggaagcgcctcgaggcctttctgacccagaagcagaaggtgggggaactgaaggatgatgactttgagaagatcagtgagctgggtgccggcaatggaggtgtggtgttcaaggtctcccacaagccgtccggacttgttatggccagaaagctaattcacctggagatcaaacctgccatccggaaccagatcataagggagctgcaggttctccatgagtgcaactcgccttatatcgtgggcttctatggggcgttctacagcgacggcgagatcagcatctgcatggagcacatggatgggggttcctgggatcaagttctgaagaaagctggaagaattcctgaacaaattttaggaaaagttagcattgctgtaataaaaggcctgacatacctgagggagaagcacaagattatgcacagagatgtcaagccgtccaacatcctagtgaacagccgtggagagatcaagctctgtgactttggggtcagcgggcagctcatcgactccatggccaactccttcgtgggcaccaggtcctacatgtcgccagagcgactccaggggacccattactccatgcagtcggacatctggagcatgggggctgtctctggttgagatggctgtcgggaggtatcccatccctcctccagatgccaaggagctggagctgatgtttgggtgccaggtggagggagatacggctgagaccccgcccaggccaaggacccccgggaggcccctcagcttttacggaatggacagccgacctccaatggcagtttttgagttgttggattacatagtcaatgagtggagtattcagtctggaatttcaagattttgtgaataaatgcttaataaaaaaccctgcagagagagcagatttgaagcaactcatggttcatgcttttatcaagagatctgatgctgaggaagtggattttgcaggttggctctgctccaccatcggccttaaccagcccagcacacccacccatgcggctggcgtctaagtggttgggaagcagcagtccctgcccaggggcatgccatgttgcttctgggcagccttcccatgcctgtctctgttcagacgtgcatttcacctatgacaaaggatgaagaacacagcatgtgccaaaattctatttgtgtcattttcaatattatcatctttactcttattactattgttattcccctaagtggattggctttgtgcttggggctatttttgtgtatattgatgatgaaaacatgtgcaatgtagaattacagtgaaactctggtgactgtgggtagtcattcttactgaaaactgcactgctttcccacaccatgaactggctggtcgcctctattttcgggattctttcacacttggtggtacttcattcttgccaggcataccttctaactgagtaggaaggagccttgtaagatccttcacaggcagtgcatgtgaagcatactttgctgctataaaaatgagcatcagaaagtgtgtatcatgttattttattatgttcttgcttttggtgtagaattcagcaaattttcatcaaaatctagccagagcccttcactgccatgatagctggggcttcaccagtctgtctactgtgatgatttgtagacttctggttgtatttctgtatttatttttaaatctaccgtgtggatatttagtgctatgtctctttaagtttggattagtgtttctaaaatggtggagttgctctgaatgttacaaatggatcaaggcattaaaatgaatgagatctacctttcaccaagtactgatgctattgtaaacaacagtgtgtatagtgcctaacaactgtatgaaaatccttttaccattttaatccagatgtttaacaagcctaatctcttactctaataaatatactatcaaattcaaaggatgaaaacagtttctgcttttgtggtggcattttcagtgtctgcagtggataaatcatcaaatgatttagcagccaggcattaatgagaggggaaatgcaaagacaggaaggaggctgcaaggtggaaataccacactaaggacaagttcagtgctttgaaccagtgtggcttcctggaattctaatctttggactttgtccagttcttctcagcaagcacccttatcgtccagccacctttcctgtgggcctgtgaacagatcccattgatttcttccatctcttcatccgagaggaaagcaggagagggggcaggactggcgcagctggcactggggcctctaccggggctgcgccgcgctgcttactccactgagcgatggctccccgctcagtgggtacacctgacacaggttcctgcagaggagaagggtgcctggactgacttccgtgcctgtgggctggcagtgaaactgcaaaaaacccacaaagcatgtcctaactggtcaccttcctttctttgaaaagtaacttttgagatttaggtcatatctatgaggctgcctagtcagcgcctcttccctcatttgagagagcaggtgatagaaaaccaaaataaataaataaatatgtttaaacacttatttcattttcaaattaaaaacaggaaatctcctaagtaggcagttccactgcagatctacgagagcctgagacacagccaggattttaaatactggtcactactacagctacaaggctgcctcagccaatcatttcccccaagaggctaacatctgttctctaagtcaacagtctaactcacatgttt

SEQ ID NO: 63221 - DNA, 2539 bp, Bovine  19866880700856
  misc_feature (1)..(1): n is a, c, g, or t
nttgttaggctgactccattcagagtgacagaggttaacacagcaggcactatctgattcggggcattaataattaaataagaaaatgcccctggtttcccttcagaggaagaaaacttgtaaacagttcagccggttccctcccctctggtccatgctccccacacagtaagccgcagaggaagggagtgaagttctagaagtggagaaatttctttcccgattggctgctttacacctgctcaactggaggtgaggctgacacctgcccacatgtatagctactctgcacacctggcagggccttaactaatcaaactcctggagtactacttgcctagccctgggctatgcttccaggatgcaaagaaataacccaagtcaactacagtccattttcagaggctaaagcagcaagcagttgagtcccctggaggcttatagaaagcttggtggagcagatgggactaaagacagaccatggacagaggagcctggtgggctacatacagtccatcgggttgcagagagtcagacatggctgagtgacagaatacggaaagggaggacagataaagggccttcggggcaagtactgcagaaggcagcacgtggaggcaggaaggtgcaggtgccgctggagagtctaggagggtttgcactgcggagcagaagtgggcagcatgggaaactttgccaggcattttccaaaattgggttctatgaagcactagccccatgagctactgataaaatctcccagacgaaggttgccatgagtgaccaagttcaggaaatgctgcatgctgtgtcctcatcttaaatattcagtgtatctgagcagaccttgggctctgggaagacccaaagtaaagacacctgtttggttgtttcacccagtctttcccatagaactttctagtgacctctgtagcaacagagttctttgggatgctagtttggtcaattctgctcctctccatcaagcctggaggaagtcccagtcctgaccatctgcatcctcagagttcatatcctcctgtttatgctaacacttgagagccttctgtgcctggcatctggtgttaaagggactctaccactgggtattaaagagacatcatagctgaccctgggcttttctgtcctggcctgggtcagccttgcaggctgagcagaccttagagctggcagcatcctctggagatcccatcttctcctgggcccctgccagcaccagcacctgcagaatccagcttgtctctctgatggcaacaaacacctggccagacaccagctgttcacattaggcaagatgcgtaaaaccaggacagagggcaggcagacagatggcctctgccccaggatcagttgtgatgacctcacagtccatctgtgcaaaaatcttcccccacctgcttcgcttccaccacctgccttgtcatcctgaatgtgccaaaatcttggacactggaacctggtctgtgtacctggaacctgctctctgtccatcccagtctcctccagggagcccttccttctcagcaactttgcacgggcagcaggggtggcagtggtcaggctctgggccctggggggtttccagtcacaatgctggggatcgattggtagtagctacttgcaatgctctcctgaggaatggggctgaagggaacatgctgcggttgattagtgatgtctgttgcaggcacaggatgggaaagggacacatgggtgccacgcaccttgctgtccctgccctacattgctgaacggtcgttttaactttggaaagtgctcctctcgtatatgaaccatctggatatggcctcagctcttctcttggagccttggaacctgtccatcactttccttccctttgtgtgtgtgtgtgttagttgctcagctgtgtccgactttttgtgaccccaggatcgactgtccatgggattctccaggcaagaacactggagtgggttgccattcccttctccaggggaccttcccaacccagggatcaaaccgatgtctcttacgtctcctgcactggcagttggactctctaccactgtgttacctgggaagccatctggccactagttcatttgtagatggccggacagcacagtgactcgggcttcatgttaaaatttttatattctttttcttaaagaggaccactgccaaactgtgtaagcttcaggccccacaaaaccagatccgcccctgcccctgggtgaaagaggagacgacattcaagggaaattgtgaaacacattttcctactggcaaaggagggaaaaaataaggtatataaaaaaagtcctgatgacaaaataaccgaagcaggaaaatccgaaaatggcaaaaattcagcaaataaaaataaatcctctagcttatagcatcctccttcatcagcagttttccttccagcagccagggcatccccagggtccagcctggatgacaagccctgaactagctttcagaaaacgtccactcagtgttctcattcaaaacctgccttctccccttg

SEQ ID NO: 63222 - DNA, 783 bp, Bovine  19866880705113
  misc_feature (1)..(1): n is a, c, g, or t
ntatagaagatgaaacttttcctccgttcccacctccagcctctccagggagagaagatggtgaaggcgctgaacctgaagaaggtccatgacaccagagtggtgtccatgtccagctatccctctgtcagctttcaaaatgacacatttaaaaatgaggcttaaataagtaatattaaatcttggtatatttcaccagagtcagggagaggagcgcctgttcctgtacctccgaagagaaccgttaaaaggaatatacccaagctgaatgctgagaggtacatttactatttccttaaacatttctacttttctttccatcgtcttttccctcttatgttacaagcttttggttgggatgattttgggatcagatatttctaaaggcatttttttcagtttaacagataacatttttttcttatggtcttgttttggccttgatggctttagaaaacttaaaatttaaaaatacttctattcacagattaatttcagagagagggctgccagcattaaggcacgtgtttgagaaggcaaaattcaaaggaaaaggtcatgaggtaagaagtgtctgatttgtattttagacctttgtttcttaaagtattggtgagactgtgtgcccattctcgtgctctcaggaatcttagaatgtttcacagatgctgtcattcagcatcatctctctttagaaactgtgatatgtggaaaggacattgaagacatttaggaactatcaatctctgcataagtgaacatttaaaaatttcctttgcatca

SEQ ID NO: 63223 - DNA, 4056 bp, Bovine  19866880705916
  misc_feature (1)..(1): n is a, c, g, or t
ntcactgtgctctacattagccatttagatataagcgttgagtcctggctgcgtggtttctggcatgttacctaacgtgtctgagcacctattttctcctctgtgaaagggacaataataatagtgcttaattcttatagcagtacgtagggctgttgtgaaaattaaatgaacagtggagtaaggggcttagcttagtgcatgggacataataaagacttagtaagtagatgttagcgtcaccagttctcacgggctccatttgaaagcagaggttctgtagtatgtcttttgtgccctagtaggaattgtttatcagatgctcctcagactagcaacaagcctgagtcccttcagtgtctttcaggaagtcaagttcccttggctgtgtttacttttccatgggtggaaggatttccagaaacagcataggaagcaggagattcttggcctgtgtctccaaggatttggatcacttcccccatcaaaggggtagctgtgtctggtttccttttcaaagtcatgattcatcttctctttggatctttgagtaaagccctactggcaccaacggccgtccacgattgagtagattttggcttcccagaaaacagagattaaggcaaaacttggtgctattgcttcccctggggtaggggtgcagttccagggaaaggagagggagaagaaaagggaaggtgtgcaacaaaggaggaaaaacaaatgccaaccagccacagcttcacaaggaagtgaggaaagaaagccagttgcttcctcacaagggatgtttgtggttaagcccaatggaaccagtgtgactcagaacagtttgctcagggtggaagagagagactctatctgccagtatcttcgtctcttgttgctccaagttttccccatggggaaactcccttgcactgctaggtcacatcacctggtccctctgggcagccactggggaagccgaatcccagaccctgtagtatggtgtctcagcgagtccagaagtgagaagccagcccctcctcttccagtggacagaggatggaacctgggcactgctaggggaggctgtgccagagtctcaccccaggggagaggtggtaggatagaggtggtgttagatgagatgctggggtggcagcctggttctcctgtgagaaagtagctgatggatattatgggaggcagctgcagcagagcaaatctggggaggcaccaaatgggctctgattcagccaccattactcagttaattaatgcacatttgggaccaggtgctggagtctggaccttcccctgcaggcactggggagccatcagctttcctgagcaggtgagagtcccactcagtgctcagcgatgacagagtatgtgagtctgctcagaccactgtaacacagtaccatagactgggtggcttaaacaacagaaatccatctcctcgcagttctggaggctggaagtccaggatcacgattctagccaatctgagttctggtgagagctctcctcctggcttgcagacagctgtcttcttgctatgtgctagcatggcttttcctgggtgtgtgctcactcacaggaggtagcagggggagagaggtagagagagtgctttctggtgaccttcttagaaagatactaatcctattgggtcagggccctaccctcataaccccgtacatacatgtgtgcttgctaagtcgcttcagttgtgtctgactctgtgtgaccctgtagactgtagcccaccaggctccttgtccattggattctccaggcaagaacactggaattggttgccatgccctcctccaggggatcttcctgacctagggattgaacctgtatcttttatgtctcctgcattggctggtgtgttctttaccactagcatcacctgggaagctctcttatgacctcatttgaccataattacttccttactccaaatacaagactcttgagagtcccttggactgcaaggagatcaaaccagtccattctgaaggaaaacagtcctgaatattcattggaaggactgatactgaagctgaagcttcaatactttggccacctgatgcaaagaactgactcatgggaaaagaccctggtgctgggaaaggttgaaggcaggaggagaaggggacaacagaggatgagatggttggatggcatcaccgacttgatggacatgagtttgagtaagctccgggatttggtgatggacaggggaagcctggcatgctgaagtccatggggttgcaaagagtcggacacgattgagcaactcaactgaattgatgaatatatatccttttactagaaaagtcccagagtggactattctaggttgattgctctaagttctggaaatttgatttaataggtagatttatatcgtcttttatttcatgaatgttttcttaaattacagttgttagtgttactttgccccattgctctgatttttcttcttcagagcccattattgtacagaagttttcctcctctagttctactctaatcacttctctcaaatctctttaaaaatatttttttattttttacttagaatatttttctccttccactttccatttctcttcaggttttattcattgtgttcatttactatttttaatatatttatctgtgccaggtctcagttgcagcatgtgggatctatttccttgaccagggatcgaactctgacattgggagcctggagtcttaaccactggaccaccagggaagtcccttgtttactctttagtttcttcttatcgagtgttaatttcttaatttaaacttgtttaattctttccccagtcctttattctctctgtcaaatctccattttctccattcatattaaagtgtcttcaattctagtttatctcttctttagtaattcttattatttaaaaacctttcttttcatctgttttgaaattataagttacatttttcagatttttgtagggtatgtctgacatgttttcatgatctctagggataccttctacattatttgacttcttattcctttttttgggtcataattcaatttatttctgttgctcattttaaagtgaaagtgaatttctttagcaaagagatacaaacacatggccccatattccttagatcttcctctgttcccttcttccatttgtatttgatcgtttttctcctttgcccctattttctgtcctatttaattgaatcctatttccagtagtttttccttaatacagagatttgacttggaagagagcttgagagtttgcaggagccaacctgcttcagcaacaacactcagacctattgccatcccgttgcactcacctacagattgcatcctccaggactcccacctggtttcagctgagttcagattagctttctgcactttccagtgagtgtgtgcttagtcctcagtcgtgttcgactctttgcaaccccatggactgtagccccctagcctcctctgtccactggagattctccaggcaagaatactggagtgggttgccattccctcctccaggcgatcttcccaactcagggatcaaacccaggtatcccacattgcaggagaattctttactgtctgagccaccagggaagcccaagaatactggagtgagtagcctatcccttctccaggggatctttccaaggggtacgtgatggcagttttggggttctcctgatgctgttcccactagcctctattctgaggtttgagggaatgtataatcatctagttttcttctgtatattctggaatttttgattttgcaaactgactgttctgtctggggttttggtggcagggggtggggcaggtagagaagagaggattcagagattttcagaaaatatacaactaaccctaccccaatcttattttctttatattttttgggtatattaatatatcttctctcctcagcagatttcccaatttctcaacacaaaataattttcagaaataatacccatcatttatcaagtacttactacattctaggtactgaaggg

SEQ ID NO: 63224 - DNA, 1145 bp, Bovine  19866880719824
  misc_feature (1)..(1): n is a, c, g, or t
nagacaggagacctgtatccaagtcctggccctgccacacgttccacatgcagccttgacgagcccttggcttctgtagtctgtggcctgcggatcggtaaaatggtggtaaccatcacagctctcgtagtctcaccagatggagaccagaacccattggatgaactgtgggcatttacagagcacacacgtgacaggatcacaaaagaaggattctttcacggttgcaccccacgaccggcagttcacggctccaaacacccgctccctcacttgcccctgctgctcagacaccactccccaggccacagctgctgctcaggagaggctgcactgcctctgtggctgatttctgttcacatggcaagccagcctccttttttgcaaacttatataacgccactttcctccctctctggctgtcagctcctgcttcccccactcgccccagggaacactgcctgggagactgagacacccatgcagatggaggggggacggtgtttccctgcttggaccacattcatcctggaagccaaatgcacacacagggcccctcaaggtgaccctgaaggcctgacaagaagctgtttggagacatcctaacttcttccactccagcacatgtggctggagcacatggtcctccctggcaccccagcgaagtcaggctcttttctggggacagaaaagaggtcagataaggcctgagaggctgtttcctcccactagcagcctcctggatttgcttcccacagtccccgcccctccttcctctgctcccgtccccagcagcttcctcttccagccggtcttacacagtacctactggcgcgcctccagtgagactgcccctgcacacagcctgcagcggctcccatctgcctcccagcacaggccaggcccctcggcctgcacttccaaagtcctgctcacttctccaccttcttgccgcagcacatctccatgtccggctcgcctgcctaactgatccctgtacctaaaacatcctcctttcccacctgccctctcacttcttcctctggtagaagcctggttcttctgagggcctttcccagcgtggaatactgccctgatactggagcccggggaggttttagtcaggcttcttccctcatcttccc

SEQ ID NO: 63225 - DNA, 1734 bp, Bovine  19866880794718
  misc_feature (1)..(1): n is a, c, g, or t
ngcttagttgtgtccgactgtgtgcgaccccatagacggcagcccaccaggctcccccgtccctgggattctccaggcaagagtactggagtggggtgccatggccttctctgacatacagctcttagagacctcatatataaatcagggcagatcatgtcccaaggtgatgaaagaggacttagtgggttgctttaatggtcccacagctctccttgtttcactcatgcctcctgtattcttgaaattattcatacattttgatactgggtaaacctctgcttcatgagagtctggtctgacaattcaatgcattgtgtcttctcagtaggacagtatatgcagtctcatctccagattcattaaatgtaaattttctctgtcttttgggccattgtctctcattgagctggtgtttttaggttctaattacacctatcaagtcttcaaaatgcctttgtccttgactgtgacccaatgggtaactcagagtctcacatcttatcagccttcaagaattcaacatttcctcccataagaaccccttttatcaattccatctgagcccctctcttcaacaagtcctctggatttcaagaaatcttgccaagaaataattaaaatagtttttccaactttaaattaatcaaagacattcataagtccagagcttctgatcagcatgaaactacctgccatgtgaacttaacagtgtttcagataaaagcagagaaaatggtctcttaacatgcacggatgttcaatgcagggtaggagggagctctttttgaaattttggaaatacttcttaaagagaccccaggttggaaaccactgctaaatatattcctttattctcgctcactttgttcctcatctaccatttctctgatctctcataaagttcttcaattttccctacagtttatttgctcccatcttagtattttaccacccacatcatttttttaatatttattattttttttttaatttggctgtgccaggtcttagttgaggcacacaggatgtttagttgtgacatgtgggatctagttccctgaccagggatcaaacccagccacccctccaccactgaagcaccaggggagcccctcacccacatgatcttaatgtcatcagcaagcctgaagctcaccatgaatactgaccttcaaatcccatgtaaaaatgttaaataaccatctcaggagtaacccactgagtgtgactctgaacccacccaagggccctttcctctccatctagatgtcctcctcatggttttgagtcccagcaaccctctgcatggccctggcccagcttcctgcccctccatggtgggtgttctccaaagaggagtgaacagagtgacccattgttttcaagggaaaaaaaattaaatctatttatattatttacctaaaaggtgaaaaataatttttatttaatacttagtatatacattgacaagcagcacatatatatactttattaataaaattatatatgtcagagtggaactcaacacttttcttaggaaagtgctagtttcttagtcatgtctgatgctttgagatcccatggactgtacggctctgcctggctcctctgtccatggaattctccagcaagaatcctgggagtgggtagccattacctttcccaagggggatcttcccaacccagggattgaacccaggtctcctgcactgcaggcagattctttaccat

SEQ ID NO: 63226 - DNA, 1541 bp, Bovine  19866880869488
  misc_feature (1)..(1): n is a, c, g, or t
ncagccaaagtaatgagacagggacttcttctggtggtccagtggctaagatgctgacctcccaatgcagggggcccaggtttgatccccggtcagggaactagatcccacatgcctacaacaaagatcgaaggtccctcgtgctgcagctaagacctgctgctgctgctgctgctaagtcgcttcagtcgtgtccggctctgagccaaataaataaataaatatttttttaaaaaagccacaacagagtaaggagacaaggccatggagagaatcaaggccaggcatctccgcctggcggtcagactttgtgagcctttctgtgtgtcctttgtttctgtatctgatgcctgatcagcccaatcagcacctggaagaagatgcccatcccccaaactcaatgcccgtctgggccggttccttctcttcccaaaggggaaggtctcaccttctctgggaggagaatgcgtcgaaatgcccggcagccctagcactgtggggctcagggagtgcggagtcagtctctccaggcactgatggagttggcagggtgagctggtgggggagtgaggagtggctgcggctggtgactgctggacactgcgaattgtgcagaatcgcttttctctttaggttagccgattttcagaatccatttacccagattatctgcagatctcaaacagagagaaaagcctcattaatcatcaattggacccccatggttacatagaatttgtgacaatttgtttatctttgaaggagctgctaagaaagagtttaacagggaaagtgttgaggcaggggaggagagagtttaacctttcacgaaggcagaagctccatttggcttccctctgagtacagcctgggggtgcgtgcagcatccctgctactattcactgcccccaagaaggctgagtgcttccttgtcggtaaactctgggccaacagactagaaatcctcaagcatttcaagcctggggaccccttttcaatgtcaaaatattttctataccctccctgcccccagttattagaagctgccttgttttttttttttcctcagtatggctgattgagaataaaagctcctctgaatttggtaaagcttttaagcaaatcacaatcacatctatgaacacatgaaatatagcgctgtctctctgagttacagtattctttcagtctgtagctgacgttggagcacgaatggattgcaggtcccctggaggtagctctggggccccctgcatcccaactaggatgagaacactcggccagttctctaaggctatagaaccatggagtcctggacaggagggagccttggaggtcatttcagctattcctacccattttaatggttctctgcctctatgaggagccctctgatagggaatcctcagttccagggaccccagggggttggcagctgtgtaggcccacttaacacctgtcttaggctgtcacttcaggggctgggatcaactctacaagccgcttcctcaaacctcttaccaggctgtcgaagcccttca

SEQ ID NO: 63227 - DNA, 1224 bp, Bovine  19866880901861
  misc_feature (1)..(1): n is a, c, g, or t
ngcgcagtggtaaagaatcctgccaaagcaggagacttaagagatgttggttcgatccgtgggtcaggaagatcccctggagcagggcatggaaacccactccagtattcttccctagaaaatcccatggatggaggagcctggcaggctatagtccatagcgttgcaaagagttagacacaactgaagtgacttagcgcgcatgcagtgaggggctgggggtaggaaggaagtaggtgtaactataaaacagcagcatgagggatccttgtggccttggaaatgttctgtaccttgactaaactagcctaatcagctgtgttcaggccaacatttgtactggactctcaagaacagcttcccttgtggctcagctggtaaagaatccgcccacagtgcgggagacctgggttcaatccctgggttgggaagatcccctggagaagggaaaggctacccactccagtattctggcctagagaattccatggaccccttggggtcgcaaagatccggacacgactgagcgactttcactttcgatcaggaacctgttcccattggtcaatgcctcattctgattggttgatgctatgatgtactaactgtcaaatattttgaccacaatgctggtaagacactctcctgacccacatggtccataagggagccatatggaagtagttcctcccttcctctgggaatactcaaaatgccaggatatattcccttccttatataactcctcctgccagcagagttagagaaaaacatgctgattcactgccctaaggaccctgatcactttacagacccagggcacaggcctaggaaaacaaaatcacatatccccaggacttcccgggccgtctagtggtaaagacttttcgcatttactgcataggggcaggttcgatccctggttggggaacaaagatcttcacatgcagcatggttaaataaaaacacagatattccccaaatatacatcgaccaaaaagaccattgtgttccacccagaagtgtttaactgagcagaggttactgaaagggactatttacacaggtgagggtaggataaaggaatccacatggaatgttagataaaacactcagagattcgccatagtaggaagacattaccaccctgataactggtcactttgaaggaacaaagtgaagaatgagtgataggagctagagaggaagggactgcagttgtga

SEQ ID NO: 63228 - DNA, 2435 bp, Bovine  19866880931041
  misc_feature (1)..(1): n is a, c, g, or t
nccccttctaggaatttattctaagggaatagccagtgatgtgcacatgtgcacgagggcccttaccaggaggccatgcttctgagttacaaaaaaaaaaaatcactgcaacaaccaggatactagtaaggaaatatggtacatccatgacacgaaacgctaagcagacattcgaaagcctacagaatatatgttgaattaagccaatgttctcgatattgctaagagcaaaacagagcactacaaatggctatatatacttttaattcagttcagctgctaataataactcccttcttttcatttggcagtatgtacatatacctatatagcagatttctataatacttcccattttttgctaagaaagaggatgacaagaaaaatactatttcaagctagttagatgataatttcctttcaggtggtagagctaagggtaacctatttttcctctgtgcttctcttgttttctaaatgctcaaaaaggaagaaagaggaaatgctgctggggcggggcttgggccagctccttcactaataagccatctaatgtctgtaggcgtctttgcctaaagaggacgtcagtgacactgatagctagatggacaatccctgcacagccactgtatatcactcccatgccacacaaagcccttccaggaagacacccactttgcagacacgaaaactgactccatgccagaccccctgctcaccatctaagccccaccaccagccaccccaagagaacacagcccatgtcaaccctgcagcattggctgggagtagggggtggggtgggaggctgggaaaacctgcctcactgcagagccaccaacccttctgagaaacggcactctcagctgctacattctcactgcaggggacgctcagaatgccatgggagtaggccctgcagggtctctggctggtgcatgcgtccacccattcgctcagccttcccggggcagctgctacagccagggtgactcatggaagagcagagcctggttacgtcccgaggtggaaactgaggcccacagagggaaaagtcacgctgccagggcatggccttccgcgtgctgaccatcaaggggcagcagctctggaatgcaggatctccaggtggggggggctccaagaaaacaaatctcagggctgaggattcaggtagaactcagtaaatgcacccccaccccaaggccagaagcagaggcaggtctcgggacagagggctgagtgggcagctcggaggataccatgcccaagaacccactgggcttccctaagtaaggctggggttccagagggggcaccgactgtggagagggtcagaaatgccaggcatgacctgagacccaccagctgcatggcggggatggagcgggggtgccacagagtcttcccctagggaagggacaaccagtgagagcatcatggctgagtccccttcttgggattaaagttactgcccagagggctggctagacatctgtgtaggcccctgagactccaggcattggggctgcagaggaccctttcctgtcttgactgccccacacagagttcacggggaaaaggcatccaccatctccccacctggacccaaaagaaccagaaggccacaggagatggagatccatttttttattattgttattttttaaatacgaattctttccagccggaaggcagaggggtgagggccattggaggcctccggccgccggcacccagccagcctcataaatgtctggcagctggagggagactcagctcattgctatcgaaatgagctcgttactgctaatttccctggctcaccaactgatgcatccagcgtgttcctgaatctccaaagccgtttccgaagccaccctcatgggatccgccaagagacacggagtgtaggcggaacttcatggtggcctcagtttccccaaccagagtgtgggcaggagaacagggaacaggggtgtagttcatccaactgcggctgagtcaaccacaggcaaggccaaccattccgccagggctgctcattcctgcgggcaaatggggagacggcaggacagcacaatttctcggggtcactcagaacaaccccctccacttaccaaacacccagtaggccccaggacgatactaggcacctggcatatattatctctcttcatttacaccacaaccaggccaacaggaccttagtaaccactctcatttccaaagaaaccaaaacgttcaggaacccaccctgaagtacatagctcaggaatactaaggccttcccctaaagtcaggaagaaaagcggctaaacgtggcagggtcgatgcccactctggaagcacacacgatctaggcagggtgtgcaaaagctcctccttcctgggagttgacagaggagggcaagcacccatggccaccccaaggt

SEQ ID NO: 63229 - DNA, 681 bp, Bovine  19866880932313
  misc_feature (1)..(1): n is a, c, g, or t
ncttgagcagcccagctaggccctggagactgggggactcggggccagcttcctgtgaatgccctgagccttcacatttcccttccttggagtctaagccatccggagactttaatctgggcacttctgtggttcgcctcccagggtgggcaagtccaaggcagtctggcgcggcggaaaggggaagtcacgagggaaacaggctgcattgcgtgtgttcaggcttttggagtgtgcggcccacgggggagcgcacaggaacgttcctgccctttgttttgacagaaagctgctgattcaaagaagctaaaggctttccttgggatttcagctttcctcgccttccccagactacagtgggtcccataggtgccccagcatccccacaaaattacacattgggcttgcaggaccctcacttggtcaagaggcccagaggaaggaatgccagccattggaggggctggctgcagtgcaggggagaggacctcccgctgggccagtctcctcctgtccatgacaggcatccaccaccctctggtggcaggaatgtgggcgccacccagaggccaggccacccttgtccggcctgtcccctgggccccctgggagccctgctgagaccacttttaggacaagccacagagggctggcctttgttgtcatcctttcaaggcgtcg

SEQ ID NO: 63230 - DNA, 3258 bp, Bovine  19866881011588
  misc_feature (1)..(1): n is a, c, g, or t
ngatttcccaggcaagaatactggagtgggttgccatttccttctccagtacctcctattattaatgcatattaatgcattaattcccataatcaattatttcctgtaatttgtgggcatgaggaaaatccttgcctcctctctccatggggagtttcatttgagaagccacaagcagttggcctggcccaatgcgggagtgctcagagtgggagagtgggatggtcactgtgcaggatgtgtgcagcagataactgacgcaggtggttccctccctcaggggcagggatgaggggcagagctcacgagcatcatgaaaacctggcctgggcagcacctctgtgaaatgagatccagctcccctttcagtgtccttgtctgttcagtggggctaataactagcctttcacccatcatctcttccttcctggtgtgtacagactccagacagggcctagggactatcactgcagaagaggaatggagagggaacaaggacagcaagaccgcagagaacggctgtgagctgggtaaaatcaggtgggaatatcattcaacggggacagacgcccaggtccaggccccactggggaatccatggccttcccctctggcccccgacacccacgactggccatcccccgacccggcagtaaccgaggccagacttccccctgaggtctctgcctcctggatgtcctgtccttctggatctgaagcatccttcacacctcacatagtcctctgccatccgcacgttccctgcttcctccttacggctgtttatggaaaatgaaaagatttcccacaatgctgcaactaaagatcctgtatgccacaactaaaacccagagcagccaagtacatgaaataagtttaaagaaaaagaagtgaaagcaggagctcagatatttacgcacccacactcactgcagcattactcacattagccaaagggtggaaatgaatggatacacaaaatgtagtgtatatatatacacacaacagaatatcgttccgccttgtatgtgctacaacatgaatggaacttgaagacataagtgaaataagacacaaaaaggcaaatacctatagatatgaggtatatagaatagtcaaatacataaagacaaaagtataatacgggcttcgctggtggtccagtggttaagaatccgcctgccaacgccgagaacatgcgttcagtccctggtctggagagatcccacttgccgagaggcagctaagtccacgcaccacgactactgagccggctcacctagaccccgggctccgcagcaagagaagccaccgcgatgagaagcctgtgggtggcaaccagggagcagccgctacccactgcaactaaaggaacaccctgtgcagcaacaaagaccaaaaagaaaagtgtaatgtaggatgccaggggctagaatgggacagggatgggagtcactgtttggtgggcacagagcttcaatctgggaagatgaattctgaagacagatggtggttatggttgcgcaatggggctatacgtcactgaactgtatacttaaaagtggttaaaacaataaattgtatgttatgcacattttaccacagttaaaaaaaaaaaaaaaactgaagaaaaaaaaacaaacctaagctttgaactccttgtggtcagggcctgccttttttccttctttggactctgttcagttataacaacaaaggccatgcctgtgtggagaaaaggggaagagaagagaagggcctctctgggtcagtggcccaccaggcttggagacagggagctgtgggtccattcggttccctgcccccacagcacgcatctcccacagaccctttttccagacctgcagccctggctccaccctctcctggcctgaagcaggtactgtagccacacacctcatgcctccaggtaccctaccagaccttgcccgctccattcctgctgacctggaaggccacatcactcaccattcccctttgtccccttgcgttcaaatcacatccaaaaacattgttcccattaaatcacatccaaaaatattgttcccagttgtgccatattctccccatttcgatgtgcctttgcaaggaccgtaacttttgtctggaaagttctgtcttacttgctacctgataaagcccacctcatccttcatgtctcagttcataccccacctgctctctgaggcccagcaccctgctcagcacctaacatccagacctgtgattgccagcatctcccactggatggtgggatgatggagcagttcgtgctgattgtacccatcttccccttcccccactctccattttctttcttgcttagagcccaacttttgttcagctgctccttttctgcctggccacctcagtgagagcaactggcatcacagtgcagctccagggagatgaagcctgattggcttacaccaatcacagtattctattcctctctctggtattggctgagatggggtcatgtgatctaattctggccaaggaaatatgaggggaagtttgcctctgcttaaaaacacatgggaaggggacaaaaggaaaaaggtactcttctgcctctgggaatgctcatcagtacttgtcaactggcattgcttcagccaccctgtcaccctgaggagtgatatcacctacatattgggggtgggaaggcagaaagatttgttatcaggcagggtcctggcaggaggtgggaatcataccagttatgttagggagaatttatggtgaataattgctcactaggtgtagaagatgttaatcaggtaacagaaagggtaaaaagaaaggtagccagatactagttttagggttgagagaacataggaaagaggctggaatcagtaacacttagaggaggggtgcgtggcgctgaaatgccgacctctgggaaggggctgctgcgtggctggtgcaggtgtctctgagctcaaaggacaagtccactggggcctggacccagcttctgaagagaagatgcaatgatgctgcgtctgtgagagtgggaagaacagcaattcattcagccttccgaggaatggcctctgtgtggtgaagagaccaagacggagggaagctggtgggagcaggaagccctcgggaaggtattaacagccccaaggctccctctagtgtcccctattgactgacactggcagggagcagctggcaaagcagaagtggggctggtggccttcaacttgtgtcataaagcagaag

SEQ ID NO: 63231 - DNA, 1209 bp, Bovine  19866881014592
  misc_feature (1)..(1): n is a, c, g, or t
ntaaaaagtcttttccaaagcaatattctttctctgagcaaggaggagcctttgacccagggatgtgaagtcaagtgtcaaggtcacccagactacctgcaagcccttttggatccattgttccaaagggacaggttcttaggaggctggcatttttctctgagtgaagctgcttgcaggagctgctgcaggggctgtggaatggggaaggagctctttgtcgattccagagcggatctggctgtgaacaaatgaggaagtgctttagtgtaagcctggctgaatggataattaaacagacagcaaaatggaatgctgttccccatccctcccgggagccagctgggggggataatacactttcctgttgtcagaaggcacaggaggaaaaacaactgggcctggccgttggctatttaacaatattgcttttgtaaacaagttgaaaaatccaataactgttaaacttatggcatgtctttaaaagcctgtgcctgtattccccataaacgaatgagcgtttcgactgaaggtgttctgattaaacagtccatgtccccaggggaacgaggtcatcctctggaagaaggatctgctctcttccagtgacctcaggactggaggtaggggtggtgagcttggggtgcaagtgtgttacagccaaaaactcccctcctcttcctgtgctcgaccactagcggtgaagtgaaagtgttagttgcttagtcgtgtctgactctttgtaacccccatagactgtagcccaccagggtcctctgtgcatgggattctccaggcaagaatactagagtgggtagtcattcccttctccagtggatcttcccgatccagggatcaaactggggtctcctgcattgcaggcggattctttaccgtctgagcgaccagagaagctcgaccactagaggtgcctctgaaaaacaatccagcaccaagtcaaggaagcaaacgcttaagatggaaccgcagcagtgagtgccccacccccaccacaggggccccgtgaaccagagcttcagaccggaaagaggaaggctattcagttcacccacagagaaaacgtttggtgttggaactgacagaaaagtagatagttccaggcccagaggagctcacagctttgatggggaatggacagacacacaaacacactctgaaaaggacacaaagaggagagagtcaagggag

SEQ ID NO: 63232 - DNA, 1851 bp, Bovine  19866881062664
  misc_feature (1)..(1): n is a, c, g, or t
ncacaaacaagcaagtatgtgcacacgtcctgggctgcctgtctttacagggatctcattgctgcaggtaacagcccccagtgaatggagaggaaaagctcctacatgtgcactgtttaaaaaatcttgaaatatttgagattaataagaaatctaaataacctggcaaaaaatggtgaggagtagagtataataaggcagagtctcccctccttcaacctataggcaatctcagatgagcagagaggagggaaggaaagaggtttctgttctttggtgttaggctttccagcctcataagctccctgaggaccacatcttcttttgtgactatacagatatagtcacaattttcatgtggagacacttgtggggacgctctatcaatgtgacgacctggtatgaaacataattcccaaacaagtgtcagggtcgcctccaagtagaatattactgaatattattgtatttcttggtgtaacttgcagagaggccctagaaaagacaccaaggtcaccacccagaggagactggtgtggtgaggttgcctgcgcttcatctacttcccgtgtccaggctacatgccttcacttcttcaagaggaatttattgtcctcactccttccaatctaccttcaagtctccacagaaaattctgggcttcctgctcatctgaacttcatagtatctctttttctctgctatcatacactgctgtaaagccctcggtcacacagtttgcttaggaaatgctatacaaaatcaaactgtactatgctactgggctacagagaaaagtaattttcacaaaaagtagaaaaacgtaattttagtcaactgtcctctgcaggaacaagacatgatgtattgcaacagaaaaaataagtgacactgccattaatatccagcgcccctggatttttctggcatgttggaacactttttctttatagcagggccaagaaaattctattggcaaatctttagcaatacatgctcatgggaacctttataggatctacaattcaaaatccaactagatgttctgtaaactgacacaggtaatggagggcctcattctagtttctgaatcaaaaaacaatattcaccattgaaacctgatcgaccaactgggcaggcagaagtgaccagtaatctcttgagagattaacaggcatcctattctccaaaaaggtacctaagaaataggagaactgtgttggtcagaaagctcaaaaaacagtcactgataatgctgctgttacatggacaccaagctggtccaacagccttcacagaagtaatatcacaggtcaccccttcctttactcttactgacccgcgcccaaggtcacaagtgaagaagtgtgaatagtagaaaaagaagattggcctttaaaacgatgttttgtgtatattcagcaaaacggttttggagtcaacagagcttagtgattaagagctttggagtctgactgcctgggttctcaccccagttctatccctctctctctgtgaccttgggcaagctgctttagcctttctatttcctcaccaataaaatggggatactaacacctgtctcaaagggttgttgttagaactaaatgaaataatacactcagaacagtgcctgccatagataaatgctggctattagttttaggtagaaccatgtaaaactgcctttttgtaagtcaaagacaacagaatgttggcagttttataagattcaacctatcgtcattactactagtattattgttatgactctaaacatgtgttcactgtcaatagggatttactggtctgcagtcttagaaactgtaggccttacagtcacagggagtt

SEQ ID NO: 63233 - DNA, 722 bp, Bovine  19866881090373
  misc_feature (1)..(1): n is a, c, g, or t
ngcttataaaaattccatacctagaccacacctcaaaccaattcagaatttctacaggtgggccctgggaatcaggacttttaaagttctctggtgtgtagccaggattgagaatcaacagtcctagatttttttttttaacatttattttttggctacactggatcttcttgtggagtgtgagctcggtagtccaggcatgcgggcttagttgcctgtggcatgtgggatctagttccctgaccagggatcaaacccacataccctgcattggaaggcagattcctaaccactgaaccaccagggaaaccccagctctagatcttaagtaaagctgtggttcagtgtttcgggcatctcttctcggggaaaagtgatagtggttggtttaaaaagaaaaagcacatgtacacagaaaaaagttctagaagcatgttgattgggtaatcacagctgccgatggtggatagttgcctgaggtttggagcctcagttttctcctatctctgggtcagtggtttctcaaacatctctgaaggagtggaaccatctgtagttggttatttctgcttgggaaactcagagtactaaggtggggcgaggggcggtggcaagagcagaggcggagcaggaatggattaaacagaccattacacgcacccacacttcttttgtaaaccaagtgagaggcctcagccagtgctggcataccttagtgttac

SEQ ID NO: 63234 - DNA, 1992 bp, Bovine  19866881254433
  misc_feature (1)..(1): n is a, c, g, or t
ncgcagccccttcttttcccttcctctcctctggcagggcagagagagcaggccctcccaggtgtgtgtccccttcctccacacacacggaagcccggtccactggccactggggcacatccactgttctgcccctgaaggtggaagtctgtcaactggagtctcacaatcagggaccaggccaagggaggctgctcctcacacccagcctctgatgatgccggcaagaaggctccgggtggagctggtgatgttacagtagtcttgtgtgtgtgtgtgtgcgtgtgtgctcacactcagtcgctctatcctgtccaactcttttgtaggcccatagactctagcccgcctggctcctccatccatgggatttcccaggcaagaatactgaagtgggttgccatttccttctccaggggatctttctgacccagggatggaaaccgcatctctcgaatctcctgcattggcaggtggactctttaccactgcaccctcttggaagtcccaagtagtcctgtgtactcacacacaaagcacttcctctccggtcattgcacctcacttacagccctggcagggcgacggcaccactgtcaatccaagtttacaggaaggaaaatcacacaaaaaaatgttttccagggtcatgggacttgatctcaacagaccagagcccaagcttctgttcacttccatgttctctgccctttacaccaagtcccacaagctccctgaagactccagccagcatcaaacctaagcctccctatatcaatgtcacttctgtgacattttgataactgagctatggttatgttaagagagcgcccttgctttggggaaatatgcattgaaatattaaggggtggtgacctgaatgggaaggaaatctaaaagagagaggatatgtgtatatgtataactgactcactttgacatacagcagaagctaacgcaacattgtaaagcaaatatactcccataaaaacttttaaaaaatactgtttaaaacaagaaatattaaggggtatagcagcaactatcaaacagttccgatacacacacacaggacagggcttctcagcctcggccctattggcattctgggttgggttattctgtgcagaggggtgaggggacccctgtcctgtgcatcctgggatgtgtgacacgtccctgccctcttccaactagatgccaatggtacccatctccggcctatgtgtgacaacaaaactgtctccaggcattaacaaatgggggtaaaagcgcttacagtttagaaccagagctgggagggaggcgggcgggagagagtgtgagccagtgtgagttggagaaagcagaagtggtaaaatgttaaccttgatccttgtaactttcctatcaatctgaaataattcccaaataaaaattaaaaaaaataaagttctatgagcacttacaatttttaaaaagaaaggaagaaagaaaaagaccttgccaagttctcagctctctccagtccgtcccaaagatcccaaatcactttgttcccacagctgccaacatccactgggtgatcagagcctgcgagaccttccaaacacaggtgcccgctgaagcctcacaccggcccaccgagggcaaggtgcgggtacacccattagacatatgcggagcccaaggccaggagggagcggccgacttgcccgaggccctgcagggacctgagcgcagtccgtggactccaggacccctgctcccctgcgggctgcgcaggcacgcacccggcttctcacagcctccacggagaactccctggcagaacgctgcaagttaagcgcctgtacttttcccctttatttccctttcccgagagggactgttggactgggcagagctgcctttcagatgcttccaagtcagcagattttgcctcctgcctttgctttacaatctgtgattatttcaagtcaaactggccagctgccattaggagcaaattga

SEQ ID NO: 63235 - DNA, 1326 bp, Bovine  19866881313591
  misc_feature (1)..(1): n is a, c, g, or t
ngtcacctcctccatgaagccctcctgcactcgcctaggcaacccccactgggatcccagagcaatctattgagatctttataataaacagttctgtatgtggcttttaaattacatgcctgctaccatcaaactgtaagtactgagggtgatgtgaccacctagccaagtgtaaagaattccaagcacagaggtgaggggactccctatagtgacacagcaagccaggccagaggtggccttgaactccttctggacaccagcccggggtttcctccccaaatccctccaccccaaaatgtctataatctgtgagaaagtggggagagcacttcccagccaagacttccaacactgacccactaaaatccatgtacggctgaaagatcagtgccctgggggactcaagaccctggcaggcttgctgagcctcagttattacagcctgcaaacgggcaatgcctgtttgtccatcaatgggtttcctaagaagcaagtgaaaagctgggttgtaaactgcttttttttttcttaaaggcaccactaaatgtaaaggatttctattatgtttataagcaactataataaaacggactttacacagccgcttcctacggaaggcgtaggaagaaagcacgccagccatccggggcctggcccgcggttctgctcgtcaataagtcactgtgtctcggggaagtcactgtgtctctgggactgtttcctcttcccaagaaaacaaaggtttggttggctgaccgccaaagcccctctggcactaaaaacctgctccatgcccagcacggtcaagacactgagaaggcagggtgcacagatcaggggctcaagtcccagggagcctaaatgtttgggttgaccaaaaagttcatttggggttttccatatgatgttacaaaaaacccaaaagaactttttggccaatgcaatgtgttgatgccaggacctgcctgagacaggtgagcgcggcggccagagcgtgtagctggcccatctcctccccgctcccaggttggctttgtggtttgctttgacctcgacgcacacctgtcacatcaggaaaacgctgtgacccagggggctcggtgaccaggttcagtcttagttcttacgagcctcagtttcctattgtgaaagaggcagtgacagaacccttcccactggccatggtccagcacgctggaagggctgcacaagctctcagtctgtgagggatgggcgtgggagtggccttttcttgagcatctttatcctgggcaacaggctgagcgctgtactggctcccactccaggctcatggtaagctgg

SEQ ID NO: 63236 - DNA, 947 bp, Bovine  19866881314712
  misc_feature (1)..(1): n is a, c, g, or t
nacccctggcctggtttggggggcagaaactacttttcctgcatccctggaagccccacaggccagtagtaaaatctcccctgtgaatgctcagtatgttagattggaatacaattgcaccaggaaagacaataaatacgccgatttattttatctcacctgcttggagttgggggtctttctcgcactgaaacaagcaaatttatgcaaacgatatgcaaataagacccttcctggattaacagaaaggaaattgatgctctgggtagagcccagggcctggcactgcatagggtgtaatgtgaatcgaaatgtgccacgcagggtgggtgaatggagtcccctggggatggagtgaatgtcctcagctccagaatcgggtgggagctgaccggtcatctggagtggtgtccctctaggaggcgggtccaggaggggaaagggcctcgaagggctttgcgggagcaccgggctccaggcctgggtttactgctcaccagctttgtaagcccgcacctaaaccctgagcccggtccttagcctctcccgtgtgtacaatactgggcccttgggtgggtgtgaggattagacaaaaatgagaaagcgctttgtcaaccgtgaaatgtgacacccacattaattatgtttcctgtgcttcccttgctcactgtcatttgtgcccctgcccagcgctcctccactgttctgcgccccctccaagaccagatgttttgcaactttgattctcttggcttctctagtgccggaggattctgcttaatccttcccgcttgacagaacacaggcaacctatctccctgggagagttgggtggtaattaggttaactaatttaaagtaacttttaatttttaaataattctaatttgcattcgcgcaacttacttttcctctctccccattcctctccccacccccaccgccttc

SEQ ID NO: 63237 - DNA, 806 bp, Bovine  19866881411300
  misc_feature (1)..(1): n is a, c, g, or t
ntttgaatgtagagttctctgaccccttgggtttacagtggaactggtgagagaattcaggagaactgaccctgaatcccagcccattcctgtcatcaccccccacttagagggccttcctgtacactcgtgcagacaccccaaggctgaatttcatccaatttctccatctcccagcatgacccacgtcatcagcccagggtcaacacagtctcccttccttaggcagatggacctggggaagagcccacctgggacctggaagcaggctcaagatcacgggggctgggaacggaagggtcgagacccagtacaccatttgaaacaaggaagtgcaggctctacacgtgccatccctgggcccacagctctaccccgtggaaaggaccacatccagaaggatgtgcaaaggatggtgcactaagtgtgagccccctgacacacctagagggcagccaaaggtaccaccgtccatgtctgggtcattttggagccatgagcttccgggactgaacattctcacctgacaaccaagcaactggtgagggggtgcctggagccagaactgccttccaaccaggcctcaaaaacacaccagcaagagtaaacaacagacacttccacacatggatgggcaggctatcggtgacaggcccgtgagtcacggcatttcttcttcaggatcttacacccaccccccacgccaggagcactgattcatcaaagtttgttttcaatactattatttttagtcagccaaacagttttaaaaatgatgatggaggacaggagtggggaggggagaa

SEQ ID NO: 63238 - DNA, 1784 bp, Bovine  19866881500365
  misc_feature (1)..(1): n is a, c, g, or t
naaactttagtgccccaaagataaaatacagtaatggataaaatcagcccctagtggcaaaacatggaaacagaaaacattacagctgagagaacgatctcacttcctatcgacatcctactggtagtttccttaacacaactattcctgaacaaaataaaatacttttggtatggtttttataaaaagaaattaccttttcccaaaaatgttaccttataaaatcctggaatgtcatatgcatctatgggtgttacgggtcagaaatagctgcaaagatgaacaagagagggcacggccctctgtggttctttcaacccacaccccactccctcagaagaaatggggcccagataggcactcaggatgtggcaaactgcccttggtctctgcttatggggacccatcaggagagtgatatgggagacatgctaaagcactggttctcaaagtgtggccctccaccagccatatcagcaccacttgaaacttgtcagaaattcacattctcggccccacccaggcctacagaaccagaaactcagagtaggatccagctgtctgggttttcacaagccctccagatgattctgaggcaaactaaagtttgagaaccactggcctagggcccagcacacggggctgagagttggaaaaccttggttctaatcctggacctggcagtcccaagggtctgtgacccttgggcaagccagtttctgtgggtcaggaggctgggccgagtctagctggccctctgcctcctggttcctcacaggctgcagtcatctgagctcacctggggaatgcgtctgcaaccaagctcactgatgggcttgttggcaggagttggcgcctcatgtgtagctggactgcagacctcagttccttgctggccttgctcgtccctctggctattgaccagagcccagctgcatgggcctctctgttgggcagctcacaacatggcaactggcttcccacagagagagcaaaagtgtgtctcagatgaaaggcgtgatccttttgtaacctcatatcagaagtgatgttccatcactttgctgcctttggtttgtcagaagccttccctgtggctagcccacatggaaggagaggggattttacaggggcattagtaccaggaggcaggggtcatcttagaagcccctaccacatctaagagtcccttggacagcaaggagatcaaaccagtcaatccaaaaaaatcaaccctgaatattcattgcaaggactgacgctgaagctccaatactttggccacctgatctgaagagctgactcactagaaaagaccctgatgctgggaaagattgagggaaggagaaggggatgacagaggatgagacggctggatggcatcaccagcttgatggacatgagtttgagcaaactccgagtgatagtgaaaagaaggtgtgctgcagtctacgggatctcaaagaatcggacacaactgaatgactgaacaacaacacatctgcaaaaacttgttccaagcaagccccaagatggagggaaccccaaccctgggagaagcctgagaagtgtgcctggtggtggtggggtggtgtgcctgacgaccctgatttttatcttcactatggggcctatctgatggtggggggtatttgcagccggcaggagctgcattccagggctgggtacttaacattccagaggagctctcagctaattactgccttgcccagcccagtcccggaccacccggctcccctgagctcccagggctggccagagga

SEQ ID NO: 63239 - DNA, 1185 bp, Bovine  19866881599383
  misc_feature (1)..(1): n is a, c, g, or t
naccttctacctatttgtttcttttgagcaataattatttattaggtgcctaatacgtgtcaggagccgtgtgaggttctggaaagtcgggactcaataggaaagacacaatctgcatgcccttgaggattctacagtctgacaggaaatgttccagagcatttacagttcctttagttgtgagggtgcgggcaagaatgaatgggtggcttataaaaagtacaatatctaccgtattttcaaatgatccatttgtttaaatatatttgagcttttaattcaagtcaagccctgaaaaaaatcaacatgtcccagatattaaaaacatattccctttttaaagcaggatcaatcttgggcattttttttctgcattattacctattcaagccatcaatttgcagttaagtaggctaaaaaggaagaattctagtcctgtgaagtctaattcatgttttattttgttccaacattttcactaagctgtcaaaacaagccaacaaatgatttcaagatactaatgttaaacataaaattttaataatgtaagatattctaaagtatttttactattatagttactattctgtcaaaaattataatgaaaataagaacacccatatgctcttgatgacaatgcaaactggcccaatttttctggaggacaacctgcctattcacagcaaaagctatttaaattttttatgccctttgacttggtaatctcactttaagtattacattccaaagaaaatgatcaaaagattaaaaaaaagtgatgtttatgaaacatttgaagtagcaccttttataatactgaaacattaaaaatcccaaatgctcaacaactgaggaaagcttaagtaaactagaatacatcaatatagagtaatttgccatcattattaacagtaagtaggctatgtcaacacatagaaataattttaagtgcaagaagcaaaaaatagcctgtgtgcactatgaatatagctatgcaagaataataaacacaatttatgaggatttttaacagatcataacgtgacagaaatagctgatgctttatgttcacacaatttttgttttctgtaaaggttacaaaaatggtttcataatgagcatgatttttttgatacatgggtcagagatgtatacccaagaagctgcttcccacagctttctgca

SEQ ID NO: 63240 - DNA, 1431 bp, Bovine  19866881624529
  misc_feature (1)..(1): n is a, c, g, or t
naaattggtaactgatgcaaagtggcaggtgggagcctttcactaaacatcttttggaaggtgtgaattttcagcttcaaggacagatataaactttaattacaacaaataaccacaaaactccctaagttcatgatccttgtgaaaaacagcctcaaccagggaacatatatgtacaaagggacatacatttgttcttagactttgactttaaaaagtcaacaagaggaagaagcagcctcccagctaggcagaaggaaaggagacaaaaagaaaagaggagtggaagggaagggaaggtgcgagcaataaagctgcccccaaacagaggactgggggggaaagatggggtgggaagggcggtgggaaagtagcttagaaaaaggaagtggccacaagcaagagctaccaggcatcacagaaggaccaggacgagttctgacaatagaaataatgaaccaactcacctatcaacacctcccaggagggagcacacgtcagcgctgaggatggcgggcagcatgtcatagcgacggtccgctaagtagtaagtggtggccctgtgaacgacacatgtgcaggtccatgaccttcagcagcaagaggcagaactgctgatggcacaggctgcggtgaggaaatggctgagggctcagcgccaattccccaaggctgctgcttttcataaagtgcagcaggctgggcaacaaagctatgcctgtgttcccacttttctaagtgatgccgctttgggctcaatattcttccactgatataaaagagaaagacagagtggcacaaatcttagttgtgtaggaaaaattaaagtgtaacgatccagtatttatagaaaataggatattactacatgaaaaatttaacccatttcactgtagcatacaacatgtgaaaagattttgttaaaaaaggaaaggcaggggcttccctggtgtcgaggggttaagaatcacctgccaatgcgtgggactcaggttcagtccttgatctgggaagatcccacatgccatggggcaactaagcccttgcaacctccctcaagagaagccactgcaaagagaagcccgcacactgcaactagggagtagcccccactcatcccaactggagaatgcagccaaaaaacaaaggaaacgtaattgatcaagatactacttttctcaaggaaaaggggaagtgaaagtgaagtcgctcagtcacgcccgattctttgtgaccccatggacaggagcctgcaccaagctcctccgtccatgagattttctaggcaagagtactggagtgggttgccgtttctggaaggatcttcaggactgttcccaattgtgaaatctttgttttaaaaatctgaaactagcatgggcttcccaggtggtacgagtggtaaagaacccacctgccagtgcaggagat

SEQ ID NO: 63241 - DNA, 1652 bp, Bovine  19866881830881
  misc_feature (1)..(1): n is a, c, g, or t
ntggtctaaatctggcatggacacgtaaggcaccgcttcgcgttatttattgtttctaagatttttgctcacgtgtctgttttgtccctggttgtcttacgctgtcactaggcattgctttcagcacacgtgctcagggaattagggaaacaccaagcatctgaaacagtcttgagaaatagaatgcaaaatgtgccaaccagccttctctccacattctcccccagggacccgctgatgtcttcagagctctgccctttaaatattctcagttaaagaaatcctaagctaagtagggaaagaatgagaaagttctcttgctgacatgaatttgagggtccagtgtgtccccaggggtcctttgcctgccctcttgatcagattgtccaccttctgttgagagaccactgggggccaccccatcatgcctggcatccattccccagtcatcatcatatatgtcctggaatgggacccacttctttccccgcttctcaggcctttctggtggtttataattcagcctgtcctctgtgtcctcctcagtttttgccctaactgagcctggctgcccctacagaccactgcagccactgcagctctttccagcagatgccattgttttcccctcacaccccacataccttaggagagtgtctgccttgctctttgttgttgcttccaaatgatttctccttcctcctccaaaaactccagatcctttgaagtccgtgctatcagacaagcactcctaaccccttcctactgctgtccttcaccaacctcctcttatttctgctcatgcactgaagattttctcccctagctcactgtcatccccctttcctcctgtcaccatgccccacaaggcagtttagacctgtaggtgacaagttttcacactcatgtgctccagccccttggccagattgccagctctagggagccatcctggcatctggtcgcagtgtccagcagagcgctggatgggaccctccctcgtagatgctcacagatggaagggaagggaatggtgcacaggtgtgaaggtggaggcggcagaggactgggctcagactcgggcccccggggcaggcttagctgtcactggcgctcaccactccactttgaccctggccttcactcccagaaggacccacctcaccttaatgacgtgatgtgccgccttgtacaggcccgtgccctggagcttcaggccaggtgcatggtggcccgtctcgtagccctcttctgccattgtctgcagggatggcaagtgagaaccacaggacctgtgagaagtgacagggtgcgctcttggctggaaagtgggttttcccacctggagcgggggtctgcttacccgaggatcactgaaagtaacccagtgtttcacacggtccccaaaagcctcaaagcacaggttggcataatcactgaagtagttggccatgctcacgttctgccacccgccgtacttggcctggagcagctgcaaacagaggggcggagagagaagcaggtgccccaggggttcgtctccagaaaagacttttggggtcaatgggccaagtttgtggaagaaactttgctgattggagctacagaggatgtttagaggaaaggggagcaaagatgcagggtctcaggca

SEQ ID NO: 63242 - DNA, 1125 bp, Bovine  19866881860375
  misc_feature (1)..(1): n is a, c, g, or t
naaaagccgctaatgggcacaaggtttctgctggggtgatgaagaagtcctggaaccagatagtggtgatggctgcatagcgttgtgaatgttcgtaatggcactgaattgtatgtttaaaacggttataatggttaacggtgattatgtgtatttgtgatctttcccccatccatgctgcctcccgcatagcagactccttggtgtgtcagagagtgtggacttttgctgctgtgccttctggctggtaggactgcccggagtccaggcaggagggcaggtgggggctttggccagtggctcgccatgactgggctggccgttccatgccatccccttctttaagaatagagagacacttaaaccctggcggcatccccgagaaggtgctgggacactgtcccagagctcttgatccaaacaaaagaggtgggacctgggtgaccatggcctgccggccaccaaagccacgccatagtccagggctgggctggagccagagccagaatagatggcctggtgcctgcctggttggcctctgatctctgtcccttggcactgctgaaagttatgactctttcccccacaagagccttcccctttgggaggaaaattagggaaggaagtcaaaaccttagaggctgacattttttttagacacacataatgaaggatgtagggggaaatgatgggaggtactttagccaaaacaaacacacgaataaataaaaggggctaaatgaagcaatcttaatcattgttgcacgagtgagagttagctcaggttggcttctgagaagcagagcctgagatggggatttggacacgctcagcttacgaggtggcgtgtccttgggagaagcgagtgagggaagtgggatggagcagtaagggtgtgggctcaactggggtttagcctcagcctgttccgcggggagctctgggacgggcactgcacctcagagttgggcacacctggaggcagggggtcagctttttgttcccatctcattggctgcgggtaggtgtgcacacagacacgcatgcacacacacctgggagggactgtaattgcctgaccaggacagttcttccagtaaggggcatctgtgaaccattagcagc

SEQ ID NO: 63243 - DNA, 1541 bp, Bovine  19866880379166
  misc_feature (1)..(1): n is a, c, g, or t
ngactgcaaggagatcaaaccagtcaatcctataggaaatcaaccctgaatattcattgaaaggactgatgctgcagctgaagctccagtactttggccacctgatgggaagagccgactcattggaaaagaccctgatgctgggaaagattgagggcaggaggagaagagggcatcagaggatgacatggttagatagcatcatcgactcaatggacatgaatttgagcaaactctgggagatagtgaaggacaggggagcctggagggctgcaatccatggggtcgcagagtcggacacaacttagcaactgaacagcaacagtaactagacagaggagagactttggctacattctctttgtttttaatgtttgtttttggttgagttgggtcttagttgctgcacacgggatcttccttgcagcgtgtgggcttctctcggtcatggtgcacaggctccagagtacatggactctgtggtttgcagcagacaggctctctagctgaggtgcctgggctcagtacttttgacttgcaagcttagttgcccctcagcatgtgagatcccagatccccaaccagggatcgagctcacatcccttggattgattagcaggcagattcttaaccactggaccaccaggcaagtccatctgtgtggattttgaacgtggggcagacagggtttgctgatagggtggatgggagtgtgagaggcagagtgggggaactcccggcttgctctgaacttgtattgtagacggcgtgagagttgctatattcctgctgtacagtgggtgccccaacaccagctactctaggcctctgactgagaccacttcctcacccatctgtctctcctaggcccaacggaaccctgccagtctctgctgtggtccagggcactcagctcctgattcatactgtggacgagaccatcaatgtgactttcatctgccttgtcaccaacgccctagggaccaaccaggcaaacgtgaccatcctggtcagaggtgaggagccccctgggtggggaggacagaggaactcaggatagatatcaaagaggatatcgaagtaggattccctctgagggaggggtttataggtggtccctggttaaaggagtccctcaaccacaagaatgctcccaagctcccattctttctctaagcccctgcatggaaggttcaacgggctcagctttactgtctgttaactcaccatctgaaccgttggaaccacggtacagccacctggacacagcccctctgcaaacccaggctggggtagttgcataatgcctcttcccaatggactcaggaaggcttttccaagtatattagacagaactctgtcatttgcaattgatagaagctcaactcaaaatagtccaggcaaaaatggtactttattagaacttcaccttcaggtatggttagatccaagtgctccagctgtgtaacccaggaacttttcttgacctctgttgtctctgcttctcttttgctggctttattcccctggcaggctttccc

SEQ ID NO: 63244 - DNA, 1376 bp, Bovine  19866880391862
  misc_feature (1)..(1): n is a, c, g, or t
ntcccccttctcctcctgccttcaatctttctcaacaaggctttaggtccttattaacctgtctagagattcaggcgcatttgtactccttcacgtgaaaggcaatggcaccccattccagtactcttgcctggaaaatcccatgggcagaggagcctggtaggctgcagtccatgaggtcgcgaagagtcgaactcgactgagcgacttcactttcacttttcactttcatgcattggagaaggaagtggcaacccactccagtgttcttacctggagaatcccagggacgggggagcctggtggactgccatctatggggtcgcacagagttggacacgactgaagtgacttagcagcttagcagcatgtgaaaggtgaattgggaaaaccttttgagagggaaacctaccattacactttcaaatattttaaagtgcatattttttgactttgcaattgctacttcttggctaaggtctctgaaaaaggatctttacagcattgatgataagtaaatatctgtaactaaatgtactttatttgaattgagtaaagctaagtcaccagttctaaggaatactatactgtacggtcacaaaatgaaagagattatgataaaactgcttgttcaaatttattgagcacttattatgttccaggcaccagtgtaagtgatttatatatattcattaatgtgatcctttcaaacaccttgtgatttagataccattatagagaggaaattaagatagtgagaggcgagggaatttgcccagtatcctgtaattaaagccttaaagtgtgaacttagcctatgctttcaccagctgtgcgtgcagcagtttctggatgtggctcgtacttttaaagcacagaccagaagctgtgcacctgtcctagagggttactgatggcccatgacctttgcagacgttagaaacagtgacggagtggggtggtagggaggtgacaacgccgtcactgagagaaagagacaagtgttgggactgaaaactgcctggagtccctccaaatcagtaacctttttggggttcatcttctttatcctgcttgatgctgtccttccagtggaggttgtaagattgagttgacacgtgtttgatgttgtaggaggccgtgaccttcaaggatgtggctgtggtcttcactgaggaggagctggggttactggactcggcccagaggaagctgtaccaggatgtgatggtggagaacttccggaacctggtctcagtgggtgaggacgggcgccctctgaccctgaacctcatcccccttgagagtctctgatccttctttgtttgaagggtggacctttagccaattttttttttaactgaaggttagtttta

SEQ ID NO: 63245 - DNA, 1285 bp, Bovine  19866880398640
  misc_feature (1)..(1): n is a, c, g, or t
ntcttcacattttccaatcattaactcttttaaaaaaagttttaaaaaatatttatttatttggctgctttaggtattagttgcagtgcatggtcctctctgattgtggtgcaaggacttagctgccccgaggcatgtgggatcttagttccctgaccagggattgaaactgtgtgccctgcattggaaggcagattgttaaccactggaccgcaagggaagtcccctaatcattaactcttgagtcagccttttagttcaaaagatacggacacagaggcttgtatacggtttcaagtcctatttccgcttcctcaatgggatggtggatttatgggtaggatggaaggaaggaagtgttcatcattgactggatagatgtatgaacagctgagttggtgggtaagcagatgaacttagggacaggtgtatggacaggtgattgggtggacagattattagaagaatgattgataagggtactgaattctacccaggcattctgtccctaagcctattacctgtcaggactcaacatttctacctcttcctaattttcctgcagagacacttccccagcccaatgtcacagtcaacaactcagccccaggagcatgtggaatccatcagcctgcacagcttgaacccaaagagcgctgtggccatccagtggtacatccggggccagaagctcttcactgggggccacagggagctgtcctctgaccacaggatactgtatggaacatcaccaggaatgactcgggcttctaccagtgtgagagctgcaactcagccaccagcagcatcagcaaccctattctcatcaaagtcatttgtgagttgagggccttgctaaaggtgggtggggacaccacaagagtgtgtctgaggggtgaagcaggggttgaaatccagctggttctgatggccaagctgatggtgtctgccctaaggcagggggcttgtattatttgcataaaggcctcatgatagttgagggtcctgttttaagtttctccaggccagagatgctccatcccactgtgagacatgttaccgacttctcgggagcagatgatccatctgagcacttgggaaaggcctgcaaaccctatgtgcaggacatgaaaccctagctctggcagcaatgtacgcctccactgggtgggagactaggtcacggatctcttttcggcacccaagtgggttctcagtaaatatgtgttaaatggatgaaattttacatttttaattagtttgtttatttttggctgtgctgggt

SEQ ID NO: 63246 - DNA, 2284 bp, Bovine  19866880439272
  misc_feature (1)..(1): n is a, c, g, or t
nctgcttcttggctttgtccctcttccactggacactggttgtaagattgagctgagattatttgttgtaggaggcagtgaccttcacggatgtggctgtgaccttcacggaggaggagttcaggctgctggactcggcccagaagaagctgtaccaggatgtgatgctggagaacttccggaatctggtctcagtgggtgaggacaggcaccctttctttttaaaaaaatgtgtacttggctgtctcgagtcttagttgcagtatgtggaatctagttccctgaccatggatcaaaccctggcctcctgcattgggagtgcagagtcttagtcactggaccccccaagagaggtcccaggcaccttttctaacaaggtcatctccttggtttggctttgtgtcctcagatgtggaaggcttttggggtattgaaatggcatttggggacctgactttcataccaaagctttttatcaaaataaaataagggagaaaaatatcagaatttgtcaggaagaatggaatacattgcaggaaaaactctggccaattgtgtgagtcatataaaaaccagtaaggggagatttaatgaaaataggcactggtgagaaattggtttctgtaatacttactgtatttatgtgtccaggtcttgaaatattggtatcttggggtttttttgtgtgtgttttccttttaactttttgactgcaccttgggccatgagggatcttagttccctgatcagagatcaaacccatgcctcctgcatagaaacccagagtcttaactgctagaccatcagagaagttccaatattttttcaaataggtcatgttttcttaaaaatattttaattacactcgttttgactcattgatcaacattaaatacaggaatcttaatttccagtaaattgtactgttagtgtattcattttcttttttttctgactttaaatttatttatttttaattgaaggataattgctttacagtattgtgttggtttctaccaaacgtcaacatgaatcagccacagtgtgttcattttaaatatgttactctgcatgttcacagggtgtcaccccttcagacatgatatatttcacttagaaaaggaaaaaaggctttgggtggtgaagacagcaacccaaagagaaggaaagtcaggtaagaaccaggcagatgggggtccttagagaagccctcccatgtgtttttgcttctctccaaccctttggctggcatctcgtccaaactgccagacctcttctttaacacaccttagtactggttgccctgccccgcctatagtctgttttccaggtagcagccaagagtgatgcttaggcaagactgccattgctctcttccaaatcttttatagcttcttatttttcttaaagtggctctgcagtcctccaggatctgctcgtggtcccccactgtctctctgattcctttcctctcgctccttgtctcctacccatgctgtacaccacaccaggctcagactcgccagggatgctgtatcacccgcggctgcctgaacaaatcactgcacacaccatagcttaacacaacacacgttgaacatcttacacttccagaggtcagaggtgtggtgtggtttcactttggaggttctgggggagaatctgtgtttgcctttccagtggctcatggccaccttcctcaagcttcacacctagcgacatcgcttttctctgccccgtcctcccttgtcacatgtccctcttctgctcttttcctgcatcatgcttctgcttcataggagacttttgattgcattgagcctcccactccaccccaaagtagaggatgtacttacattttaaggtcagctaatcagcagcctcaattctgtctgaaatcttaattcccctttgccacataatctgacatagtctaggctccaaaaatcaggatgtgagttctttgggggacagttactgtgatcacagcagatacttccacctatgagcctttaactctgccagacctactcctctacctctggtcttccaactccctccctttctgccttcaggtcttcgctcagttccaacatcatgagagaggccttctctgaccaccctgtgtaaaattccatcctcccttttctctcctctttctgcatcttactggatctcacagactttgcttgtttatcacccctctctgcactggagtgtgatcaccaggagtgtggagttttgtctgtcttgagtacccggagcagcccagttgggcaagcat

SEQ ID NO: 63247 - DNA, 1544 bp, Bovine  19866880716484
  misc_feature (1)..(1): n is a, c, g, or t
nccagtggttaagaatttgcctcccaatgcagggcacatgggttcgatccctggtctgggaagattccacataccgtggggcaactaaacccacacaccacaagcagagagtagccccctcttgccacaactagagaaagccagtgtgtagcaacaaagacctagcacagccaatcaatcggttacacaataaaactctaaataaataaataagtacatcccatcagttctaatattgcaaatatatagtcgtgaatgcctatgaaaaaggaaaataagaaagtgaaaacagctagtctgtaaggagggtagcactgtaaattatgtttgtctattttaattttcccttattttttcaaagattgctttgtgaagcaaagaagatgataaaacaaacaaaacacacagccagcagcagcagcagcacacaatgtgcactcaagacgtgttgtgttcattaagctttccaaggaagattagggacaaagatgtccctaatctctgagaaatagaatcctcagaagacagaaagcaatgccttacttacctgaaacttggtcattttctcatgttccttctggggaaagtcagagtcctgagaaggcataactggggaaggacaaagaagccatgagatgcaggccacggctttcatgaccccatgtggatctttgcagaaattatgcacgaacacgcatgctccaaggcagatacgcccacatagcttggtaagcagagcttggagtagactgcagctatgaacaagactgtcagccagcagccaatggacaaagaacaacctgcacgaccacacacagcatccctattgtgaatatttctgctcctactatacacaaaacaaaaagacaacctatggaataggaggaaatgtctgcaaatgatgcgaccgatgaggaattaatctccaaaatatacaaacagctcatacagcttaatatcaaaaatgtaaacaacagggggacttccctggaggtccagtggttaggattccaggctctcactgctgtgacccaggttcaatccctggttgggaaaccaagatccctgcaagctgtgaggtacagcccaaaatacaaaataaaataaaaataaatttcaaaaaaagcaaacaacccaatcaaaaaacggacagaagacctaagtagacatctccaaagaagacatacaggtggttaaagggcacatgataagatgctcatcatcattaattattagagaaatgcaaatcaaaaccacaatgaggtaccacctcacactggtcagaatgtccattattaaaaagtctacaaataataaatgctggagagggtgtagagaaaaggaaacccacttacactactggtggcaatgtaacctagtgaagccacctggaaaacaatatgcagattcctcaaaaaaactaaaagcagagttgccatataatccagcaattccactcctggacatacactcagataaaactataactcgaaaagatacatgcatcccaatgttcacagcagcactatccacaagagccaaga

SEQ ID NO: 63248 - DNA, 871 bp, Bovine  19866880802244
  misc_feature (1)..(1): n is a, c, g, or t
ncaggcaagaatactggagtggggtgccataccctcctccaagggatcttcccaacccagtgatcgaacccttgtgtcctgcattggcaggcagattcctttacccctgtgccacctaggaagcccctttttatttattattatcaccgttgtcacatcagctctccatggcacacattctcaccagcacggggttagcggctggggcagcatcttgcctttggtcccattgctccctcgctctctcttctccctcccaccctcctacaaggcaccctgctcgcattcagtacctggtctgcctccttggaactgctgtcctctgtgtctctggaccccttgactgaaggagccaatgcccacctgccagtccctagaagcctggatagggttctcgccacctcttggttccgagggcatgaagtccggccagaagccatgatcttctctcccgagggcctcccagggcctggccacactggccgggagacgctggacacccagggcagcctgatcttcagaaacgtgacgactctagatgcgggcagctacatggtggtactggaaaccagcaggggacgcaggagtgcgacggagcagataccgatcaagggtaatttcacgcccccacccctccctccatggcagggcgggagggacagagttctcagtctgcagggccccaggggacccattctgaacccatcatccgttccaaacatcccagaacttagaagggcaaccagtttttttttagctcttgattcttgtcaacagctctggtctcagctaattttagccaggctcactctggtgtctgcagtcagcaggttggaaggattgcctaggcactggtgcagaaggcctcctc

SEQ ID NO: 63249 - DNA, 2702 bp, Bovine  19866880340327
  misc_feature (1)..(1): n is a, c, g, or t
ntatttttctgggctccaaaatcactgcagatggtgattgcagccatgaaattaaaagacgcttactacttggaagaaaagttatgaccaacctagacagcatattaaaaagcagagacattactttgtcaacaaaggtccatctagtcaaggctatggtttttccagtggccatgtatggatgtgagagttggactataaagaaagctgagtgtggaagaattgatgcttttgaactgtggtgttggagaagactcttgagaatccctgggactgcaaggagatccaatagtccatcctaaaggagatcagtcctgggtgttcattggaaggactgatgttgaagctgaaactccaatactttgaccacctgatgcgaagagctgactcatttaaaaagaccctgatgctgggaaagattgagggcaggaggagaaggggaggacagaggatgagatggttggatggcgtcaccgactcaagggacatgggtttggactcatggagttggtgatggacagggaggcctggcatgctgcaattcacggggtcacaaagagtcagacatgactgagtgactgaacggaactgaactcaccactcagcctggacctgtactgccagcttttctgtgtctgaacttcttaccttctctactgcatgagccagctgcgtgcaacctctctcttctctcccttcccacatcttcccctctctctccgtatacatcctgtattttctgtttctgtgaggaaccctgatgaacaagtgcattggttttctgttgctccatgaaaagattaccagaaacttagtggttcaaacaacacatgcttgccaacttgtgacagccaagaggccagacagagctgtgtcctctaactgagggcctcagaagatggcggtacaggtgtcactgtggccacacctaaggttcaagaggggaaggacccacctccaaactcacgtaattgttggcagaattcagatctctgtgtctggggaccccagtgcctcagtttcattctgggtgttggcaagagattgttctcagcttctagaggctaccgtcagtctttgctacatgtgtgtgtgtgcatgcaaaatctcgagtcatatccatctctatatgaccccatggactgtagcccaccaggctcctctgtccatgggattctccaggcaaaaatactcaagtacaagtgggttctcatgccctcctccaggggttcttcctgactgagggatggaatccaagtacaagcacatctcctgcattggtaggtgggttctttaccactgagctattcgtggctgccagcttcatccaaaccagcaaggcggagaattctgcagcagatggacacgacagtcttatgtcccaccatcatgaaagtgacatccctcacctttgccttatgatagtgattaaaagcaagtcacaggtcctgtctgcactcaagaggaaggtttgcagaagggtgggaacaccaggaggcgcgtagcagggaccacagtcgatacagaagttatgggtgactgcctttgctgtgggagatagccatttgtctccaggctggagctctgacaaggagtaagatacagaccaaaggcgactggcagtctgcgaggaagacagactgattttaaggcttaaatgtagagtgaaattcagttactggagtccgactatatgccaggcactggttgaaaactttacgtgtgtgagctcattcaattcccataactcctttaaaaatgcagtaaaatgcttctcaggcaagggttcttactggcctgttttacagataaggcattaggggcagagaggttaagtcacctgcccagggccgcacagctcatgagcactagagccaagatggggacccaggtggtctgactccagcagtggaggagcctcctcaactcagctgctgaagtccttaggctaagaaagcctccttctctctggagtgtgcagctgttttttgaaaagcacaggctggggaagaaaagctggctccagctggagtagaggagaaatggggtagacagtggggcaaagagggcacagtgaaaggaaatgaagatgcctttaaaatttccaagacaggtttcccgtgatgaaacgtgttctgatgggagagagcaaagaagcagtcagaaaatgaatgtctccagttcaatcagaaaattcagaaattatgaagaagctgcctttgcacttaacaccgacctgctatcagaaagtaacttatctgtaaataagcaagagatagagtatttcctttaacagcagtaaaactcttaaaagttttactggcaaagacagcctgcaggaggtgtgtaactcttgtcttcctgtccatgatgggccttctcacatccctgggcaagcgggtcagtgattaccggagtgaattatggtcactgccaaaggatgacattagctagaatcctgcttcctgccaccatgatggaaaccctccaggtacatcaaagaattatggatgaaggtgcttttatagcctttaagaaacaaaatctgcagctcagagtcagcgcactgtgttctctgcccaggctcctctgggctttggtgacccaggctgtgcatggccaagtcaatgccgagaggtctcctgtttcttgagatttagaagcacaggctttgacttagacctatatgcactcagacagca

SEQ ID NO: 63250 - DNA, 1507 bp, Bovine  19866880400038
  misc_feature (1)..(1): n is a, c, g, or t
ncctcaattaacttgtgcttcgattcctgcgtgtttatggcagggtctctcctagttgcctggtcgatatccattcccgttcccctcccttccctgccccctgcttttcctcattaatggggccttcattatgtttcaggcaccaggtctcctgctaaaacagacacatttccagactttcttgcagttaccagtggctgaggtgatgcttcttcacctcccttccttctcctcttctgcactgaggtcagcctgcaggaacatttcgtaagaggagacaagtgttctgatgaggaggacggccacaaaggcagtgcagtgtaaagatggaaatgcagaactgcctagatcctggaggcacctgaccagccttatttggtggcctcctacatttttatgttgtgggtgaaataaatcccaagctaaagtattgcaggtcattattttcagagtgttatttgaaactggaagtattcttaaccaaggcagcactaaacacagtggttaaagcgatatattgaataaaataaacagtgctttttggcttgtttttggtcaaattttaataaaatgggaagtggccttgaatttttgtcctgatccatgaatattagctgattgtgatggggaaaggcactggtcagggttttcctcttcaaggccaaattgtttttcttcaaggagaaaaaaataacagacatcacttggataaagggaatgaattcattgttcatccaaatgctaaagagtagctcactgagatggtttattttagcagatgtttaacactcttaatcaacaatttcaagggaaattggaatacatttattgcagatgacaagattgttgaagatgagcttgggaattggatgaagacaattgatcatgaaggggattaatcattggagactgttggctcatttacatgtgatgaggcactgcatttgcagcaaaataaagtagatcatcagctgcctctcctcactaagaaacagttgtgacggtcgcgtgaaggactgaccacgatgcactcctgtgcgcagcccccaagcccctcattgtgtaccttgcaatgggtgaaatcgtcagcttttgccaccaggctccaaactccagaacagttgaggggtcccttgtttcattcctttggccacacaacaaacttgcaaatatggaatgaataatcacagagaggatcggagaccccttcagtctgccatttgtgcaagcaattggcctccaatcaagataaggtgttttttgagatcctcactagacgcagcctagactttgcacagtacgataacctgggcagctttgagggtgtctctcatcagaattactctagagctatggatagaaaagtgataaaaaaaacaaaaacaaaaacactgacgccattaatattcaggcatttacgctagcctggattcttgagatactgagctaacaggtcaaggaggtaaaaggacctggatatggaacctgatatgcagagacagctttt

SEQ ID NO: 63251 - DNA, 2834 bp, Bovine  19866880440240
  misc_feature (1)..(1): n is a, c, g, or t
ngggctaagggcctgaatgatgtaagatggcatagggagcacttagctgtgagagaaacaaatctgacgtcttagagctcaagttggccatcgagaacacgcaattcaattccatactttgtagatggagaagctaaataaagacctgaggggcatgatgggtagtctttgtgctacatgcttatttgtatcacctgatttcaacccctcaaaaagctttatgaagttggtactattatttccttgcttataatttcccttaaataaggaaattaattacatggcttataggtgaagcaggacttgaattgaggaatcagactccaagcccatgtttttcaactgtgtgagagctacaagaggatagggggctgaatgtttttatgacagataaagaacattctacagtgccagaagcacatatttcctctcctggtacaggaaaacaagtttgatttggagtgactttgaaagttgagatgggaccagagtgcatcccaagattctccaccccacactggggtggaggcttcctcagcaatcagagcccccagaaaaaccattcccactggtctctgtgggaatgcatgggcatttaggagttttagatctgggagtaatcggagaatttcagaggcattggtcatatttgtcatgggaaagccaatcaaaaacttttacactctgtgttttaccctgtattagagaagatctaagcatgatataatgccgtttattttaaacttccaacaagggcctatgagtcatttcaggaaggggaacactccagttctttccagaaattctcataattccacatttacattgtaaaaaaaaaatatatatatatatatatgcatcaatcctagttacaacaaccccaaaacatcaatgcctgtgcgtgctcagtctttctgttgtgtccgacgcttctcaaccccatggactatagcccaccagacttctctgtccatgagactttccaggcaagagtactgggagtggatagccactccctactccaagggatcttcccgacccagggatcgaaactgtgtcttctgctttggcaggcagattctttactactgagccacctgggaaacccaaaacatcagtaaacacccctaaaaagatactttgctgatcaatgacgggagtccttgtcagacagactcattaactgcataatatggtatatttgcctgcttgataaactttatgaagtttacaacaaatattataaaggcctctatgttctttgcacactcaccctaaacagtccaattggcaccattacttataatgagaacaagactgtcatatggaaaaatagaaatatgggacgttcagtgaaggaagaaacatttcacttatggacaagacgatctcataagaacaatagaagaaagaacattcttaattaaaaaaaaaaaacacgcacaagtgcctttgttcaagagaaatgtcatgaacaaaccttcagggaaagaatagaaagtgattaggaaggcatttgagaaaatataccaatttgtggattgttactcatctctttgatcaatgtgctgtcttatagaatcaatgactaaattagtgtggaatgctcataggagtaaaccaagaaaaaagaaactagattaagtaaacaagaaacagaaaaatgacatgcaaagatcgtgagaagactcataatgtaaatagctagatcattatgttgggacatatagttattgttcagaattcatgtggcaactcattatcttaaaagtggcttcataaattaccctgatttcagtaattactgtgtgccatgttaacttgtactgaagcagagttaaagcataaaaatctatcaatgacaaaaatattttaaaaaaattttttctattgacataacacaactgaaatatcatgtagaaacagcattaaaaattccaaagaaagaaaatgtcatgttttgaatgtcttgatcagttcaatgaatacagttaagagttcaatcaatgttcttcaataaacacatgaattagtattttatagtatgtttcattgagaactgacatattatctatatcctgtatctgaaaaagttaccatttttgtaaaataagaaatttgctgcttttgaaaaataatcctctgtatctttaatatagcttcgagtgttaaatgttcactttgattatgagttgatgcatgtgaaacaaacaatttatcatgaggaaagtaacttaaattttatgttgaaattattttcttatgcaaggccaactcttaaataattcaaagcaaagtttaatataacctgtattgctattgtagaaatgtccctttttccctaattttatggttactcatatttctttcattgtaaactctaataataaaggaaataacttttgtcacatatttctagagattattttgaatttacatactctataattttagttatttagtcaagcatcaaaaatagaggcaaaactcttaccttagaagacgaaattggatgacaccaaaacatatgcattgtagaaatcaacagaaatagaataaaattgaattttaatgaactgcagaggagaaaaaaaaaattcagaaaagtcttattcaggcaagtataaattaaaaagcatatacaaatttaacatttttctttgtggaaaaatgcaatctcttacccaatcattctggacttcctgagatctctgcagatgggtgattttattcccagattcctcactgttactgtcagatcctccttgggtgatccttttataccagaaaagttcaagagtgaaaatgtcatcatgtcccatcataggtgacta

SEQ ID NO: 63252 - DNA, 1211 bp, Bovine  19866880517593
  misc_feature (1)..(1): n is a, c, g, or t
ntgtctccacccagcagactcgctgaccccggggctcagcaggaagcactgagtggtacagagcaacgtgtccttccgtatcatccctcctcaactagaatctgtcttcctactctccctgggatccaaatggggctattttgtgttcagagttttatttccaaaggtatgttggtgcaattggcattgcattcaggatcatctttactaactgtcgttgtaaatctcccttgctctcgttggctgcctgtaggatgcaaggccctctgtatggatggaagattgtggtcacctgcccagagttgcacagaaaattacagaagggtgaaactggcagccttgaagttgcagttttcagtccatgaacgctggtgtgtgtgagtgaagggcactttgttgatttaaatttgcaggaatacaaaacctgctccaagaacgggagcgacagaagcaataacaaatgggccttgaacacttttctatcgagtggttgctccaatcttcacactgtttaatctcacatgaagttgcaaagatgactaagtaagcataatgcttggaacaaaagctgtcacaaagaacctatagcaaggccatgtgaggacctggagaacccaatatcctgcaggatgtatgaaatggccatcagagaggagaaagcttccaaaagcccttgaaagacactttggctgatggttcagacactcgtgtgctcgtaggtgctggggcctggaggacaggtcgcactgacccagaaatggtgataattgagtctgagcttcagatggttgcctgggagttcaggaaggcatagagagtacagtagttacttctaagggttatcagatcaagaaagagttgacttcattaagtggctgattccagctcagtgtttgaaagggctttctaacaatacaaaccaccctttagactctacacaagcaagactattcctgtatgagatattaggatgatttgagagcctgggttccactctttaccagctagatgaccagttggatgttatttaactcctctgaccctggtggctcattggttaagagccacctgcaacacaggagctgcaggagggtcaggttcaatctctgggtcaggaagatcccctggaggaggaaatggcaacccacttccgtattattgccaggagaaccccacagacagaggatcctggtgggttacagtccatgggg

SEQ ID NO: 63253 - DNA, 1915 bp, Bovine  19866880619476
  misc_feature (1)..(1): n is a, c, g, or t
ncgcgtgaactagaaggttcattatagtgtgttcactcataacatgagtgttcagaggggagcggatgctggccagagacagtgaaccccgctgaccaggaggcagcgcctggcctgctgagctccactccctcgtgttaaaatgaggatgaaagcccgtccacatcctcaagtggctggatgctgtgtgaagatctggtgcgcctgctcattgccctgttccgtgagtgtgggagctggtacggcacgcagagtggggaccagcgtggagaccagcgaccatcagaggtatctgggggctggggaactaaggtcaggaggagggcagtgcaggcaaaggagccagtgagacacagaggagacctcagtgatcagggctgtggttcacagcccatgagcaaggtcagacacagtcctgaccctgagctggccaaggtctgaacagcgggaaccagactgagataaggtttctgggctcagaccctcactgtatccgatgaagagctcccctgctcagctcaaattatgctagttttttcatctgatgtctggccactaaaatacatggatacttgtattttaatataaactgtaagaggaatacaaaaggagactggttatgtgtttacgtttacaaagagcaaaagaaaagaagtcatggcttcttcctaatgtaaggaaatggaagcattttttatcggggtctgtctcttaccttctaccgcaaatacctggggaagagaggaaaggagatggtttataacagaaaaactcccggcggagtggacgaactcaatccatgcttttttttcacatttccacggggatgcaaatcaatttaagtacttaaaatagccacagaaagggggaaaaaaaaagatcaacctctattagttaccatgggaattactaattgaagcacttcttttgtcttttcaagatccttgccattcctgtgacatttagaatgataaaattaagggagccagcatctatttcctgccatttgatgattataaaaatatcattatggaagttcaaattgaagaagcttcttcggaagtaaaactcacttattgtagtgacatacttattaaggaaaaccaccttggatggaatttcgcaagtagagtctagaatcttcatagggttatgagatttgggaaaagagtcatttaaagcccaaatgcttccagggcgtttcagtgggagaatacacggaaggccggctggctggaccctgtccctcacccagatcacagctgcctgccagagaacctttccgaaaaatgccagcatctacaagagttctgaaaatcagacatctgaccacgagcgcttcttgaaaatgaaacttttgatggcattcattaggacagtgcctttgggggttgttttttaaatcattacttgcacagagtctgcagtacccaaaataacactcccaaatgttaccaacctgcgtcttcacaggatggacagccctgtaacgcgaacacccttggaatatgagatgggttgctgaggcacttgggtttaggaacaaaaatgtaaatctttcccttaaaattgagaactgtttactgttagactcgggctgaatgaagaactttgctaatacttataggtgactagacttaccatctatgaaaatagattcttaaaagtttaaatttaataaagagaaaggataccctggaagccaggagtaggcaatgaactgctattacactgggttcaacttcaaatgcaattagctttgcaaggagtggtctggacaggaaagaggttggacaacacaagtaggaaggcttaaaacctggacctggtactaaccctaatgcttgctttaagaaaagaagactgattccctgaaccaaaggatgagcagtaaaagagacgaaaggtagggaaa

SEQ ID NO: 63254 - DNA, 718 bp, Bovine  19866880727492
  misc_feature (1)..(1): n is a, c, g, or t
ncgagccccgggtctcaggcagcctttgctcctccccacgtgtcccgcatgcatatggccttctctggggcatataagtgctcgttttcaagctcccacaaatgaaaacgattagacattcagcaagatatcccagctgcagcctaattatttcataccgtgagcggtgacagcctcctcttttgggagctgggttagcaggaggggagcgagaacagtgtgggcttgttggggagccgtccacaaggcgccggtgctggagaattgaaatgcttccttagagccctctcttcggggccggggtgcggggaggtggtgtttggaagggggtcttggtaaaggccaatggcagccttggcacttccctgcgggaagatgccgcctctttttctgcccaggactggggacagtgcgacaggacactgaaccagcagagatggggctcccccaggaggctgtaggaggtggggcccggcacctgagagtgaacagagggggcgtccggggtggaggcatcttcactatggtggactccccttcctcaggaggctgctctttgcagccgtgtgactgcccccaccagcttcatctcttcatcactgttacatgtgtcattgtgtgttaacatcgtcattcgtccctctctacacgcagacacacacgatggtgagccgcactgagcagggccgggaccctcttgctcccacgctgtcctggg

SEQ ID NO: 63255 - DNA, 658 bp, Bovine  19866880756876
  misc_feature (1)..(1): n is a, c, g, or t
nttcttcctgatttattttaaacttcaaaaacaaacaaacaaaaaagacacaataccagtgccaattataaatttatttgtgagtgttgatttccactagagatgagccatctctcctgacactttttttcccctgctggatttggggctctgatttctgatgacatagtctgggcactggcagctgctagcttcacaaggacaactacagagggaatacccacgtaaattatggatcgcctttcgcatcagtagcctgcctggcaatgttcagattgtcagtcagtgagactccggtgccgtggacatgggtttgaacgagttgatcacctcggggctgttcagaaagcctggctctgtaagtatcaggggatgaggaacacagatgggaaaagggatttccggaagctgctttatgtctctggcttaggttgggagaaaaatgcattttccaacagtttttaaaatgtaatatctaatgttgcctctcactgttaatttaggaatgtcatagcaattctattcccagtcaagtttctctgtgagctcatgctaccagtttgtaaaatgtaacatccgtgtaggtggtgagtgaacagttgtgtccaaatgatttgtgcagattttatgtcttcctatgcgttaaattgctgtttaa

SEQ ID NO: 63256 - DNA, 669 bp, Bovine  19866880838706
  misc_feature (1)..(1): n is a, c, g, or t
ntgctctgcctctgtggcctgcttacattatatacgccctggaaacgatcaagtttgccctcctatgggtggagggcaggggactccaacctccaggatctaatgcctgatgatgtgaggtggagctgatgcaataattacagaaataaagtgcgcagtaaatgtaaggcccttgaatcatccccaaaccattccccacttcccacttacagaaaagctgtcttccaggaaacctggtcccaaaaaggttggggactactggacgccagggcgcccgcaggacaggtgtcgtgactgcattgtaatgccagtgttaagcccaatttgagtataccacagatactcaatagatgtttacatctccatttgtcccttccatcccaccttacagactactttccaatactacccacatttgatgaaaaccaagaaagatcctttgaaagaatattgttggctggctaagaataggcctagcttggcacaattctgtgcaaaattattaaatttctggctcttgcatctttatattatgctaagccaaaatcaggactctgctccaaggaatttaaatgagcagactgataccatctccaatacatgactgagctttagctgatgttcgcaacacggctgaaaagtaatttattgaattactgatgcacttaa

SEQ ID NO: 63257 - DNA, 1134 bp, Bovine  19866880867538
  misc_feature (1)..(1): n is a, c, g, or t
ntcaagagcacccagtcttctatatggtctaactcttatatccatccatgactactggaaaaaccatagttttgcatccccaaagtcctggggccagagttctaggaggacctgtctgccacggctgcttttttctctccagggcatgaaattctccaggaagcctctcctgtccttgtgtaccacactaataaatggcatccacattaatgatgggtgtcacattaataaatggattcaggagcactaagggtgagcagatgtcactgaggtttacaatggagggaaacgccaagcaaggtgctgcttcctgcttgggtaactagtacttctgagacagagacaatatttttgcaattcaaagcaatggaggaaaatccttgccttctcaagatcagcatcttttggaggacaaagctgtcctatgtctgggatcttcgatgcccattggtcagtgcttcatccctttcttttgggaactgccctacaatatgattctcatgtgattttcaatcacaacacactccaccttccacaaggaaaagtagtcgacctgactctcaagagaatctggaaattagtgccaagctgggagctgggacatctgatccaaacctttgatagcttttttggagacattctacagagacttaagacaccaagcgactcaacacccatggttacttttggtctctccttaaacccagctaaaattttaagaaacaatggagaaaatcaatgaaaccagaagcctatgctttgtaaagattttttttttagatagattggccaaagaaaagaaaaaagagagaaaatacttaaattgttagcatcagagatgaaagaagcaggattgctaccaacagtttaaaaaattagagctatgaagaaatacatgggtactcaatatcttgtaataatttataatggaaaagaacttgaaactagaaagaaaggaagagaagatgacacagatagcattttgctgagtgaggagaaatcactgaagcaggcttgagggaaggtgtctattgaaacggagctcagtaacagacccacaacagacttgagtattcatggaacgtgttactgtcagatgtggtgaaagtggtcctaacgaaggaggatcctctg

SEQ ID NO: 63258 - DNA, 1737 bp, Bovine  19866880936961
  misc_feature (1)..(1): n is a, c, g, or t
ncaccctgagcacaactctaccttcctgctgaaaaggaggctgggaccatggggaggagatgctgcctgaagctctggctgccaagcgcccctggcgagacagaggtcagaagtcggactcccacacagtcacccagcagctttcagggaaggaacttccaaatctgtgactggtttgaaacggtgggagctaggggctcccaagtcatggggtcactcaactgagagccaggctgacccaggcacagcctggcagcaggtcgaccagctgaaagggcaggaaaccttcgggcaagcggctgtggcaactggcgtagaggggctgatgctgagccgagagccgagggaggcgaaggttggccacgtttaatacatcacgatccgcacctagtttcagaaggagatgagtctgggggcccgccctcccgcatttcatcgcagcatggttgggacctgcagcttttcatcggcagcaggtttaacatccttgccaacccatttgaatgaacagtacctctcgcttgggatcctaagacaagaagggatggtggacttcctataattaagtctccatcccactaatattgttcctgtaatgaccctttgattcccaccctggacatttgcccgaggaaagcatgccactcagaaccatccacatccaataattacagggtaaagaacatggacaatggaatgagttaagtaggaaacagaagttttcctcttctttgtcttgataaatcattgactatatttagcacttttcgagataagcagaaacagtccatatgaccagaacatccttgatcatataccaggaataaccataagcatggatgcccagatgaaaggcacagccttgaaaaaagggggccaaagaattgacccatcggccttagaataattctgaacagagtcaaggcttttcaaacaaggtgatacatttgagaaaggcaactgcccacatcccggttcactcacgaaaggcacgcacacaggagggcagaacaaatgttccctgcccataggctgcagccccttcaaaagctcttagatggtcttccctcaatttctttaggaaccttgaccgcagtaagttgatgaagtgaacacagaaaaggtgacggggtttctttcctaagtaccaggacctggaggctgtagcatactgcctcaaaaggcaaaaaccgatggaatgccaacactggtttttctttctttcttttttttttttttttactaaaagtgcaatccagaaaagctccttttcagcagttttccccacagtagatcaatttaagaagcaattaccatcaaagcaattatgtccctgtgctcccaacagcccccgaatgtgtgccactgagataagacgaggcccttttcagagtgaggacaagtcagtgacggaaagcatgtggacactgtgttctcaacaatgcatttcagggctctgaggagctgagccagattcgaaaaaccaaaaaaaaaaaaaaaaaattatataaccaaaagcgtgatatgggcctgctcaagccagtgaaggcataaaattcaaatataacacgctgaccacatggccttctttctctaaaagataatgcttctctaacaatgaaagccaacacattctttttttccactagttaattacacaccagagataatttttgaaaagttttgtactcaccaagggaaaacgagggctatagtctgaaaaagaaagagaaaaaa

SEQ ID NO: 63259 - DNA, 1071 bp, Bovine  19866880938990
  misc_feature (1)..(1): n is a, c, g, or t
ntctgtaattcgttgtttctactaaaaaactttgcattacatgagcaggagtagagcaaccctaagacttagtgatgtatctaatgaagaaatcaaaattcttagaagacaactatgattagatataagcataattagagaaacatttcctcagataaaaaaaaaaaaagcctgattatatgcagattgaaaatggccaccatgttccagacagaattaattagaaaataattacatttctgaacaagataattaaaaggcagatcctagaaacacctgagatagatgaggtacagtgctcataaggacagaaaactcagtggatctcagacatctttgaaaaaccagagtccagaaaacagaatcgaggcttacatgctcctgggggagaagtttttcgaggtccgattttatacccagccaaattttgatcatgtgcaaaagtaatgcaatgatatctccaaccgtgcaaggactgagatacagtcttttaaagctcatgttgacatatacaccccagctaacagagaaacatgttctcattaaatgctccaggttggggtacttattaaagcacagcttgtgagaggtaagccaattaaatagacagctaaatgtgaatactcaccactagagttctagaaagactgtaaatataagtaaacctttttgaaaccagaggaccacacaccataagaaatgcataccatgaggaatgcatgctacatggctgaaatgagaataaatgatgataataataattagagcttcaaaccaagaatatgtggaattcttccttttacttggggcaagatgaaacaagaagaaataaattaattcttgactttgtaattcaagaaatgcaggtttacctgtttctaagaatgcttaaagttatactccattagtatttaaagaaaaaaaaaaaaaaacagaaaataaccaaatatagttaagcccaaggagaaaaattaaacaaagaatacaagcataaaatgaaactatgtgtaagataggatgagagaaatgaagtgaaaattatcctttgtggcaagaaatgaaatgctttaa

SEQ ID NO: 63260 - DNA, 1538 bp, Bovine  19866880951527
  misc_feature (1)..(1): n is a, c, g, or t
nttttacctattaagtgacaggcgaataactatgtgtgggaaccgaagtgtattggctgagtgtctgtgatcttgggttagggtgaggtgtaatttcccagacacttgagtgtcgaggaggaggaaatgaatggaaagacaatcccccttgtgctttagggaaagattctccacctgagtctctgcagggcaccgcaggggtgcaggttagaggacggcctctggttctaaggaagcagctgacactgcctcccaagcactaaacagacctgttggatacctctggggggtcattccagcatttgttcttaatgagcagctccccctgcctcagcaagagccagccccaggtaacgtaatcctcaggacaccttcacagatgacacagaaaacctgggaacgggaggcttgaacaaggacacagtttaattgttcacagtgagcactgctcttggctggtgagccgacaccccagatggcaggactccgcctgtcagcagctaatcactcagagggcaaaagaaccagggcttcccatcaagtcaaagcaggatggatgaacgtgctttcaagaagttatcctggggcctagaatctgcgttgaaggaatcatcgttttattttccaagtcccttcctttaagtgcagaggtgatcaggttactaattacaaaggatagttgcagttcggaatgaacagcccaaaccacctttgaacctttgtggtattaacttcctataatgtgcttgagtgtcattttgccagaagctacagcagattgaatctccaggaaggctctccagctctgtaacaagcactgacgacgctttagttgataacagtgttgtttctaaaagagaaggtcatgggcttagtctttgcttaagcaaggtggatgtgcattgttcggccccttacaaagctgctgctttcaagaaaaaaaaaaaaaaaaaaatcaacagctgtatcatgtgtcctgtacagtaactggtgaaacagctgtcaaaacccagactggatccttctggttctgattttgtcagaggcataactggaaagcacgaggtttaatgcagcatccccgaagccctgggcggtgaccccacctttcctgtcccccgctgcctcgtagaagacgtggcagaacaaagtcactttttagaaagctctttatttattcaccaagtgttatttctgtacgttgcttttcaaagaagggttcatacatattgcataattcctttaaatactgaattattttttgtaaacagagaaagagattttaaaaagtgtgtcttatagtaattttcctggtgagcaaatgtacgtgaaattactgtgaaggatgatgttgtcagaatgcattttacgggtttaaaggcaagtgttaaaatatgtttttttcacagatgagtcatatccttaatgtaagagattgttgctactttttttcttagactgaagtcattggagggggatttgtgttggtagaaatttactcttcccttaaactatgttttaaaatatgtcctgtacac

SEQ ID NO: 63261 - DNA, 1116 bp, Bovine  19866881003036
  misc_feature (1)..(1): n is a, c, g, or t
ncagcgcgtgggtacccaagacaacatgagcccatatttcagagtcaggcatttccagaagcacagtgagccatgcaggtgaggctcaggtaaggatgctgaggctgaccgtggtgctaacatcatagagcaccttctctggctcaagacacgggtccaagcactttacagataaacacacatgatgctcacggcagctctctgagatggtatgggctctcacatgcttgccctgcagcagaggactttgaggaccagagaggttaagtaacctgcccaaggccacacagccatagaatggcagagcctgaattcaaggccagttactctccaacaaccagactttggaaaaccacatctctgaggtcaagatgagctcaccagacctgggaagtattccgaaacactgtaagattttatcaggacagggttagggaacacgaggctccatccaaactgtcaggcatttcctttcaagataaatggacacacattctgtaaattccaaaaattccctgaaaatatttactttaactctcctaccaccgatatgaccaaaaataaaggaaaaaacccacgaattggtttggcaccaacggatgttaacatgttgtgggctggagatcccaaacaggtcaactcagacacttcctcttatctactatacctgggaaatgatcctgcatcataaaacaagtacttcataaatatttgttcattgagggaatgaaacgggccaaaggtttacccaaaaaaagcccgagttttcttcaatcggttatctctataaacaccagcttgttgttgtccagtcgctcagtcgtgcccgactctttgtgaccccacggactgcagcacgccaggctccccagatgcatctcctcaaatatttatctacacagaatcacgggacttgatgtcctttgagaaagactccttgttctgttacccaccagaaaggaagaaaagaaacctcaaaggaaatgaatgtctcaatctactaggcagacaggtaacagaaaaataggaaacaggccctgagagttgagtttattcaaccatgtttagaaacactgaggtcaagtaaaggttgactggctcaagcaggataccggt

SEQ ID NO: 63262 - DNA, 704 bp, Bovine  19866881128032
  misc_feature (1)..(1): n is a, c, g, or t
ncttccctggtgactagatggtaaagaatctgcctgcaatgtggaagacctgggtttgatccctgggctgggaagataccttggagaaggaaatgacaacccattccagcattcttgcctggagaatccccatggatagaggtgcctggtgggttacagtccatggggctgcaaagaatcagatgcaattaagcacagcacagcatcttatggctttaatactaaggatttatataataattttaacacgaatcaagattgataactttatttacatgacatataccatggaaataattaacctgaaaaattacagttgacagaatctaattacataaatcaccatgaatgcaaagcatcttctaatttttattttacagtgcatattcaactccttcctcccgaatacaatggcttacagttgtaacttgaaatgtataccaatccaaggtttaattttgcttttaagattaagtagcacatgtgtttgaaacagcaaacaatgccattgggcttacaattaatgaggttttgacaactgcaaacaaattgaatgcataaatctattcaaagcaatctctgtatttaacaggcatgtcactgtgtgtgactatacagttaattttcgttcttcagtgtgaaagctgatttacagtgacattgacctcatgcgaagagttgactcattggaaaagaccctgatg

SEQ ID NO: 63263 - DNA, 1473 bp, Bovine  19866881225927
  misc_feature (1)..(1): n is a, c, g, or t
ntcatcttaatcagtttcctctcactgctgcggttaagttcccaccagcttagcagctttaagcaacagcccgttctgaccccacgcttctctcgggagggctctgcccagcgtcgcatagaatgagatcagtgtgccagcagggtgcctcccagctgaggctctgggaggaaggacctgcattcaggtcatgcaggtgaggtctgtgtccacggtggctgacagtggagggtggtctccgtgttctagaggctgccccattccctggctccaggcctgcttcctccatcatcagactcagcagtccctctcctgtttccaccatctgtatccccgaccccaccccaccgtcatgtctctcctctgctcctttcctgcttttaagcactcctgtgaccaccctggagccaccccgagaatccaggatcctctctcctacgttaaagtcggcagattaggaatctcaactcccctgctaagccccttcccagcagcacctggatcactgcacgctgggtgggactcttgggggatatttttaaaattctgcctcccagctccctccacacccacgttcacatcaaaatgacaaaatttaaggttctcctgagtgactgttcgcagcaaagggatttgtttccatttctgagacaatatgtgcagagataattctgtgttatttacacatttggtgtttacgccttgcagactccattatacatatctttaggaatactctttacataaattaagatgatttgtctctttcctgaaaacagcaacatgccacacattctggatgaaaatgagggattgtttacatcagggaccaaattaaactcttggagaattctgaagtaggatagatggaaatgtgctcgagtctatggcatattttaggtttcctaggaacctccttgtcagtataaccacaaattaatattgccaaactagttaattatgagatcatctagtatcttaatatgtgtctgagattctctggcatttaacagagaaaggaatcctaaacacatattatcttcctcggtgggcttgcccaggaccacctctgtcacttgggaagacggatcacccccatgtggtggaggtctggcgctgggctcagaggatatggattcttttttttttttttgactgcgctgggtcttcactgctgtgcctgagccttctctggctgtggagagcgggggctcctctctagttgagatgtgtgggcctctcattgtgggggcttctcttgttgcagggcacagctccagggcgcagggctcaggagttggcacacatgtttagctgccctgcagcatgtggaatcctcccggaccagggatcaaacctgcgtcccctgcactggcaagcgttcttatcctctgtaccgccagggacgtccccagagggaatggatcctattttccccctccagtcctcctcccctcctggctgggccaagtt

SEQ ID NO: 63264 - DNA, 1025 bp, Bovine  19866881773543
  misc_feature (1)..(1): n is a, c, g, or t
nggaaggactgatgttgaagctgacgttccgatagtttagcccctgatgtgaagagctgactcactggaaaagccactgatgctgggaaagattgagggcaggagcagaagggggcaacagaggatgagatggttggatggcatcaccaactcaatggacgtgagtttgagcaaactccaggagagagtgaaaggcggggaagactggcatgctcagtccatggggccgcaaagagttcatggggacacaacatagcaactaaacaacagcaaccactgcatccatggatttaggaccacccgggcagccaccccaaaacactgggtgagcccaagcttttctgccagcatggtagtggtattgatggcaacggtgatggtgatcatggaaaacatagcaacaaaggatgtgaaccacagtataactctaataaaggaaatcaagttatgacttcagagaatagttcatcttaaagaagcaatagttaccccaggaagtcagtgatggctcacagcacagaccacaaatagattgtaaaatgtaataaatgatctacttgtgcaatgctggtctgtgacatcataaattggtacagtccttttcaagagctatttagcaacacatcttaagaggcataaaaatgtgcatggactttgtgagaatctcactttagggacctatttaaaggcaaacactgtgctctcttccctctgcccattgttccctttgatgctttttctgctttggtccacagtggcagcttcagcttcaccccaaagctgccaggtctggaatagacatctctacctttgccctcaggtccagttccaaattgatgactgactgagcagtttccatatggagggattttttcacaagaccaattttttccaaaacgagtccctgacagcccgcttcctccttgctctgaccaggctgcaacctcagcacccggttggccacctcccctgcagaacctttgaatccgtcagcaacaaggcctcctgccccacagccctgcctc

SEQ ID NO: 63265 - DNA, 1378 bp, Bovine  19866880440246
  misc_feature (1)..(1): n is a, c, g, or t
nggggcgagaaggacccaaagagtggcttcgacattaaagtgccgcggcgcgctgtaggaccctccagcacccaggttctcgttccttgctctactgagtggggtgacccgtgagctggggaggtggtgggaggctgggagtgaaacgacctcaccatggccaagtacagtctgggtctttttttgctcctttattgcttgtccaagcgaatctagggtatagacaccccatgattcccaggtttggtcatttgcatgcagaacttaatttgactgcatcaactcctattcccaaaatgtgggtgaaagtctatgtgtccatatttacactgtgtttcctggtgtttaaatgtgtggttataatttttatgtagggtctaaaaaatgattattcctaaagataaaatttttggaaatttgaaaacatagctttgctatatccctggtcttcagctttcactgctggtctttctcctggcacactcagctccctcctgccccttcaagcagctttcctctgatcctcacatctgatttaattgccctctgctttttcccctcctgtctggaactttgttctcgtcagctctgtgctgtgggctttttgaatctcttctgtcagcctttcagagaattgccagcagagcgtgttgctggctctgtataaaatcttggggtacttgggcggagggtgagggtgccgtccggggcctgtccctcccgtctgccagcgtgcacatcccctgctcatccgcgtgcccccgtgactaacgctctcctgtctgtccgtgtttagctgtacctggtgcgcaccatggtggagtccttgagctctgccgagctgctcaggcagctcaagtctgtgggcgcggaaagactcttgcatgtggttaacgcgtttctgaggcagtcctacgtctatccgccccttttaacctttggtggtaagacatcatttgtttttcttgttgacgtttatgacatgagggtctgctctgagttctttgtcccaagcagcaacgacttggccgtgtggattggtgctgcccttgcaaggagccagcgcagtgtcagtgggcagcccttctcgtggtttatctgtgtttgttgtaactaatgtgccatgtatattttctcccctacaaatgtttccttggataatgcagctttacatggtgagaaccatgctagagtccctcattgcagacaaaagtggttccaagaaaaccttgagaagtagccttgaggggcccaccatattggacatagaaaagtttcatcgagagtcattcttctacacccacttgataaatttcagtggtaagacctactgctgaccagtgtctgctccagcatattctaacaccactaacaatgt

SEQ ID NO: 63266 - DNA, 1533 bp, Bovine  19866880498048
  misc_feature (1)..(1): n is a, c, g, or t
nctaaaactcaaatatgtttagtagttaatttcaatattgcaaaatgttataaaattacattaccatggtttatataaatcttaattacaacaagcacaaacaacttacatgtgtcaaatgagttactataatattgttcctcatagttacttttccatcaatcaactggaatataaagagcttttttacccctgaaagtaacctgaaatgaaataaaaagatgaatataagtctaaaaaatattcactacagtaatgtctaggaaatttaaataaagattctgaagagaaaggtgagggagggcaaagaggtaagataattagaaaataaaagacatcagtctttttacctgattattttaagactcaatatattccaatttcatctttaaaaaagtccaaaacagtgttgttaaagcatttcctcacgtaggtgatggtcaaaacacaacttcccacttttgagaaccagaatctggaaatctcagcaggtaacagcactagattaggtgtctaaggacctgttttgggttcaaatctaatggcctatttttaatatacatgtgaataccctcaaacacctttctttaaaaaaccaaaattctgcttctcattaataaagcctttagactatgaaattaggttaatggatcttaccatagggtttcccgaataacctgtgtttcagtaacaaaaactctgtcatctggaacatataacgggtcactgctgtacaaatgttggtccctattagataacaaacatcaaatgccaatgaaaagatgtctcattaagtaaagttagaagtctcaaagaatataagtaatttactagcaatttaacaagtattcaataagttaataaacataacacatgctttaattttcctcccatattcattttcacaagtcaacggaaatactctcagagaagcactttcagagtatttgttatgtttattgctgacttaagcaatatttaaaattatgtcttgttgttttgggaaaaattgttaaactatttttacagtaagttcatgaaaacagaaatcaaacaaatggcctaatatataccaatccatccactctgaaaataaacaaatcaaagacagaccatagttaaataataacctcattatgaaattaaattaaataattaaagtaattaattaaaagctaaatttatcaattcaactgaaattgacaaaaatttcaagaaaatctgagatctgttttcccttctcacttggctgccttgggaataaacccttttctgctgcaaccttggtgtttcagaatttggcttgctgctcaataagtgaatagacctagtaagtcgaggaaatgaccacagggtaagtggcaagtgtaaagtgttataaagaataagtgattcaggagagtggccaagatggcagagtaggaccttaagctaataatatcctctcataagcacatcaaaatgacacctactgcagaagaaaacctgatgaaaaacactggaacataccagtataaaataaatattaagtaa

SEQ ID NO: 63267 - DNA, 938 bp, Bovine  19866880789705
  misc_feature (1)..(1): n is a, c, g, or t
nctcagcctcccgcatttatacccttggcccagaaaagtactgtgttaaaaatgtgttaaaggaaacagattccattcatagcttagaacatagtgttgtgttatgaagtaagtccaggttttatgatatttcaaaaaatgtgatttgttcagtgtaaaacccagatttttctttgttgttttcaaaactaaaatgttatgaaatagaagtaaatcatagtttttcaatttgcatttaataaatgaagattattatctttagtatatgttaaagataattagtattttcattaaaaatagaaaatgtctaatactttttgagacattggttaaagcttcttcagccattgtcatttaaatctatcttgttaacctatttttattcttcccacagtggaatctctagcactatcactcatggctggcatggaacaaagttaaatatcttcagtgtagtaaatacctcagatttaatcttcatacatatacatttccaccatatggagctaagaaatgggactcttattctggtttatttttaaactgttgtctactgtctaaacaagtgggttttatgtgtattctcttgggattattggttggtatatagagttatatgtataaaactttatcaatgcaaagtgaatacagtctgtttacacttatatttcctactgtaagcaatagctttatggtattggtacctttaaatgtaaaatatatcatttttgaaaatgtaattaagatttaaaataaagcactttattcccccttttgcttagtcacagaagttttttatagttttacatactattttccctaaaggttgtcatagatttggcagttgaaaaatgtatttttatatgcttggaaagttccaggatagaaaacaatttcaaccaatgtcaataaatgtaaagccagctgggtacaagaat

SEQ ID NO: 63268 - DNA, 3017 bp, Bovine  19866881070512
  misc_feature (1)..(1): n is a, c, g, or t
nttaacgggaccattcaaaagatgctgtcattctgaagatctacgcttgcatgcagagccgactcttggtgatgaatggaacacctgaacttatttcacatgaacaatgagttcatgtgagatctagctgggagatctagctgcacccccactgctgacccaagctcagatctgtttcgtgcggcatctcaagttgacttcattttaaagacacagcagtggttgcatgattttagatgtgtattagggttcagggtaggctgctcccaaatatgccactgtggcatactgatttattctgaattagttacttaaacagctgcagcaagtacattctgacctcctctgtgcccctgaaagcaggaaagaaacctcccacatgaaaggtaacctccctgtaccaggaggtcaggaggcgtcctcatcaccagaggctgtgtgaacaaccttcctacctcctcactcactgaccatgccaacgcaaacttcttatcaattcttcacaggctactttttctttgtttaaaaggttacttctttgggtgtcatatcttgggaccccccgccatatttattaaattaaatttgttttgctcttattaatttctgctttcttaaaggcagttctcaggcaagaacctagaagagcacaggagaaatcactttgctttctctacaaatgaaaccacagcctattcagatgcaaagtaaatctcttctaattcacttgtatagctaagtttcattgtctaacaaaggaaacagaagtcagcatctcattccagccaacttgttttaacagtctagggcacagactttccctagagagttggttacaggacagctgctctgatctacctgccaccaacatacgcagtcttacagacacactgctgtgacatgcccacctagaccagacgcgcaggctcaaggcagcacatcatcctctagggtgatgggagcccagagctccctccacacataggactacaagaatgctttgtggggctcgtgatctgtctcaggcccagaatggcccttgtgggtgccgcaccccccacacaaaggcgcccgggaacccaggtgcgctcacctcttgtaggctgagtggtcattcttcacactgcacttcatgttcttcagctcgtccagcacagcaaacatgttgatgaacttgcccagggtgatcaggtaggcttcggacacgaagtccttccttctctccgcatggcacaggcgcctcacctccccacaaaaacgctcaatggcatttctctgtacagaggaagcagggacaaatacactgctttcagggacgggccaaccccagactcagctccaagcacagagtccagactcacattactcgctgaggaaatgcccaaccaacaggtgcatatttacagctcaggtaaagagacattttctagaaagtgatttccacatgtctttgctctataacaatcatcatcgattttgcactttaccaactatgtccccaaagtaaaagaattttgttgactattccggcaaagttactgagcaaaatgctgcaaaagaacatctgtaaagcagattgctttagctttcagagttgaaaaagggagtgggaggatttccacatgacaattttttaagataaaacaaaactcatcatctaaggagttttatcttctctgtttgctaaaggaatctataataaaaaactcacacacatttaagtatgtctttaaaaatccaggaaggcccctcccgtagccaccctgcctaacccaagggccagaaggagtcaagaccagggtgaggcccaccagagcagacaatgggatgaaaacacgtgaaaaccagatgaatcgaaagtacaagcatactgatagaaagcagtcttcatgcaggaaatacaaagtcactctcaagggaaggagagaagtgaaacataaaagcagcatttattctgaagcagccagtcaagcttcagcctgtcaaaggtttagttccctttggcctcaaagctgttgtgaccgtctgaatttacatgcagtttgtttagtcaggacatggtgccagcgccccactctctgcactaaacccctgggattatttcaccgttttacctggaagtacataaaattcatcagtttcgtgacctcaggctcaaggacctccacggttttctcataaatttcaactctgttaggctgttcattacatttcacctggaagtaaacaagcacgaccgagagaggcttcaacccacagaatgtgaggagttgctggaggagggcagaccagaggtggggtgtggtgtgactgggcaggaaagcctggaagggatgaggcctagtctgtctggagtggggtgtgcccagtaggggtggggtggagtctggctgggaccggcacctgtgggatggcccgagagcagcttctccaggtgtacagcatgacagcatattcttggccttcctccagcatctcattctgcaagggtataccgggcaaatcaaaggcaagcagaacagtcaccaagtgctaacatatacagccataaaccagagggagaggcggggaagctgactacagtctgaaatatttttaagatgcgttaaaatgttcacaaggtttgatctaataacttcacttgtacaaatctagccggggagaataattatatatttaggaagatattcatcatagaacttattataagaaagcaaggcaaactaagtaaacatgcttcatctggtttaatgtaatgacataccaaaatgttcattaaattattaatatacatagttataacagcaatgcaattcacttctgcgatctaaatcccatatgggtgtgtggctggtatgcttgaccacaagtataaacaagggagagtgggcttgctgatgctgacaaaggttttctctgggccacagaagccagattttcagaaagagcatgcactgttcttagtaatagaataataccaaaaaaaaaaaagacatttgccattcagatgtgtcaac

SEQ ID NO: 63269 - DNA, 976 bp, Bovine  19866881488696
  misc_feature (1)..(1): n is a, c, g, or t
naccacgtgacactgcagccagcagccacgccggctacccagcaggccactctgtgcattcaacacagtagtgaaatggtagatgggtggagggaggctaactggaccctcatgtgctccagcaccccagaatggaagcatgcaaagtgtcgagtcagccagcacatcccaacatcaacagacgtaaaagcatggaggtggtgtagatccagcaactgcaccacagatttgaccctgggccccacgggagtgccctcgacaggaaccctgacctgcatgtgttctgcacatggaagccatgaccacagaaccaagggctggccctgggctgcactgtttagaggagatcacgagggcctgcatatcctggacacggggaaagatgggcccagagaccatcctttcttgatgcccaatgacagggggcacccagagctgtctgtgaggcgacatgcttaccggttggtggagccattgtagcagtagttgggcaggaagtcatagttgagctcccagaagacatggagggtgattctcccgtagggtgcagacacattgtggttggcctcccggaacatggcatcaaagctgtccagagtgaggtacttgctcagcagcttgtgtgtcatgcggttgatttctaagaggccatccagctcctacgggaccataaagtcaggcacatgagaagagtcaggtgtggcatggtggcctccaccctccacacgggcagggccgtggtgggggctggaggcggaatggggcggacaggacacagacaggaaggcgctgcaccgaggtggggtcagcgtacgaggcaaagacccacgtggtgggggtctgtggggacccggcgtgaggacctccacccgtggcaaaggtcatgaggaaggaggctcaacatatgcaaaggcaggatcgagcctcaggagtccccctggaaattctcgagcatctacccccaaaaaaccagagt

SEQ ID NO: 63270 - DNA, 876 bp, Bovine  19866880440970
  misc_feature (1)..(1): n is a, c, g, or t
ntcaggagaatgtaccgaataaatgaaggagaggatgaggatgcgctgacagaagtgacaccgggcaaaagcatctcattaaaaacctctcagatatactttatgacattgaaagcacaaaggacaaaatgttggaggctgacgcatatttagaaaggaatatgacaatttgccaaggtacagaagatgcttgctccatattgcacattacacagaagtctagcacagtttaaactacttctgatgtttttcacaaagaaataaaaacactttaattctcaatatttctaatgtttaaattatattctactaaagaaatattagttttacaatgttttcattttcctccttataactggcagtaagagggttttcaatgttttgacaaacatttttagcgtatggaacaatgttcatcttcctattgattactaactttgcatgatttcagtttactcagtcatgtttagggtcctgcataaccattcagagtgagcactgtctgcagtctttaaagcagggttacaaactcaaatgacttctagagccaggaaggtcaggaaaatgagggaagcaggaaggtaatagataaattccccagcctttgtgggaaatggtggagactgtgccctagagagctttatcctgtctaagaaaggcagcctctactcaactctatggagagctgagccaggagaaatgctggccagggttgccagatctgattcctcaacagctgcctgaaatctggatgtgaaacctcacaaattttcaacaaacacggtgtttcaaaagttaaatgttctgtgaaccaaagaaatgaaatggatattaggtgacagcctttatttttaaaagcctgcaatagagccaggt

SEQ ID NO: 63271 - DNA, 2301 bp, Bovine  19866880374239
  misc_feature (1)..(1): n is a, c, g, or t
naaaatctagaaggaaatacaacaggagggcaaaagtgtttattgcagagtggaatgattatggtactttctattatttctttaccttttaatgatgaatgtgttgtttttaattggcaatttaaatgaatgaactaaatcaatatttatgaagataaatctctaaaacacaatgtcgaagataacacacaaagcatatattaataaaaataaagttcattttaattttaaaaaggatctctgtgttgatgagaaagaaactgttgatgagagaaggcaaagacacatgaaataatcagcaaacaatgaaatattcagctctgatatagatggtaagtacaataagagttatgagaagagagaaatgtctagggttggagcagattaagatgacttcgtggaaaaagtgagatttagccagtacttggaatctgaatgtcaaagggagaaacagagggacattaatattaaggtgaggcaagagcctcacatggccatcctagatatatctcacctctacaagccaactggtaacaactatagaacacttgatctttgcctataagagtgtttctgcttctttcatacaagtgggatttacatgccctgtataatataaatatatagtaaatagagtgtcgcatatcctttgtaacatatatttttgaagttacaccagatattttttagaatagccctttgggggaggggtcattttatctggaaaatctgtagaactggactttcccagatatttgcctagaacaaacaccaactgttctgcaagagcagttataacctgtccccttgtaagtgttctgacatccacaatcagaccacaaatgaatccaaccaattggaactcagcaattctctgattacacatgttacagagtgcaatttttaagccagctttccagttcaataactaaactaccactactagtattagctacacatactatctgaaagagtgaatgaattgtctttagcgtctaataacaaactaaaaagttatgcccatctcaaaaatgtctgcaatgggaaagaacaggccagactatgaatgtccatccagtattcctttagtatggaagtactgccagatctagagttgctactgtagagaggaaaaggtgttccagatagggggatggtataacaaaaatatcaaacagaaagaagcaggtcatttttagtgaacaacggggacaatggttttactagtgctgaagtggtctatctaggaagagtgagatgaaaggaagatggagtacgaaagcccttggtgaccaagaagtaggtttaggaaacaattctgtagagggaatgatcaagtccattcttgactgtaccagccatgtccccagctctgagcctttgcaattacccttctctttgtctggaatgtcatgtcccctatctctgactgtccttctcctgtttgttacagttcaaatgtctcctcctctatccccaattcctctggaaaatgttattggctgcaactatgtggtccccaaaacttttcacatcggtactggaactttttgtgcatgtgtctggctcttccacaaggtcatgaattcctcaaagggcagagactgtatcttattcatatatgtgttttctccagcaccttgcatatggcatcttgtacatacagaagttcagcaatgtttgtcaaactaaaagatgagagatactactaagaaatatctggcaacactttgaaaactagattagagtaacagaaaccaactaggggagcgctgtttgtattaatccatgtatgaagtgatgaggaatgagaaaggagggaaagtaaaacacatttggaaaaaactgaaaaagcacagttaacagagtggacaaaggcatgaaggagagaaagagtccaagatgaccccagggtgtctaggctggaagaatgctgagagcagataactgatatcattgctacatcaacggatagatactgagtgcctctcaagttcaaggtactgtgctgagtcacagggaggtcacagggaggagtaagaacctaggaagtatacctaggagtataccctaggaagtaaaatcatgttattttaccaaaagcagtttagattctcttagtattatatttttatcacttaaccccttttattccttgataattcatctaggggattgatgagtgagttaagaaatgactctctccctttgctgcctcacggtcatatttgtatttttctttgagctgcttgggaaaagtcatttgaaaaatatgtcacggaaaaacaaacaaagcaaaca

SEQ ID NO: 63272 - DNA, 1192 bp, Bovine  19866880441622
  misc_feature (1)..(1): n is a, c, g, or t
ntttttttagaaggtcctttttaacaattttgcatagcaaaactgggaaaatttcatacagtgaaaccagaataaattagatttctgatgtggatgagatttccttgtgtttccgatgtcgattctggtccctcagtgaagtagattttagttgccccaatcctgagcagtctatattatgctgttgtggttgagttactaagttgtatccgactctttttgaccccatggactgtagcaccccagtctcctctgtcctccactatctcctggagtttgctcaagcctgtattataacagaaactaaatgctctgaggacaagttcagtctagaattttccttaagaccgtgaatataagacatgacatgcactgcggtgttaatggatgcttctggatgaatttctagacaaatcctagatttgtggggatggtgggccatagcctctgtactcttgttctgtactcttactactgggcttcttgtaatatcccagttatagtttttccccttcgctccttaactttctttttttcccttctaatatttccaggagaaaatacaaaatcctcaatttcattgcctctacactaggaggttagtaaaggttttcagtctctcactcttgtgtgtattaagatgtgcaagtagagaaagagagaaaaatactacttttcccaaaacttacaagaaaaattaaggcctaaaccttgggttgcatctaactttgttctttatctttaatatagcagatgcttaataaaatttagctgcagttctctttataattatcagtattatttttagtagtaataggatccaggatttggaagcaggttgtctttataacaaagcaagtgtggggaacatattgccctggacctaccttctcaataggaagtggagattgtatatattagctggagttcacccaagctacttttgggacaaacagatcatgtgttctgaacagaggtcaacagctgtttctcctctgtggcttccagaaatggggacagatgtattcagactgaccttccttattcactgagtgtgggaacggttggaaagggtaggggggagggagataaaacaagagggagggtgggaagattcccatgggggcccagtaatatgagagagcattgaaagcaatgttcaagttaacagttctatttcctggagggtctg

SEQ ID NO: 63273 - DNA, 3296 bp, Bovine  19866880456563
  misc_feature (1)..(1): n is a, c, g, or t
nctgggattctccaggcaagaacactggagtggattgccatttccttctccaatgcatcaaagtgaaaagtgaaagtgaagtcactcagtcgtgtccgactcgtaggaacccatcgactgcagcccaccaggctcctctgtccatgggattttccaggcaagagtactggagtggggtgccgttgccttctccgatggatctgacactaactccaggtaaatagtgtcagaactgagttgaattgtaggacaccctgctgggagttggggggacaagaatcacatatttgggaactccaatggcaaaaagcaaaggacatgaagtcccacagtcgtaggagtcaaactccatctgagtcaccttgtagccatataatcttagaaagtcataatgtcaattcctcatgtgtataatgaggatcaaagtgcctccctcaatagggtgcatatgtcgcacaatgagtgaatctctccactcttaagcccatcaggctcctctctgtccatggaattctccaggcaagaatactggagtgggtaaccattcccttctataggggatcttcccggcccagggatcgaacccaggtctcccacgttgcaggaagattctttaccatctgagccatctggagagcccactctaaagatagaaataagatttaatgaacctccatgtcatgtttattacaagggatgaagaaatatttattggatcaaccaaaagatcattgaatgtttgtttgatctacttctgtggattcactttacttcatagcaacagtgctaccagaatcatttcagaaatcagcatagtactcctcttagccaggcaattctttaacaataacataaaccgatataaactatatgaattatcattgaagagtcttcaagaatcagagttgccaagtcagtcagtgggaaacccttggccatctctaactcatataaagcaagcctaccaagataatatcttctttgatctgaattcctgctagaagcttgtctttcatattagtttctaatttttcccaaacctctgcctcacagaggttcaaatgctcacgtggtggttgtagggaagtaatgaggcctgagattctccctttgagctatggggtatcactccagctatttgtatgaaaatcttattcaaaaaagcagataaaaatgaggtttaaaaacctgtatattaccacaagccaccagaaccaaaacctgaaaaaaaattatactgccactagaagaaattaaaaaacactaaaagaaacaaaaaccaagaaataattgctgtattgatggactaatcccaagtaaagaaatattaagaatgatatatttgcagaaagaatctggggggctttatcaaggatttcatgaaaaatacagtgaaaagtaactttaaacaattatctagggacttccctggcagtctagtggttaagatttaaccttccaaagcagggggtgcaggttcaatccctggtcagagaactaagattctacatggctcccagtcaaaaaaccaaaatagagaacagaaaacaatctagtaataaattcactttaaaaatggtctacatcaaaaaactctaaagagagaaagaaaaacaattacctaaaaatcttttaggggcttctctggtgactcagtggtaaagaacctgcctgccaatgcaggagatgcaggttcaacccctgggtcaagaagattccctggaggaggaagtggcaacccactccagtattcttgcctcatggacagaggagtccatggggtcgctaaagaatcagaaatggcttaatgactaaacaacaacaacagaaatcttttgaccacttggcctgggtgggaggggggtttggaggagaatggatacatatatatgtatggctaagtcccttcactgttcacctgaagctattatagcattgttaatcgcctatactccaataaaaataaaaagtttaaaagaatcttttgaccagtaacagaggcagtcctgtctctccacgtgtaaaagcagtagctagaatgacatttcctgggagctgcctgctagcaggtatgtgctcagcatcatgtactcattatctccctcaatctccacaacaacccaaggtgttgttataaatggagatataaaatatctccattttataggtgaggaaacagaagtttagagaggttaagtaatctacccataatcacacagtaagtagcaaagctgggatttgaactagattcgaacatcatgggaaaggaagacaccatcccaaatagaaaaaccaacagcttgaatctattactgacagggcagtggctaagagcaaggtttgtaaagaggcatgcatcttcctgatggacacatctatgcttcagcaccaacttcataaaaattcagcaagaattctacaggatgtgcagagccttccttcagtgcagcagtacggggttctcatattttctctgtgcttagttgctcagtcatatccgactctttgtgacccccatggactgtagcctaccaggctcctctgtccatggggattctccaggcaagaatagtggagtgggtttccatgccctcctccaggggatcttcccaacccagggagcaaacccaggtctcccacattgcagatggattctttaccatctaacccaccaaggaagcccaaaaggactagggtgacattcaatttatgtgtttgttaaacctaactcaactgactcctccttgacatggaggaataatttcttcatgtatttttcatcactccattctgtttggtgcttcactatttgtgaaaaacagctacatgtcaattggtaaaaatcttttagtatcaaacaggaaacaaacacatagagtaacagtatttttcagctttcatacatctgtttaatcatcatctactcaatcaacagacgttgccggagcacctccatatatgaagtatgctgcacatgtcatgaggaggaaaagagaacttgcacaatcataattagatttcacaatatacatttccatcataatgattcttttctagcaacatgaaaaaaatctgcatggagtatatactgtgctattttcttgtgaactagagaagcttgtggagaaggcaatggcaccccactccagcactcttgcctggaaaatcccatggatggaggagcctggtaggctgcagtccatggggtcgctaagagtcagacacgactgagtgacttcactttcatgcattggagaaggaaatggcaacccactccagtgttctgcctagagaat

SEQ ID NO: 63274 - DNA, 2238 bp, Bovine  19866880624474
  misc_feature (1)..(1): n is a, c, g, or t
ntggatgctttaccatttgagccatcagggaagcccaagacatggttgctgcttctgctgctgctgctgctgctaagttgcttcagtcctgtccaactctgtgcgaacccatagatggcagcccaccaggctcccctttccctgggattctccaggcaagaacactggagtgggttgccatttccttctccaatgcatgaaagtgagaagtgaaagtgaagtcacttagttgtgtctgactcttagtgaccccatggactgcagcctaccaggctcctctgtccatgggatttgccaggcaagagtactggagtgggttgccattgccttctcccgagatgtggttgacgtaggtctaaaacaagacatggaagacatgaatctcctttgatgagcaaatttgacacaagaactcgaccaactttctaaactttccttacaactgtactgcagtttaaaggtgtcaacctaaccatctttgctttcttctctcctttgctcagtgtcagatatgctctcttaccctcccctcttttctcattttctctcaagcacatttcccctaataaatgtcttgcatgtttaattttgtcttggtatcttcttcttggaggctctaggccaacacactatttcatagagttgctgtgacacttaaatgatctgatgtacacaaagaaacttgcaattgttagaacatagtataacttctggtcctcctcatattcactggccagacaccaccctttcttagctgtgggcttcctcatagttctttcctccttataatggtagttgtccaatacttatcaatggattttgtatcttctagaacaaagccatctttagaagagtctacagcttcagtatccattcttctatttttcatttttgaagtaaaactttccaccccactgagtttttgcagaacccagggccatccagttgaggactacattttccagtcttccttacaatgggtggtgatgatagagctaagttcataacagtggaattataaacagaaatgatgtatgcattttcaccattaatttcttcagacaaaattgcttgctccctctttttctcttctccccacatagctgcactgaaatgtagttgcatcagtgagataggttcaaccatgtaggtaaggaaaatgccataatagatgtcagaaaaatgagatagaagaaatatgggtctctagatgatcttaagagaaggcaatggcaccccactccagtactgttgcctggaaaatcccatggacagaggagcctggtaggctgcagtccatggggtcactaagagttggacacaactgagcgacttcactttcacttttcactttcatgcattggagaaggaaatggcaacccactccagtgtccttgcctggagaatcccagggatggaggagcctggtgggctgctgtctacggggttgcacagagttggacacgactgaagcgacttagcagcagcagcatgtcttagaccacccacctacctctaacttttgcttcaaaagaaacagattatcttttttgagtcattgtatttttagggattctttgttacagcagctaagccagtaccctgcctaatacaccatctttttgatctattgctacattctctctactttggttgacctaggactggttgatagtgctttttccttaatccattaaagtctaggcctcaatatggcatttaattacatttgatgactttgaaggacagcaaaactagttccctttgggcaaaggattatctcaagtcagagttaatagccttaatggtttaaaatggcactaaatggttctctacatttggccaaggccatctggtcatttgcagataagcataataataagcacccgggcagatctccacatatgggctgaacacagacgtgttccaaattatatacgctataaaatttactatctttcactaaaacccaagccacaaatgatcccttacttgaattgcaataatgagtcaccacttagacaatatgactgaaatgaatctgactacaaacaaagctctaaaaccacagtgtccagattccagtcaaggtcaaaatacaattttaattctggggagatcctttgagcatgcacatcagaaacagccgtgggactctgcccacacatgtccgtggccaatgggttgtttaaatttgagcccgacaacggataaatcatagctttgctctcagaacat

SEQ ID NO: 63275 - DNA, 1508 bp, Bovine  19866880625889
  misc_feature (1)..(1): n is a, c, g, or t
nggtaatgcttacaaagtttctttattgctccaagactcagttttcttgtctgaaaaagagtgatatttaagaatgctgttgaaggggaattccctagtggtccagtggctaagactccatgcttccctttgcagggggcccgtgttcaatccctaatcagggaactagatcccacatgccacaactaaaaatattgcatgctacaatgaagactgaagatcctgcatgctgcaactaagacccaaaacagccaaataaaataaaaaaaataacaataaatatttttaaaaagaatgctgttgcaaatattaaagtaaataatgctcataaagcacatacaacagttgttggcacatcagagcatgcagttagtgttgactagtcttcactataactcagtatccctttgtcactctaagtctatagaaggtttaatgcttggatttattatcattgatttctaagcctctgtctctccctcctctgaaccaccttgcagatgtctgccaagtcaggctttctagaaagtctcttccatcattttacatctctgctcaaaaactttcaagggttccctacatcaggaagatgtctgaactcctcaggctagaaacactgcaggtagcctagctcggatctgcttttccagccttctgctccagctagaatgatggcttttttctttgtatcacccatctgatacatatttttgtttcacttttcatatacaactactaggtaggcaataagcagttggaaactatttgcaagtgttatttttgctctggcagtctggagtaaggatgtttatgtctgaccaaagcaaaagatcctgaaggctatggtctaatcagaggaaagttttgcacagaagctccggtctgagcacaatggatgctgggaaactcagcaacagtaagaggggtgagctaaggccagtagcatggagctatcataatgtttagcctcagatgtgcttaagggatatataccatgtcttaaagctatttttaacaccaagggcttccctggtggctcagatggtaaagagacctgggttctatccctgggttggacagttttcctggaggagggcctggcaacccactccagtatgcttgcctggagaattcccatggacagtggagcctggcgggctgcactccatggggtcacaaagagtcagacgcagagtaagtgactaagtgcagcacacagcaaagctatttttaaataatatccctaatgaagagttcagaaattctccagtgagagctctctagggccctagaggatagaaagccataggttatcctaactgtagatcttatgcattcaagtttctccccataggagcacctatgctaagaagaatttattttgatttatttacacagagcaacaaactaatctctccttctaatcaacaaaaacttccggccctattcacaaaattgacttaaaacttaactgttgtgatggcttgcttccttcatggagccactgg

SEQ ID NO: 63276 - DNA, 2665 bp, Bovine  19866880649822
  misc_feature (1)..(1): n is a, c, g, or t
ncttccctggtggctcgatggtaagaatcccgtgcaattcaggagacctgggttcgatccctgagtcaggaagattgcctgaagaagggaatggcaacccgctccagtattattgcctggaaaatcccatggacagaggagcctggcaggctagagtccttggggttgcagctgagcaactaacaacacatgggctctaattctaacaaagggtaccatgataacacttggggactccaagaattgatgttatattagaccctatatccattaaccttcaatatatctggttattcccctttccctcatctgagtaagtggtcataagtcccttgggagaaagactcaggtaactgtcacaatatattcttaccacagtgctgaagggtccttcttcctaggcacctggtcacctcttcagtcaatggattctagatctgaaaattggctcaggtcaaggaattgagaaagggattttgacttttatttgggtgattgtcctcagactcctgattctccactcttgcttcatttttcttgtagtctcatggctttccagagctctgtcatccccatagatgttaataagcccagacctgtgatggcttgtccttgtcctaccataatccctccatacagaggaggcaactactgcattgctgatgtccctctccccagcacattctctatgaccttggtgaatgatttgtccatgcccacttcatcaggctctttgttccttcctttaccatcttcaagggcaactcaagcatttccatttcattagtagtggcctttgctttatccagcctctaggtgagtttgacccatcccctaatttcactatggtgttaaatcccgtatctcaagaaagtactcttaagtcaactaatccataaaactgcacgttaacagattaaagaaaaatagcgatctgagctgttgttgcctgggaaatgtttaataatctttcacaaaatggccaggagaagatggagatccaacttctctggaagttgctgcctgtctcttgaatcatccacagtcccacacctgttttttttgtagatcaatccacttaacctatcagtctctttgaaacttattttgtacatgtaactccttctgcctgggctgccttatcttttcattagcctggtaaatgcctactctttctgtgaattcttttcttctccttcatctccatcccaacagatttaccactctttcttctgccatgaccttatcagcatcttttgttaatttgtaggtctcctcattatattctattccttgaagacagggaccacatcactttcatcttcatgtcatcattttgaacagtaagtgtgcacataataaataaaatgcttgaagattatctcccagaggagatgagaacatgtagcataacttgacattcatattttgttttaatctgccctctttgcatttcttttctttggtcagtcatcacactcatctatccattatcagactacctcccgctatggtggcttctgaaaggcaataagaaaacttttccataagtgccaacagtctgagtttacatgtttggaggttccaggcaggtgtcaaaaatcacaatgaatattccaacagtcagacactgagacttttaaaatatctagatgtggaatgttcaattgaaaaacacgtggaagccaaatcagagctttccattttaatctggacatagccctacttttactaggaacctggaatcagtttcctaataaaggaatctcaggcggctcatatgaatttgcaacttcccaattgccttagagttcatagcacttgttgagcctccaacatgcacaagaatgaggtcctaaatagtttccaggtgtctatggaaagacctattcaatggctttgggctaagaaaagaataataaaatgatattcttaagattcctgcatcacaaactcttcacaagttgctttaaagcaaacttgaagtgaagttataactgtcaatacacacacacacacacacaacccaggacccacacagcaaacatctcagcgatgttctatcattcccagaatagtaatagcttaacagtgagcatggagtgtgggagggaggctccaagaaatctcccaccctacttctcatctacattctcccacagttttcagcgtaagcctcactcacactggtccagaagaaacataaggcttatcatatgcttgactgcaagccataacttaacattagaaatgtacgaggaactgggtgtgctggaaggaaatcaagcaaaagcatctgtaagctgaaaatatgttgaaaacatgttacaacatgataacctaaagtttcagtggctttgctaagccagaaagaaggaaaaaaggaaagaaaacacatttttcacttcttgagttgcctcatttaaggtaaccaaatagttgtccagtagacttcctcaggtctcaggctccaaaaaagttgaatttaaaagatgttgtacctggttcagttcttcctatagcctataaaattcaggagttttgaaacaatgcctaaaaaatgaaagaaagtctttaaaaagtctaatgaggagggaagggaagacagataggctgccctgacacaattccagcttttcctttttcactcatagcccctccttca

SEQ ID NO: 63277 - DNA, 2603 bp, Bovine  19866880686741
  misc_feature (1)..(1): n is a, c, g, or t
nccagtgttcttgcctggagaatcccagggacgggggagcctggtgggctgtcgtctatggggtcgcacagagtagggcacgactgaagtgacttagcagcagcagcaatagcagtgactgaacaacaacagcaagaaggatggtctcagtactccatgcattgatagattgaaagtctcttatttcatctctatcatttctccttcttagggtatgtgaatgccattgaatttcaagagtaaatgtgaaaggtctgtaatgaattgatttgtttctttagtatgttaaaaaaggaaggcaaatgccaaagtttgtgtttctttatattctaaagagtgaacatcaaatacccttagtcaagtaataaaatcaagtgtacttaactactgttttgtgggtttgtgtaaatcagctaacctctctgggcatcaacatcctctttcacaaaataaaggagctagtctatatcactgcactcctttccgactaaggttgattcaattaagcactaccacatacatggtatcaactagatgctctatgcttgaagtgtatttcttttctatgctgctattaatttgctctttagtcttttgttattaatcacagaaaatatgggggagtctttgtttctactgtacatattcttaatctctatggtgaattttagagtcccttgttctagatctgggtggtgtggggactccagaataggggtaagctttcagagaaggatatcttgacttatttatttatttgactgtgctggatcccagttgtggcactgggatcttcagtctttttttgcagcatgcacactctcagttgcagcatatggaatctagttccctgaccagggattgaaatgaggccccctccattgggaaggcagagtcttagccactggaccaccagggaagtcctatcctgccttttacaaattgttgctagaaagacagtagggtaagatagaagttcctctatatcttcgaggaactaggaatactgggtcaaatttgagaaatgaatcttctctagaagatgtccccctcatgactggggacatgacttcatcattttcctttagttcaaaggtgtaagtgaatcatttccaaggacagattactccaaagggcagaaagatatattggtataggagagcggaggtcataaaaactgtgtgagaaaattaaaatatggacaaagagggtctactagaatgggaaatatttttgatttgtcacttgccagacaagaagaatggaggacatgaagtcttcttgcacttatagctaaatcatgaaagatgttcaatatagtacttggaaatagcagaaatttgttaattccatcaggggattgttagacaacttatgggcttcccaggtagctcagatggtaaagaatctgcctgcagtgtgggagacctgggttcaatccctgggttgggacgatcccctggagaagggtggcaaccccctccagtattcttgcctggagaattccatggacagaggagtctggcaggctacagtccacaggttgcaaagagttggacatgactgagcaactaacactcacagacaacttatgaggtgattatagaatgaaatattatttatcagtttcaaataatgtttataaagaatgcttacaggtcatggaaaaaatgctcaggatataaccgataatagtatagatctgttgaaaactataaataaaaccagatattaaatatgtaaaaatcttaataaaaaaggaccagaatgttaacagtgtttatatcagagtggtaagatcatagatgaattttgttttagtgattcttttgacatttaaaaaagtaaaagtatctttttctaaattttctatatgaaatatgtcctctttttatcgttgttgttgttaagtcactcagtcgtgtctgactctttgtgaccctatggactgcagcatgccaggcttccctatccttcaccatctcccggagcttgctcaaactcgtgtccattgagtcagtgatgccatccaaccatctcatcctccggcatccccttctcctcctgccttcaatcttttccagcatcagggtcttttccaatgaatcagcacttcgcatcatgtggccaaattattggagcttcaacttcagcatcagtccttccaatgaatattcaggattaatttcctttaggatcgattggtttgatcacttatagttagaataaaaatcaatatacaaaacattattattattttttaagacatatacataaacttcaaactaagttaatcacataaagcttagatttttcaagaaaccagaaaaaagttactggaaggtttttgaacaagctgtggagtacaagatcctgagacccaggctcccaaagaggatagtggggctggccatgacaggggaaggcccctaaacacagaagactttctcagaaggtaaggcctgcagaggcgtgactccaagcagcctcctttcatgcctgtcacttaacctctaatttccttgaggaacatacagaccacgagacaccaagaggcttttgtcacctcactgccccctaaagacacaggatactttcgactc

SEQ ID NO: 63278 - DNA, 1579 bp, Bovine  19866880732527
  misc_feature (1)..(1): n is a, c, g, or t
ncagcatcagggtcttttcaagtgagtcagttcttcatatcaggtggccaaagtactggagtttcagcttcaccatcagtccttccaatgaatattcaggactgatttcctttaggatggactggttggatctctttgcagtgcaagggactctcaagagtcttctcccaacaccacagttcaaaagcatcaatttttggcactcagctttctttatatagtccaactctcatatccatacatgactattggaaaaaccatagctttgactagacagacctttgttggcaaagtaatgtctctgctttttaatatgtcgtctaggttggtcataacttttcttccaaggagcaaagcgtcttttaatttcatagctgcagtcaccatctgcagtgattttggagccccccaaaataaagtctgtcactgtttccccatctatttgccatgaagtgatgggaccagatgccatgatcttagttttctgaatgttgagttttaagccaactttttcactctcttctttcactttcatcaagaggctctgaagtatattgttcttcaaatacaagtctttaaaaagaggaaggacatctacctatgacctacaaattccaatcctttatccaagagaaatgaaatatttgtttacaaacagacttcaaacaaaaatattcatggtagttttcttcatagtagacccaaactggaaacagcccaggtgcccatcaacaggaacaggataaacaatctatggtacattcaatatttgtacagttgaatatattatgccagaataaaaaacaacgtggatagatgtaaaaacatcatgttgagggcaagaaatcagagacaaaggagcacatacatatgattcaactaatataagattctagaacaggcaaaataaacatgtgatgaagcaattgtggctgcagttgcagtagagaaaggaaagggcaccgtcacagaaatgaaaacatgctcactgtgaacgaggaaaaattacgtcatttaacactactgaattactaaattaaattttaagtgcgtacatttaattcaccttaactaattcctgaaagcataatgtaaagtccaaacttaagcttccaaaataagccaataatttcaattgtggtaaagaataaattttattaaggtctcattttgtcaaaatttgtctcatttcttccacaaacatttctttctaattagtaagaaaatcagaatgtcttgtcccaagtggttatttttaagattggtttcatacactatgaagtggaacttaatataaaaggctcattattatcaacaataattcaataagagtgtacagtgatttccaaaatggaggtgattataacccaggaagtatgactgatgatccattagggtataaaaaatattaggagttccatttatatttaatcttttcttaatacacacatgtattttaagtacaatatcatgtaatacaatatatgtatatccttaacatacaaaatgacactggcctcttcattatggccacctgtcagaaagtcacacatcacatatgttaagtaatctaagtatt

SEQ ID NO: 63279 - DNA, 816 bp, Bovine  19866880733185
  misc_feature (1)..(1): n is a, c, g, or t
nccaggggggaagtccctcagtataattcttattggtgtcttttggacacagtctatccccatcttatgaaaagctctcctcttttagaatcgtctcatctgtctacccttacattttagatttcaagcacagcacccgtttttcacagccctgacacccctctacagagcatgatttccatgagaccatcatagagtgactgatactctttcagtgacaagaaaaggtttgcctttaaaagaagaggaaaagtcagaagtcatcaaaacaatgtaatatcctgtgtgaaatgtttgaggtttgagtcccttgatcatgtgccctgagacaagtaagttggcggtggtggccgcggatgacgagtcgagtcactcaagtgtgtcttcggttcccctcacacttgggcttctcagggaggaggggctggagccgtggcccaccgtcagcaccatgatcctcaggctgctcctggctctcaacttcttcccctcaattcaagtagcaggtaaacagttttgatttctttcttcctccagcgttttcttttgaggctttcggttcattttatttcatttatttttcaggaaaaaatgttttaaaatcatgcactctctatttggtatatttcaaaaggtgcaatacttttcttcatttatcagtaaatggttcattttaaatttcgaagaactcaggacatttgggcatttgaagtgtagtttttgctatgaaatggcaacctgttattgaagaaactcattgattctcagactagagccagcaaaatacttaaataagcattcttggaagaaatcaga

SEQ ID NO: 63280 - DNA, 831 bp, Bovine  19866880740036
  misc_feature (1)..(1): n is a, c, g, or t
ntatggaatccattaactcctcatttctgcttgttcttagcaaatttttgtctggtgacaacacatgaacttagggggtgtttttgttttgcttcacaccacgggactctgacttgctttagttttgaggaaaattggggaaaaaaagcaagctgtggttggggtgaaatagctaattgcaagtaaaactgggtgggatgtttggtttgtgagaaagcaggacactcttcagatttcagggggattccagagttgccagtgttctgggaagaatattccttcaatttcctgatgaaattgaataagaaatctggattctcttgctctctccaaccacacctcatggtataatgctggttgaatggattgcttgcccttactttctaaatttttgttttctaaatataggagaaaacagcaatgtgcctttgcaagacagctacatatctccagcttaaaaggcgttacataattatatcacaccagtatttagaactaaagttactggtgtatgactggaaaaaaaaaaaaagaccgaagattggaaaatgttaaagaaggaagacaggctgagaactttatttagaagataattatcttttattttttctgtttaaagtaattaataaactaaacataacaataagccctttcacccacagtcagcatcaggggacttcaaacattgcctttgaagtgggcccccagttgggaagaccccactgttcaggctactttatagtggtaatatactgcctggaaaaaacagatgccaagaaaatgcacagatgaatctcggagcatctaaaacctaaaacttcagggggccaa

SEQ ID NO: 63281 - DNA, 1359 bp, Bovine  19866880762833
  misc_feature (1)..(1): n is a, c, g, or t
ngttacctatattaacttttgagtaaccttaacaccccatttctcacccatttttcacttagagaaagttaataaacctagaatttttattttgctcagcagtcaccatgtattaaaaaattgaggctaaagagaggaagcaacttatgaaacaagctgttgttgtttattcgctaaagtcatgtctgattctttttcaaccgtgtggactgtagcctgcctatgggatttcccaggcaagaatagtggagtggattgacatttctttctccaggggatcttcccaacccagggatcaaacctgcatctcctgtgttggtaagtgtattctttaccacggagccacctgagaagcccatgaagcaagccagtgacaaatagaacttaggatggagtccaaactatccgtgctttcttctccccttctgtctctcctcccatccccatctctctctccctctttatctttcttaagtctttatactccttttttaaacaaatgattttctgcccctccagaaaacaagattttggtgaagcagtcgcccatgcttgtggtaaacgacaatgaggtcaacctcagctgcaagtacacgtacaacctcttctcaaaggagttccgggcatccctttataagggagcagatagcgctgtggaggtctgtgctgtgaatggaaaccactcccatccacttcagtcaacaaataaggaattcaactgcaccgtgaaagtaggcaatgaaacggtgactttctacctccaggatctgtatgtcaaccaaacagatatttatttctgcaaacttgaggttctttatcctcctccttacatagacaatgagaagagtaatgggaccattatccatgtgaaaggtaatgtaccacttggccaatgtctgctctcaagtaacggttttcaactacagtcttgaaaactaggtcatgatcagtggtgggggttggctaactcccaaagaggaaaaccagagaggaggtctacacatgttaagctagtgatattttgcgtattttgtttcctctcacattctgccctgggaagaaggaaggaaatgtactcaaatgccattcccatatcatttaatgtactctattctatttttcagagaaacatctttgtccatctccccggtctcctgagtcttctaagccattttgggccttggtggtggtaaacggagtcctagttttctatagcttgctagtaacagtggctctttctaactgctgggtaagagaagcaacattgctttcatgtaacttttctattgcataagcaattggacatattcaagaattttgcctatgtggcttattttccatttaacatgtgattatttt

SEQ ID NO: 63282 - DNA, 1298 bp, Bovine  19866880795306
  misc_feature (1)..(1): n is a, c, g, or t
ngactgaggttaagatatctttccactagcctagcggaatgaagcttgcagtcagaaatcaaaatctgaaactgagttactaaaatgaagacaatgaactgaaaatatcattatccctttcctaaaattcataactgctctccatccataggatgctgtattgcattgccttgtgtgatcaactctggtaggaatcaacacttcagaatactagggaatccaagatactattcattaagtatttcttgctagctaagcatccttgaagtacctggatcagatcagatcagtcgctcagtcgtgtccgactctttgcgaccccatgaatcgcagcatgccaggcctccctatccatcaccaactcccggagttcactcagactcacgtccatcgagtcagtgatcccacaacacatatatagcagtctccgtgaatactgtttgctggctgactggttgtctgagcaacccacatatttaatgaaacactgaaatgactcccttcctttatcttagcatgccagtttgatacagacagaaagctatttgaattggtaaaatgtcagcagagactgggcccttaataatagcttttaccagattcatttcctcagattattccaaagctttagcctgcaagaattccatccttttcaccagggagctgaccttggaaggcagacagctgctgtaagtgtttttacaagaactgtaaaggcgttaacagtattgaagctccgggagcattgtgaaatttgggatgctatgttctgaagtgtgacattcacctttggcagctgtgctgtaaccagacatagccaggtgttaactgaaattgaaaatagccttttcaacagtcctaggtcctcattatttttaacatcatagttcatgttgctaaaaatattcctaaatctctccctatggataatttggaaggggaggtattatattaagaaatagatggataataacccctccctactggaagttcagaataaacgccagtgaaggcatcaagatccctctgaggggtggccatgttggattctgtccgttgctgcagaggctaagacacacttcaaacaacagtttctgcatctcttctcatctgagagtgacaggatttcacatttcactttaacagtcactgttcaaaagtactaacttaccacccacgaatcctgttttgttgctttcttttccttaaaaagattttttttttttttaagtggggcttagtatttaagtatttaagcaaggaaacagggaagaggtatgatttttaaaaccccatcg

SEQ ID NO: 63283 - DNA, 1022 bp, Bovine  19866880797106
  misc_feature (1)..(1): n is a, c, g, or t
naaacaaagcatttgcttggggaaaaaaaaaatcacacgcacacattaatttgtaacacgaaattctacttcatggcatttatgaaggcaaatcatgccttcaagtaagcaggcttacctgcctcgctggcggaggggctcatgctgctatgctctttccctcccactgcactcgccaggcacacattgattcattttaaagatgaaatttttggtgcaacggaaaaaaaaaaaaaagatgggaaggattcggtttcagcaggaaggtacaaaggtcatcgagagggtgcagagccccatagagcagttgttcctgtctgagtgatgactctactaccaaggggatttattaaaatggagcctattgctgttacaccgaataaggctctccataaattctgcgtgagcctgtcagtggctaagcccatatgtaacgcgtcaatacagcgcctgcgtctgcctgctggtgtctccaacaacccagcctgtggccgcctctccaagccccgaagcatgtgtatacacgccccaacccaatcaaaaacccagggcctgagatgctgtgcgtgctcagaaacggacacctcccattctcacggaggatgtgcgtgtgtatgtgtgtttccagcaagacattgtgttttttagactgtgacggaatcaaacatgacgcaaccacacgttctgggtcttgacgacctgatggggggatgggaaggggatgaaaagagtatggccacagcaatttcaggccatgcagcactgtgacctcctcactctgtccgcttacaaaacagaagaggggagatacgtgccaggcagtgttcaaggtacagagaactgtcagtgtcattagttataatcaaagggcaggggccagagggtgaatgccttctggtctgcctccttaagtcacctgaggagagaacacaaacctggggagagactctgcttccctgagacctttttttagttgttgtttaaacccagtcagttggaagcctctttatgagttctctcgt

SEQ ID NO: 63284 - DNA, 1486 bp, Bovine  19866880858609
  misc_feature (1)..(1): n is a, c, g, or t
ncacacagagtcggacatgactgaatcgacttagcagcagcagactccttatcaacctgcttaggaaatgactctctcactatgaccaacctagatagcatattaaaaagcagagacattactttgccaacaaaggtccatataatcaaagctatggttttcctagtagtcatgtatggatatgagagttgaaccgtaaagaaaactgagcactgaagaattgatgcttttgaactgtggtattggagaagactcttgagagtcctttgaatttcaaggggatcaaaccagtcaatcctaaagcaaatcagtcctgaatattcattggaaggactgatgctgaagctgaagctccaatacttgggccatctgatgagaactgactcattggaagactctgatgctgggcaagattgaaggcaggaggagaagaggatgacagaggatgagatggctggatggcatcacgaactcaatagacatgagtttgagcaagctctcggagttggttcatggacggggacgccctggcatgctgcagtccatggggtcacaaagaactggacacaactgaacaactgaactgaagtgatagagtggggtgattcagttgagtcattcattggagtttgagtcgttgagtatgtgctgggtgctgtgtgctgagctcagactacatgggattacaaagctgaataagacatagcttggctccaagaaacttagaccatcatgagtacatccatgtttatctaatgcagaaatggaaataatatggcagactttaaaattaaagccaatattttcttttggagtataattgttttaaaatgttgtgttagtctctggtatacaataaattgaatcagctatatggatacatgtatctcctcactcttggacctccctcctacccctgtatcccaaacatctaggtcaatcatgattcaaaaggacacacatatcccaatgttcattgcagcacaattaacagtagttaatggaagcaacctaaatgtccaatggtagatgaatggataaagaagatgtggtacatatgtacaattactcaaccataaacaggaatgaaattgggtcattggtagagatgtggatagacctagagtctgtcatacagcatgtcataagtcagaaagagaaaagccagcgtttttgttgttgtaaaatggttttatgtttagaatcaattttactattaggtatattttaaaatcaagtcccttgaaacatctccctgttgtgaaagttggtttggtctgggctgctggagaaaagggctctgcagattcagggtgcagaaactgttggcataccacctgactctgactcacctccaattaggcaattagtcccacattatttgagtacccaatttacttttacattttaaagttgtaaaatgcataatgatttttttcacttcctaattatgagtaataaaaatttaagggaatataaagtttaa

SEQ ID NO: 63285 - DNA, 2738 bp, Bovine  19866880882474
  misc_feature (1)..(1): n is a, c, g, or t
naagagaataatgccggaatggtttccttctttgatattactattactatttgtgttgtgttgtgtgcacaggaatgccatttagtgaattaattcagccattctgtcaatgctgtcatgacaaagagcaattgctagcattcaactttgtcctacaaacacgtccctcacccagcagaatgtgttccacccaataattgtgttgtaactataaaaggtgatgttgagctacagtgtctagaatattctgttagacgtccatatctacctgaatgtctcacagtcacatcaaatgctgcatatcttgtcatttttctatttctgttgcagtgagctgtggctcattcatcccagtacctcttgtgcccagcacattgctccatgcatgtttatggagtgaatgaatacctatttggataatataaaaaactctttgatatgtataagtatttaccttggtaatattaacagtattattgtcatgtgcagactggtagatcaagatggtcaaaagttactttcctggactgtttctcccaactcttgaatatatttctatgtgcaattgtttgagtgtattctgtcaatgcatagtaaacatgtattcctgtatttctcttacagcttcctaccctatgagaagaaatgtattttcttgatagaacagataaaattctcctactggtgttgtgttgtgttgtgtaaacacaataagcatcagtgcctgatacatgtttttctgctgaatggtatattttgaaatgtatttttaaaaatacatgtataaatatttataaatatatactttctgaagcctagtttttaggtatatatttatacatttattaatataacttaccttattttagaaagtgtataaggtcattggacaagatacatgtgtatattataatgttcaattcaattaagaataaatacttgagaaaatcagggtaatagaaaaataagggcagtcataaaaaaggatatccttcaaagaatttaggatacaaaaatatatcatgagttcctaacttacatgctctaagctctttaaatcagaaagataaatctaggtctcagctatggctcaggtattcttggtactatagcctgaaaaaaaaaattgtcacataggtccttattgagaggacactgggtaatgcagttgataaccttaaacaatgatctcataggaaatacagtgagttccacagtatttctggtaatgtccctcagtgtaggctgctgatattgaagtcaacgtacaagcaattttatagagaaacagtgtgatgaggtcctggaatacagctctctgccatctaactgagtttcaagatatattttcagagggtcagggtcatgggtggacatccataaattgtttctttcaattaagccctgggtaactattggaactatatatgtgagttcatgatgatacagttattgataggggaatgccccaggagccatggatttctgaggtctcaggaaatgtcatagagactaatgacagaggttctaggaaacccactggctcttggagatcctccagcattgagtaaaagccaagactcaaatatagctctaacttgtttatgtaaaaaaaaaaaatcactatagtttccacttaaaaacttttaaactttttaaaaaattgtttagggacatgcatatgtcctaagaatatgtcctgaaaatgaaagggtagtaataaaaaaaaatctaaaaatggaaaacctgctttttaataaatgataacttcttctcattaattccaagatcaaagtttcttacctgaaaggtgacttcagcatctgtagattcagaatagaaccccaaagagtcataaacagttaatctcatctctgaagcaatgtcccagaagaaaatgtgttctatcttcagtaaaaatatagatttagaatatacttacagggcaggttacatgcataagtaagagagaaaagaattctggaacaggtactagtggtgtttggatggctacaaaaagcattcagccaccatgacctgtccattgtgtaagtggttggctggggaagcagagagagcggatggacagggttcatgtcatttgtattggccttgctgagtagacacaaagctcttccttagtacttggggttttaaaaaccatcagatggcaccacagcaggctaatgtggtggcatgttctggagacattcatttgtccccccaccttttaaatagtgggaaaaagtgaattttagtaattaataggcacttacccttctttcgtcatactgtcagcttcggttggtttctgtcttgccattaacatgtctaatgcatatgtcaagtggaaggctgacatgctagtggcaaacagaatattatgtgaaggcggcaatgtgttaaaacaattgagcgaacaagcactaaagtttgctgctcaggccatatgttgcagtgtttaatttcccgtagtggagaaacatggttgtcagagaaaaagatgatgaatacatttactttgggcaacttattacaatgaagaatgactttccagaggaagagaacagaagaattaggcttgcatggagagcatatgggaggcattcagacgtaggcaagggtaacaggactgcgtgctttcaaatgaaagacatttaatcaatgcctgtggctggtgttgacatatggaagtgagaaatgggttttgattggaagacaggaagaaggttaacggt

SEQ ID NO: 63286 - DNA, 2110 bp, Bovine  19866880959635
  misc_feature (1)..(1): n is a, c, g, or t
nacatgtcatgttagtaaaggaattgtgtcagttaaggttttcttatgcttcctgagtcactcttttttaattttactctaaagatcttttataatgtcattaaaatcatgaagaatcaggttcagctttgaccttcataggataaatatttaaagctatgctttgggacgaagagttagaactgttaaattggtcaaaaaaactgtccttcacacatagacgcaggcacacatctcaacacagagatagcattagtctttcacagtcctcaagaggatggctccactttgaccagagaatttccttaactgtaactttttcatggagggtaaagaggagagaaacaaaaagcacacggaagattttgcaccactgattagaagggaccagacattttcatatcctgtaattattttttctcataagttttcttactgaaagaggcattttgaaagtgccttctcaaaaaaaaaaaaaaaaaagagagagagaaagaaagaaattgccttctctacccctttcctacttcattagatggccactcagcaccaaatcttaaaagtgattatgggggatgaactggcatttgaaacatagatgtacctcaagtcaaagacagtttccatgtgtgtgatcttttcattgcttctctcgctatcccccttttagtaaatgtgctaaaggaaacatataaagccttgagtcttacaaaacttgtctccaaaagggagtgaatgaattgatgatggtggctgtgcacagttcccggttttaaatagttttctgttggagtgaggcttctctctcctttctgcccattctttccggcctaataaattatgagattttaaatagtctttaaaaataaattttagagatcccttaaaaaacagacattgaagattcttttaagtatgtttgttagctcatagtgctgggtattaacctatctcatcactagctcatgtcttttattatatcaacaccttttataagtacacagaatttttaaggtgctcactggcacctcaacaatgcaatggatgggtgtattgcacaggttgggtaattacactctttggaacgtggtatttaaaggacagcaagaaatcatgcaatccccatactaccaacataagtgagaaagacaatggaagatgatggcctttcattgtatcttatatggaaaaataactacccttacttcaatatgccgcttaacccctatctgtccaattttcgagccaagtaggaccattttctaactctgagaacaagttgaatgaacacctgactccagcccacccaagtaagcaacaaactctttctgttgggaactgtgatttaccaaagatgatctaaccctggacatatctggagctaatacattataaagcacatcctattagatggagtagcataagagcacaggccctagagtcagacaaagggtggttcagaccctggttccaacaactccctacatatagatctttagccaaattaacattccttcccccaaatctttatctgaaatggggttaactgtgatcacatcaagcttttcatcttcatccccatcatcactgaaaacttaaagaatttcaaccacttgaaatagatatcaaccagttgtttaaagaaactaatttattagcatctgtatggcaccagcttgtgtgacagctccagaattcattctggcaccctttcagttcaggtagacatggcaaaacagtcggacaggacttagtgactaaacaacaagacatggtaattatagccaacatttatcttgccggccaagcattgactgtgctaaacatttcacatggttgtttcattttatcctcacaatgaccttgagatgaagttattatcattccctttttacagataaggaaactgaggcttagagagtttaaatactagtctaagctcagttatcaagaaatagatctgtgatatgaacccaggtagtctaaatccagggctttcagaaccaacctgcatatacagcaattttcttacatttaaaaatatatatgtatatacaaatgctaaaaattcttgggacattaccaactaatagttaaataaatctgattt

SEQ ID NO: 63287 - DNA, 720 bp, Bovine  19866880959997
  misc_feature (1)..(1): n is a, c, g, or t
naatagtttcatattttactgtagaagaaattatttctagcattagaaataatataacattacttcagatctcctaacacagtgatactttaaagtgaaagctctggaaatgaacaaaccctaacccccttatttatttattttttaaaatcctcaaagtattggcttgtctcattttcttagtcaaagcttgcttctcagttttgccctgctaatgacctcagctctctcttgatgctttaggaccaagggctctttgattaatcattctctgtgttaatatcaaacagcccttgcattcttcaaacagatcactgcttctgttaaataatgccctaaatatacaaagcagataaatgatgaccattgagccaatgggaacagaactgggctctaagactgtgttgcaattataatgaaaagacacataactgatgagttccatatccgaacttaaaatgatttgtgaagcataagatcaagagaaatacagactgaggtctcaagttggactttctacgatgaagtatagaccgggggtagaaagcattttaaaattgcttggtgtgcttgtgtctctgtgtatttttttttttttcctttgaaatggttaaatgcttcaaggagtagaacctctttggggggaaaaggcccagcatgatatgtatcagggttttatttcattccagtctcttgcttattttaatttatgaggtgtgg

SEQ ID NO: 63288 - DNA, 3380 bp, Bovine  19866880974823
  misc_feature (1)..(1): n is a, c, g, or t
ngaaatcttggtttttggccccctcaccaaaagcaaacaagtaaaaccgaccaaaaaacccagcaacctaatcagtcaaagaaagataatggaggaggaattaaagttagggcagtggaaaacaaaagaataaaatcagatttccagccagaaatagggtggttttatttggggaggacaaaaaaaattctgcttaggttagaaaggaaaagctctactagcttaaataagatttaagcttcagagtaggatgtagatgtcaggtatgtcataattgtacagggtaagagtagagatcaggtcaagagggagtattttattttcctgtgaaatgtctatatttctgtcatgtgtagtttctaatggattttattaggttttgaatccagattgttagcaagataatcctagttaagtaaaaatttccattgctcccaaattttaaagatgtacttgtacactaatatttgtcttccttgtatattagcaagggctctgcaggattcctgcaggccagagtggccgagcatcactagccacttgatggtcaaagcctgacttcttcacagtcttggttcaggcaccatattttgtcctctctccctagttttttaccttttttttttttttatcattgtcttcactgtataggcttccctggtggctcagctggtaaagaatccgcctgcaatgagggagacctgggttcattccctgggttgggaatatcccctggagaagggaaaggctacccactcccaagtattctggcctggagaattccatggtctatatatatcgtccatggggtcgcaaagagtcggacacaactgagcaactttcacttcactgtgtagttcttagtcggcaaaggtttttgttctgttttcttgggtgacacagagcatttttattgtctggggaaaattgtttggaaatccatcagtttcctattttatggtgttttatatgtacataatttcagagatgcctaaacttctttatagtgttttaaattcaaggccctgacattcctttctttttttgacccaatatcttatctagtgccccttatttacttttttaataacgtgtatatttgtttatgcaagaggattttgagagtagtagagtagacagagtctttgcagagtaatctcatccagaatcaatgagccgaaacttgagtggatgagagagaataatatttaaaggaaccttgggagcttttgaggacgtgaattattgagaaatatagaagtcaggtcagcatcatcattttaggggaaaaaagctctttaattttcatatcttgagatccaattaaagatcagaatcttatctacataatatcaatttcacatcagctgagtattaatcattgccatcatgatggaaacttagagatgagaattaatgattcctggtgtaccagtgtgcatcctgcttcctgtattccctttcctgatcttgtcattcttttaagaagaaagtttgagaaaaagagaagtatgctaatgaaatgcagactgttctgtacttcaaagtaaataagatagacttaggtgatctgttttttttcttctctcccttttaaatgttgaactctgagcagggtaagaggtaagagtggtcatggtgaaaggttaaggaggatgtgaagtgagaatggaaggagaggagattaaattatgtatttctgtgtgtggatgtagttttacttctatgtacttattgcatagaaagagaaatgaattgttaatggttgctgttgatcatcaatgtgggggttgtagagccagactctgtagatttatttaccctatctttgattatttttggttagggagagaggggtgaggaagataattagtgcatttatgaagtgcagttgggagaatttaatgtgacactaaactaatttgaactcatctaagaagagagtctgggaaacactggcttacctgggggagaaacttcatgctctcagaatgaatgaacaaaattagtgtagggaaatgaggtcaaagactaaaaaaaaaaaccagtatgcatcaaagccctgatggtggagaagtgatacttaagggaagatggaaattggtagctgggttttattaaaacacattttactacctctgagtacagattgtatttcactactggcaactctgaatttattgtgccgagacttgctaatcacacgatacatacgctcttctttttgtaggcggcactccccctatcgcacactggagccagtgcgtcctccagtggtaccaaatgattacgtacctagcccaacccgtaatatggctccctcgcagcagagccctgtgaggacagcttctgtgaatcaaagaaatcgaacttacaggtattttctctacctcagtgcaaaatgggatggtcatagcaccattatttgttcagataacttcagctaaatctctctcattttccaagcactaagttcttttcctcacactactcccccaaacctcatctgattccacctctctctcctcatgttctgatgcaactttgagcagccaggaagttgaaaaaggacagacatctcaaagtgcaaactcttctgcaagactgatagttatagttgacctgaaaaagaaaatcactgaccagatacggggaatttcacgttgttttttggtggtactttacagatgaaaaaccatatgcaataaaacattaatatggcataatatgtcatgatatcattacaagtaaaattggacaaataatttgtttaggaaaattgttataaaagctatttcttcagacagccattaaactggaataaaagaaagtaatattattttcatgtgttgagccccatcatttgtcccttatatttatggagaagttttgtttttctcaatttctttaatatacgtttattaaaaggtggccaaaacaagtttcttgaactcaagttttttcccttgctttataaagaaattcatctctgaaatggagggcttttgatttaccatctagtagctatattcatttcagaacattctggaaaatgctggtgatgtcttcctgtgcatagatgctcatgttttggtggctcttatttctgtagcagcagcgggagtagtggaggaagccacccaagtagtcggagcagcagtcgggagaacagtggaagtgggagtgtgggggttcccatcgctgttcctactccctctcctcccagtgtttttccaggtaaaacatgaattgtgcttcatcttcatctgtcctttctgagtttgtcctttcagtttctaatttaattacactgagctttcttcataatcaggattttttttctcttgaagactctgtaaatgttgagaaatctttctgca

SEQ ID NO: 63289 - DNA, 1703 bp, Bovine  19866880990563
  misc_feature (1)..(1): n is a, c, g, or t
ngtattgtataataaagcagatcttttcaaagaattctaatcatctgaatctaaaacaacattttatttatttcatgtggtcagtggtgtcccgaatgcccctgcaaattagattaaaaattatccagttgatgtgtaaacatcccccttaatttacctagtgtctgggtcttttatttgatgttcaggaatttaaataatttaaggttgtttagctctcagttcaacttttgctttctggatatttacttggaacttcacagtatttatttaaggctattagaaatgctgggggaggacgtttttttttttactgcccgggaggctggtatagccctggttcagcatttgtaaagataatgtggctgtgggcttacagcagtcttgtctgctcagtgtttctcggaatttctcctgtcatgaacccacctgaactgctcagctttgttgagattcccacctgtgcaatggaactggcagctctgaacaaaactaagaagacagccaaatctttacagcattccctgtctgtcatttttaaatttaattttttcttccactgctagaagctatggagtcaaatacaggtatattcttccactttctcactgttaggtcttcaggaaattgttcaatttgagtctcagtttcctatctgccaaatggaaataagaaatgtctttctggaaagatgattgtggggatcaaatgatatgacttgggagagcatctggcaagattttgggttaatttactgtcaaaacaatcccatcttcttgtatatttaccaagaccctcttcttaattcaagatatgatggacgctttgtatacccccaaacattctccctttctctgcttttagttaagttagttaagtcgctcagtggtgtttgactctttgcgaccccatggactgtagcccaccaggctcctctgtccatgggattctccaggcaagaatactggagtgggttgctatgccctcccccaggggatcttcccaacccagggatagaacccaggtctcctgcattgcaggtggtttctttaccatctgagccaccagggaagtcaatattcctattgagtattgtttaatcatattggtattacttactgcatcagtgaaagaaacaggaactagtaaatgtaaacacatcaggtgcaatggtccccagtcttttggacaccaggaactggtctctggaaagacaattttttcatggagcagggtggtggggatgttttcaggataattcaagcacattacatttattattattacatcagctccacctcagatcaccaggcactggatcccagaggttggggacccctgagttagaggatgtttctgactcaagggaattattagtagaatgaccttataagttgtaattttaaagtcagacaaagccatacaaagaatctgttcagtctaatgttatatggtcctaaaacataaaagactgaaagacttcatcaatttccaagatctttaaaatgacatttcttgtgatcgcattaaatttaaggtgtagagttagaaggagaatgacccttatttgtcttaaggacttaccaacttgagtgggagctgcaggctctaagggttgacagaagaacaggtcatgtgcttaactgaaatccagggggagggggcaggtgatcaccccccccctcttaaatttaaggtactat

SEQ ID NO: 63290 - DNA, 711 bp, Bovine  19866880993170
  misc_feature (1)..(1): n is a, c, g, or t
ntttcttttaggattcgtgtctgcagcagactgtgcaattgccctgtgttcctcatcatctaacacaactttctgcaccatcacagctgctatcacttaaactacaaaggagtaaagatgctccttttctatgtgcaaggtgtgaacataagagtttcctttaaactggaggtgtggaggagatcatggcctgaaatcattcaaatgttgcaatagcagcagggcttgaaataacgtagctcaaaatatggaaacagtgattgtctctgccaccaagaatctgaaataaatgcttcagactgagattacctagccacaaataacatgggagaaatgggttccattaaatctttgacatttccaatgcccactatttatagctagctagcaactttttagaggtggagtggattattcagtatcaaagacaattttgacttgtgctccaaggttttcttactcctttcactaaggtaggtaaacagtgtctggtcctgtttcgtctttagtaaaatgaaaatgatactaggccaatctcaacttgtcctaaatgacaatcaggcaggctgtgagtacctttcaggtggagagagctggggtgcatgatagattaaatatcgactatttactcttctctttctatttctgctcgatgattaaggaataagatctagatgtgtgatcctgggcaagccaattttcttctcagca

SEQ ID NO: 63291 - DNA, 1424 bp, Bovine  19866881039416
  misc_feature (1)..(1): n is a, c, g, or t
ntttattttgattttccttggttgtggtattttcttttatttttgttgaaatgaggaagtttcttttacagactacagaggaagtcttccctctgtaatttgaaaggtctgctacacttcttggttgactaagtcactgtcatattcaaagcatcttaattgaatatctatttattattgtaaataataaatcataatttaataatgaaatgataaaatcataataaaatcaataatgacaataggcttgcttgacgtgtttatcccccaccccctgcagtgacatgggaacttcacgatgttctcttttcactcttatattttctgtttagtgcacccttgacccttacatggggcttcccaggtggcattagtggtaaagaatccgcctgaaagtgcaggagacacaggagacttgagttcgatccctggaccagtaaggttcccctggaggaggacatggcaacccactccaatattcttgcctggagaaccccatggacagagaagcctggcaggctacagtccataggctcacaaagagtcagacatgactgaagtgatttagcatgcacaccccatatgtgggttttgttgaaataaatgaaaacttgtagttgcagatcattgctaagttttctctaacagaaattctcctctgattgaaggattctctccttatactcacatcacctcttttcaatggcagcatcagtcttgccatctgctcctgccttatcatccctgttcttatccaatgttcagaagacttctattattttcttcagataccttgaagtctctgaattccagcatgggtaaagatgttttccttttactctgatgaataactaatatctttcctgggaataagattcctgatctgtcctcttttctcttaattgtctgtggatattcattcactgtctgctggcttctagggttgtgggtaaatagttccatgctagtctgactctcattactttgcaagtagcttaaaaaaatttctctggagtctcgttgcttccccgatggctcagacagtaaagtgtctgcctgcaatgcgggagacccgggttcgattcctgggttgggaaggtcccctggagaaggaaatggcaatccactccagcactcttgcctggaaaatcccatggacggaggagcctgataggcctacagtccatggggtcacaaagagttgaacacgactgagcgacttattggaatctggaattccactaggatatgcctaattctgtgagtgttttcattaacattgtttgagactgagtgagtcttttcaaactgaagatttcagttctttattttaaacttttgggatatttttctcttcccgtggttgtttagtcatatctttgtctttttttccttctttctagaaatgcttattattttcatga

SEQ ID NO: 63292 - DNA, 2624 bp, Bovine  19866881045147
  misc_feature (1)..(1): n is a, c, g, or t
ngtgtgggggggaagcaaaacatttgaacaggtattttgccaaaaaagataaacagatggcaaatgggcacatgaaaagatgttctacatcatcattcactggggaaatgtccatcaaaaccacacgacaaactattaaacacctatcagcatggctgaatttaaaaaaagaaaaaaaaaaaaatatatatatatatacgtaaagacaattacacagccagccaggctcttctgtccatggagttctccaggcaagaatactggagtaagtagccattcccttctcaggggatcttcctgacccagggactgaactcagggctcctgcactacaggcagattctttactgtctgagccaccagggaggcccttacggcagtaccctgtactaacacgtatgcagagtgactggaagtcttacgcactgctggtggacgtgcaaaactatacagtcactttggaaaacagctatccagtttttatcaagttaagcattcatttaccatacaacccagtaatcctactccctaagttatttacccaaatgaaatgaaagcctgtgctcacacaaaagtctgtgtgcgaatatatttggcagttttattcataatcacccaaaactgtaaataacccaaatgtccctcaatttggattgaggaaaagggtaaacaaactggtaaatccattcaacagaacactactaagtaataaaaaaaggaatgaaataacaaaacatgtaataatggataaatctcaaatgcactgtgccaaaaagccagattcaaaagagtacattatgtatgcttccatttgtgatattactacaaaggcaaaactttagagggggaaaaaaaaaaacagatacagagcttgccaggggcaaagagtgaaatgagtaaaatggaaggaccgagtacaaagggggcgtggaggaatctggggacgtcagggctggtgtgcaccttcactgcagctgtgcttgtatcactgcatgcatctgtcaaaactctaacaagtcactagaaagggtgaatttcactgtatataaatcagatcttaataaagagaaaaaagtatctggagattcaaaaacagtacattacagagactatataaattgttattaaggcattaattatgctttttgttttaaaaaaaacacttactgttcactcatacaacagatattgactcagtgctgactaggaaccagcacctgttattaaattataatgctgactctaggtggagatgaatctgtactttgtaggcctacagcggatttcaagatgtattccttactccactgatgtatgagcgtaacaggacttttacatttaactagctgtagtggcctaacagagctgtatgtagagcaaaaggacaggtcaggtttaaatacccccagtacagaatgcttttcttaaaaagtgttggtacagaaactaagccataatacaccatccaaaatgcgtgaattaaaatgaattttttaaaatgtcttctaaaacattaaacacctagatacagtagcagcacacacatacattctatgaagtactttactaactgggcttcccaagtgcttcagtggtaaagaatccacctgccaatgcaggaggatgtgggttcaatccctgcttcaggaagacccccttggagaaggaaatggcagcccactccagtattcttgaatgggaaaccccatggacagaggagcctggcaggctacagtccacgcaagagagtcagacacaatccacacaagaaagtcagacacaactgaactactaatcacaagcacatcagaaaaatgagaaactttactctgatttcctcaggaaattctactcttcggtcacgggccattttctagttagtacattattctgcagattttttttttatacaaaacacagacaaaaaacatgaagccagagttccaagacgagccagagccagacgactgaatcggcctgcgaggaataagccaatactcacctgtagggggagtggaagaaacaacagggggagttggagaagtgaagccatcagcaagggtctgggcacccccagcggcagcatctggggcagtggaagaagggacagttgcaggaacaagaggggtgggggcagatgcagaagtagcaggaaggggtggagtaccagcagagccagcgggggctgaggggagagaggagtgagaggcagcattagtgaggcagttccatcaggcaggactagaacaggcaccggagaactcagtgttagatactcagtgctgatcaacgccaaagaatagaagagagtgttaaaaaaaaaaaagaatgaagcttatgttaaaggattatgaggtttacagcaagtaattcaagatgctaaggataacgtccagacttttaaaagcattcctttttacctgatagccaacacactggaagaaaagccccctttatgttgttgcttttaacgtaacattctgtaaatagtatacaaagctaaacataacacagtagaaaacaatagtattcccttctgaatcatacaaaccagaaaataaagatttcagacataaatatcttaccaggtaaaaagaatgagagaaatacaaacctctttttca

SEQ ID NO: 63293 - DNA, 789 bp, Bovine  19866881060062
  misc_feature (1)..(1): n is a, c, g, or t
ntaagtgaaagatttttttcctaaatattttttaccatctttcctatttatattttatgcttttatttctgtaacagaaactttctttcctttaagtattgtccaaacggacctttaattaaatatcagtatttgtttagaatgttccttagctagatcatatttccttaaatttattctagaggaagacatatgtacagctgccattgattatccttgtctatatatcatggttcatagaatcagggacattaaaactgtatgtacagaaggccaacaaaaaagtttttaggtctcagtgtaatgtgaggacgtgtgtctgtctctttgtttaaggctctaggaagtagggagaaaaatctttttcctctagcattctctaagcaggagagcaactgaagaatatgtcaccttcatgcagattttatcacataaaaatgtgtactcctagagtgttgtatagaacaaagaattatcatggatgattccatctgaatttctggcattgcctaatcttctctgggggcttctctgatggctcagcggtaaaaaatccacctacaatcaggagacacaggagatgcagtttcagtccctgggttgggaagatcccctggaggaggagatggcaatccactccagtattcttgcctggaaaatcccatggacagaggagcctggcggacaatagtccatggggttgcaaagagtcggacacaactgtgtgcctaagcacgtaaccttctctcgctctatccacgtctaccctagaccgagcattcattcagg

SEQ ID NO: 63294 - DNA, 813 bp, Bovine  19866881099193
  misc_feature (1)..(1): n is a, c, g, or t
ncaaagagcctgtgagccacagtgagaactcagtgaagccactaaagaaagaaaaaggaaagaaaagtttaagccactgatctaaattaacaatgtgattttttattttatattttcatacatgtttaacgtaaaaatctaatatattttttaaaatacttattattttatactttctaaggcctgtctttcctatttatttaataaattattaaatttaaaagttataggaaattttagctttattccaataaacctgattgacaaatatcaaacataaaatatttatatctgtaaaacttgggaatgtgatgatgggagaaaagccaaaacaatggcatttattttggggaaattatcctggaagagttataataaaaaatttgaaaactcataggaattaaacttgaggttatttggtctagcccctttacctactgataaccatgaaataagagaagaccctgccattaagtgaaaaatttcagggacatcctaagagtaaaccccaatcctgatactctccaggtcacaaaaatatgttttcctctggaatctgaaccaggaagtttcttctcacattactcctaaaagacaaccccaccagatgaatgtcaagaaaaaccaaccaattgaattaaactctgtagaaatgtatgaaagagaagactagagaagggcccccagagagaaattgttatggtatgccatgttttttgttttaactattgttcatcctggatcattcctgttttgagatagggatctaacctattccataaagaactcagtaatcaagcttcaaaaagtcaa

SEQ ID NO: 63295 - DNA, 1034 bp, Bovine  19866881276429
  misc_feature (1)..(1): n is a, c, g, or t
ngcaaaaaatctctctcccacttgagaaccattcaatggcttccgtataagaagaccacatgctaatttaatggaacccctggcattcttgccgtgcttgggggaatgacgcgtgagcctggttacgggtcagacctcagacaactgggaaatgactctggttctcaccagggtcattcagtcctcatgataatgaatggatgagccagcaccttcccctcctagcacgagagaatgggcctccaggaaatgaaatatctccaccgacaccaaaccccaaaccaatgagaggaagcacgcttctggctttaatcttactcgactcagctctgtggaaacaagactgctggcttgcaaagaaaccagaaataacacttcctcttctggttcaggcaagagccgacagacaccttgagaggttaccaggttcatgcttctctacctagaactaggtctcccttacaaagcatttgggagactcggactttcagttggggaaaggaaaaagagcgccaggaggagaactataagcgccatcatatgcgtttctgtatctccagtgtgaacaccgtaactggcacaaatgaagagctcagccttctggtgggtgctggatctggctccccctgcccatggagccagtggttaacatcacttctcaactccgcatttagtgacactatattgttagtctgaagttagctgggtgggtgtctgtacaccctggccatcggcaatactccaaatccacctcctcgccttccccagagagccagttgttaaccatttaccagctcggttaacgcttgttgttgaatgtctggactgcttgggggcttcccaggtggcttagtggtaaagaatccacctgtcaatgcaggagatgcaagagaccatgggttcaattcctgggttaggaagataagaaatgtcatcccactccagtattcttgtctggagaatcccatggacagaggagcctggtaggctatggagtcacagagtcagacacgactgagcgcatagcacacatg

SEQ ID NO: 63296 - DNA, 1304 bp, Bovine  19866881300857
  misc_feature (1)..(1): n is a, c, g, or t
naaatttgaagtgtttccctaatgtatttgtccttcagatgcttttttcaatgggatattctcacaggacatgtgtttaatagaacagaccttggggaatgctaacctaaacaagatttttggtttatagtaaagaatactatggaccctccagctgaagtgacttgcctaaagttaaataaccattactggaagatatgggctagaatccatatcttctgacctcactcacatgctgtttgtactgcctaatgctttacaaattgcaaactcattccagtaccttcaaccaatcctgggggggaaagattctataaaagaattatgaaatacatcctctcaaatgaagtttcaaatcagtaattttttgagctatgataattttgaatgattactactttgcgctgtgctcaattgttcagtcatgtccaactcttttcgactccatggattgtagcctgccagggtcctctgtccatggagattccccaggcaaaaatattggagtgggttgccatgctcttctccaggggatcttcccagcccagggattgaacccccgtctcccacattacaggtggtttctttaccgtctgagccaccagggaaacccaattactactttaagtaagacaaaaagatttgtacatcggaaaagtggggcaaattattaccttagtattatctttctgataattcagcaggagccttatagaatgaaatcacctagccaaataggacattcttctagctgccctagccctgaggtagctttgaataaaataaactttcaggaacagatagaaatattaaaagtctccccagaaatctcagtgtcgatcccccctctccatactgaatgaaaggacaggttctaaaatatgctgagactatgaaaatccacaccagatttttacttcctctctggcacaattcccctgattctgaaaactctaatagctaatggatgggaaggtttttatatcctaatttcatagtcctatttcccagaggagaggctttagtacttcctattcttagaaaaacaagacaaattgtttgttcccaagagacttcttgggaccataggacagctttcattttaagagtagtttctatagacattacttttgaaactcattatcgctgtcaacttatgtttcagcaatattgtaaagtatttgcttcatttccaaatgctgtagtcatttttagtaggcagactgaggaccatcacatgtaggataatgaataatttttttttttgcttaaaaaataagtagttacaaacaatggaaagaatg

SEQ ID NO: 63297 - DNA, 1410 bp, Bovine  19866881323135
  misc_feature (1)..(1): n is a, c, g, or t
nattggaagggttttttattatacacatacacacacagtagggaaaaaggttagagaagacaacttttgtaagaatacattcagcattctcagagtaaatcaatatacttgcagccatcaaatacttgtagaaatgaaaaaatatataactggatattttacttgattctacatgatttaaaaaataaatatgttttcccaaaaagctcgcaggaagtaaaatcagtcaaggcttctgttagccaaataatcatctaaattatctacacagatgtcacaacataagagttattaatgcattttaggcaacactccagtatcaaacactcttacaggcaggacagataatacttctttaaataaaacccttataccccactgtgaataaacataaacaacaatgtttttatttaaaactctttagtagaagttttaatttgtgattagagaacatttcttaatgaaagtttgaaagaatacaattttcaaggataaaaaaacttcactgaatatgctacagagccttgtactccttatcctagcaactatatttctagaaatgtactaaagaaaaaaacacagatttcatattcatcaagttggcaaaaacagtaagtgtgataaaatgaagaggtggggaggttgtggagcaatgagaaaactgccaggagggacatatacttcccaccctttgggagagcctgctggagattacgtactttatgatcctgcaataccacttctcagtgtccaaacatgtaggagacaagcaccaggagaaatatagcaggatgttcactgcagcatcctctttatctaactatccctgctcagaaggggaatggaaagctggcttattctgataaaaagaacgaactggatctataagaaactgtatgaataatttcaaattacagttgagtaaaaaatgcaaaatttaaaagatataattagttgtttatataaaattaaaagcacagagagtaataagtatattttatggacacacatttattaaatgcactaaaatatgcaccagaacaacatgaaccattttctgggggaggatttaacctgttacttctccttaaacaaagtatttgaagcaaaatataaatgactgactactcctggtggtaagtatgtagatgtctatcatattttacactttggtttaaaatttttccaaatttaagacagtattaggaagaaattcaaaacacaaagattgtgaacaagtatggttactaaagccaaatattaaacacacacacacacacacacacgggaggagaaaggcaactaaatatcccacaagaaaagaaaaactgagtaaattcaagtgtgttttatgtccatcctgtattacaatacagatgggggtaaattcataaagcatttaatgcaagg

SEQ ID NO: 63298 - DNA, 1157 bp, Bovine  19866881402794
  misc_feature (1)..(1): n is a, c, g, or t
nctagtagtaaatatttttgtctttgaagccgatggtctctattccaccttcagctctgttgtagtgtgaaagcagccatagataatacataaacaaatggaaatggcttcattccaataaagctttatttagggacactgaaatgtgaattttgtgtaattttcacatgtcaccaactatttgttttcttttgattttttttcctccaatatttaaaaaaaatgtaaaaaccatccttagctcacaggctatacaaatacattggtgggctggatttggtccatgggctgtagtttgtgacccctgacctaggaagccgttgtattggcatttttgactatggacaaggggaaacacaggactgccctggatccacagccctgtgaccacagcagtattttcaccctctgccgctccttcttacacatttctcttagaagatgtggagtatttgtgtgacctggttatatgccacagaaaactcaaactgcttaagcaaaaagaggatgcactgagttctgttcctccaggagaagttgatccagggttcctctgtttctctccatctcttggcttttcttctttctgtgaagatttgctgtcaggatccatgtgatgactggtccatggccagcagaaaccaggccaagtttctcctcctccaagagttcacacaaaagctcgggacctgattacctgggttttgttatggagcttcgtgtccatctgaaccagctccgtgcctgggggaacagaacaccacacccaggcagggtcagccccaagaatccccaggattgttacctgcatcagattcccaactaaaatgggagtccactcaccaaggaaaggtgaccaggtgctgggaggcaaaaatcaacaaatgtccgcttcccactggggatatcacaatatgacatttagaattggaatgccttgaacaaagtgggtgggcgagctgcgcagagcaggaagttgctcctcacaccccgtcttctgaaagggatgcctgcctttcctttggcagattctctctgcaggttccagtttctcctggaacagactttctaggcttgacaaacccaaagctactgaatgctttagatttcatttttctgtgcaatcaggtggtctagactctcagcactcagttgat

SEQ ID NO: 63299 - DNA, 1194 bp, Bovine  19866881453473
  misc_feature (1)..(1): n is a, c, g, or t
ncttatatctcctgcattgacaggagggttctctaccactgtaccataattagacgatggctaaaacaaggacagtaatgcttgttagtttccagtaggatttctgaacagtcagagccaaacattttaacaagaattcttaatggcatgtgaattttaaaattgcataatactgttgtcaagaatcaaaagtttaatctttattatgtatccatgtgcctctgtgtgtgtacaaatgtgagtgtgtctgtctatagctgtgttaggcatgatatagttagagtatgagatcttcatgagtcaagaaacatacttttttaggtcaacctattgaattcaagggtgggaggaattttcatagtatgaatcaaaaagcaaccataaaaaggaaaaggcttatgaataatggaggagagagattcaggtcacactaagcccagaagccacacattttttctgcctcaggtaaggagatctttaaaaatatcatctttataggtataaaaaacattttctggaggtctttcctaggagatagtttaaagataatattctagaatgtattctatacaagctttgctgagttttcctgaattttcagcatttgcatggaatatatgtaataacatttaggagtattatgaactatactaatagacacggttaattagacaagcggttgaattagaaagtttgggttaaaatggaacttggggaagagaaattggggatgtgttgtaatttgtgtgttgctgtcagatttgatacaagaatgtggttgttgtagaatgtggttgttgtttagttgctaagttgtgtccagttcttttgcgatcccatggactatagcccaccaggttcttctgtctgtggaatttcccaggcaagaatactgaagtgggttgccacttccttctccaggggatcttcccaacccaggaatcaaacccatgtctcttgcattggcaagtggcttttttattttttaccattgaaccaccaaggaaagaaccccatttaaataatgtagctctgtattttttgacatggaaatatacccatatcacagaacattaaatgacaaaagcagatttccaagtagctggtataagcaatgaaatggaaaataattataattatttcataacaaataagtaaaaacagtaattatttctgggtggtaggaattcaggt

SEQ ID NO: 63300 - DNA, 956 bp, Bovine  19866881472580
  misc_feature (1)..(1): n is a, c, g, or t
ntttatgagattttccagagatttctgaagaaattcctggagcacaaaacaagatcaaacacccacttttcctgtcaaacaggacaaggaatgttcaatccatagttacccctgcatttacctcagtaaacatgggaagaaactttggcggcagtgtctgctttgcaaggagccgagggccttgtgtggtaccccagagcaggaaaacatcgcaagatagagtctgcttcctcacagcacgaggggaccagccctgcgagcctcctgcctggtaccaaattcatctcagaggggagggccgatcaaccaaaggtggtaactgtggaattttcttcatccagcaagactgcccccgaatgcaaaaagaacaaagtgtcaaccggctccttgtctcttcagacttcattcagtggtcacagaggtatttcctctgcacatattttcgttcagcagtgtggtttctggcccagtgactgtggctataatggttagcttagccttaaccacattagggcccgggttagggagaagatttcttgttgttcttattgtttttgttgtcgttgctggagttgaggcagggcagctgctggggttaaacacggtttccattgttattgttttctttctccctttgtgtgtcctgaactctgaatggcagaaatgagagccccacttttgttagtggagtggcttctgtgagcaaattccaacccctggaatgtttcgtgagctgcaaagacaaccgcaagagtcttggaaatttgtctgtggagtgtatggctggggcccccttgccatgtccctcctcccttccaagtggaaataacagccataggacaggtgggagaggagtggatgggagcaaatcaggaagagagggcacctagctgagctgtccagccacaagaaatttgtgctttggggtaaaataatgtccccgttaacccttccag

SEQ ID NO: 63301 - DNA, 1502 bp, Bovine  19866881582339
  misc_feature (1)..(1): n is a, c, g, or t
ngagctgccgcacatggaagttagaggaacacagcacgatgcctccatatgtcacaatccctttgctccctaaactagattctatctaaactagaaaagcagccttccttgctctaaattcatcctgcaattaacttgaatgaggcctgggcaagttctttcttggctgaaccctgaaataataaccacaggactatggtaataatgatcacaatgccgacaacaacagaaataatggttaccattattgacggctggccacaccaggaactcaccataaccacttaaagcttagactactccagctggtaagagttaccacctgatgggaacatgtgtctgagttgccttcctttactgggtgccagaaggtcatggtgtttgtccaaattgaatttggatttacataaagtacctgtatcctctgactttcaagtgttcttttaactatataaaatctcatttgcagcatccttccatctggaaattcttgttgctattccaagtggccatgggatgcattagccactgacacacatggttactgttaccaggtacatacagaaaaacttgcactagcagtttctattaagaagcctagcaacagactttggaaatctctgagaggtccatgtcatcacttggcttgtgagtaatcatcacctggatgattctcacaccagcatgaagcctttcagctcccactgggcaagggatctggcctgtctcagtggcagggttactgaaaatacaggctgtactgattcagaaaccaaaggcatctttcaattaaggatttgacacagacaaaaaatactagtttaagggtcatttgtagagatgtggatggacctaggatctgtcatacagagtgcagtaaatcagaaggaggaaaacaaatatcttatatgaatgcatacatatggaatctataaaaatgatacaggtaaacctattagcagggcagatatagagaatggacatgtagacacaggggaggaagggggaaggtggaatgaattgggagattagggttgacatacaagtaccctgttaaaatagctagctagagggaacctgcttatatagcacagagaggtcagctcagggcgctatgatgacctagagaggtgggatgggatgatggtgggagggaggtccaagagggaggggatatatgtacacatatagacaagtcacttcattttacagcagaaactaacacagcattgtaaaactattatactccaatttaaaaataaacaaatacaattaaaaaataaaaaggcagaaaaaaagtagtaaaatactaaatctactttgtggaataaaacatatacagttttatacactattcattaaaagtggcatttaaccctctgtgataccaatgtctcctcaatagagggggcaagagtaataataatactcacaataacagcaacaataagttctattttttgagtacttttatgtgccagaaacttcacattcatcatccc

SEQ ID NO: 63302 - DNA, 1187 bp, Bovine  19866881648103
  misc_feature (1)..(1): n is a, c, g, or t
ngacgatcggataaaattgggacttagggggactcctgcgctccaggaaattctccaagtctccacttatcctcaaagtgaacaagaagcttcagtttcaagttgagtgcattttccatccatggattggcttgttttgttcagttttactttgagtgtttgaggttatctcttcgacgtagcagctaaacccacgtcttcctttctcgtaaaaccaaaacaaaaaggctagaaattcatgtgccttctgtgtgtgcacatgtgtagtatatacctgggatcaaagccagctatataaagtccttgattctgtgtgggttcaaacacatttcaaagcttcaggatcctgaaagtttttgctctgcttcctgaagacctgaacaaccgctcccataaagccatggcttgctctggattccagagtcatgggacttggtggacatctaggacctggccctgcactgccctattttttcttgtcttcattcctgttttctctaaaggtgagtgaggcttttggagcatgaaggtggaggaggtgtttctcccactgggtttcatttcttttctcagtcaagggcagagatttacagcaaagccagaagctaaaggtgagactccagtctcctggtttgggcagctctgtattccaaggcaggcaagggacagctggaaggagcaaaacagcagagacacagctagtaacagcttactgggcatggagtggaagcttagtgagtacatgtgagttggtcttggagacaggagaaatttcagacacttctataagactggaagaaaatactgtaaaggtaagtgatgtaagagagaagagagaccatcctaaatccatctgggcttggaataagggttagctcaaggtttcctttttaaaaaacattgattgaataaaattatgagatatttctttcttatcaatcaaggttttaaggtcttctgattcatttttataaacaaatgacgcctgcttgtttaacattgcggccttctttactcaatgcaaggttttaagatccacttagtcaactctataaactagttagctagtaattatttttaaaattaagcagtttgaagtagtaaaacaaaaaaaaaggcggggggaagaaagaagaaagaaataaaaaacgaaagaataaaagaagaacaaaagaaagggccatcgg

SEQ ID NO: 63303 - DNA, 3698 bp, Bovine  19866880169357
  misc_feature (1)..(1): n is a, c, g, or t
ngagaaacagtggaaacagtgtcagactttatttttttgggctccaaaatcactgcagatggcgactgcagccatgaaattaaaagaggcttactccttggaaggaaagttatgaccaacctagatagcatattcaaaagcagagacattactttgccaacaaagtttcgtccagtcaaggctattgtttttcctgtggtcatgtatggatgtgagagttggactgtgaagaaggctgagcaccgaagaattgatgcttttgaactgtggtgttggagaagactcttgagagtcccttggactgcaaggagatccaaccagtccattctaaaggagatcagccctgggatttctttggaaggaatgatgctaaagctgaaactccagtactttggccacgtcatgtgaagagttgactcattggaaaagactctgatgctgggagggattgggggcaggagaagaaggggatgacagaggatgagatgtgtggatggcatcaccaactcgatggacatgagtttgagtgaactccgggagttggtgatggacagggaggcctggcatgctgcgattcatggggttgcaaagagttggacacgactgagcaactgaactgaactgaacttgagcaatgaattgtttcatgcaaatccacctacctgatgggttgaacacaattatggaagatagcacatttcattcggtgtgtagaatgaaaatccttgagacccccgtgaagtttatgtgagaaatgagttaggagccacacatccagctctcactgcagtgctcatggagcagagtgcactctgcactcctccctttacacagtgcagttgccctgcacagaggcatatggggtcctagtttccctaccagggatcgaacctacactcccctgcagtggaagtgcagagtcttaagcactcaagactgctgcttcccaagctgggtccacagatccagtaaccaggttatacttggaccatttccaccaactccagtagaagagtttgaagaccccagctttaaaaccacaacctcatccaggccagttatgccatagtattcttttgaagtcctccaagaaaacaagagtctaaaaccatctcctattgtaaatagcagctctctgaacatttttccttctacccacataaaccttttgtacttgagagactggttcctcttctttgccaaggaaggccatcatctatctgcatgattttttaaaaatatttatttatttgcctgtgccaggtcttcactgaggcacatgggatctttagttgtggcatgtggatcttagttccctgaccagggaatgaacccgtgcaccctgcactgggagttcagagtcttaaccactggaaaccggggaagtcccctacgtgcatgattgatcccatctagcctctggcctccatctcgctttgtttgttcacagcccttacccttctcaatttttatgttattatttgcccccagccctcctctcccccacttgagagtattccttcttgctgtatctgtgacagtcttcagtttattcatttctctgatcagcattcctcttcccacctaaataagtactcccaagcttttatctccagacctctcttctgcttttcttctgaggcgttttgttccccttgatagagcttccttgagcacatctgggaagatagtcccaaatctttgttcccttcagccctaggccagccttgttaagtttctacttctctgcttgcctgccagacccagactcctcaccttccactgaactagcttcttcctctggctgcctcatctaagtcaatgtcagcacacaggctgcacttctacacatcgctgagcttaacatgaactttctccactatcatcaccattattttcctgcttcattggttccctgaaactcagcagctttccatttttttacttcgtggtctcccttctgcagagggaagaacaaaatcaaagtggttttgaacagtcctaactttctaaacttgcttacaacccagagctctggttttctttgacattcgtgggcccagacaagacccatccaatttcttccccaggtttatttcaagtggaatgaacctagaaggacccttgacaccggggtcctggaactgctaggatgtgaccccaagactttacatttggtggagtgtacttgagatactggttcctcttctttgccaaggaaggccatcatctatctgcacgatttttaaaaaatatttgtttatttgcctgtgccagatcttcactgaggcacatgggatctttagttgtggcatgtgggatcttagttccctgaccagggattgaacccgtgcaccctgcattgggagttcagagtcttaaccactggaaaccggggaagtcccctacgttcagggaagttccctgaacacacccaagctttccttctgccatggtaatattcccttccctcctttcctattagttgaaattatatctagccattgctcaaaatttaccataaacagcaaaatctgtaatctctccctcctttgaaccattttgaaccatgcctactatgagtgtgaacttttttatcttttgtctttctttttttttgtcactctgcacagccctgtgggatcttagttccctcaccagggattgaacctgggcctcagcagtgaaagcatcaagtactaacccctggaccttcagggaattccccagtgtaagtttcttagtggctaaatggagtttcccattcatttctttatctgctaccaccccaggcaccacccccatctcccacctgggcataaggccttgaagacaactgtatgataaatgttgtctccttggtgtccaagaagtatgtctgatcatcattttttgtataatacctatttcttttattccagcacacacatgttttacaatttaacattggtgaagtcaggattcatcctataatcgttgactgctataatttaattagcagcattttttcctctcagtggtacataaactatggggacatcttagattcagtgaaatcaagcatcattcaagcatctctgataacagctatgtttactcctctgtcctctctctatggtgaatcattctcttctcaacatttctttaattcctgttctccactcctatggttgtctcctctttacctcatttaaatttctacctttctcacatagagtcacattattataataagactgtgctaaatccgcaggtgtcattggctcatgataaaatgctgtttacaattctgtttgctatagaatgaatgccaattcaccacataagctagttaaaatacatctttatttttgttaagtgtgaacagcccaccatgctataggagcttccatttatgaagacaacatggtcagaagtcaagcactattgaaattaaatatgacaactagagcaacaggatgtatttttaatgacaatgtaattattattctttgagcagcagtgtggcctagagagtctccagagagtataggtttctaaacacttccagatgccctgtaccatgcaatttccttctttatggaccttcattcttcatttgtttacgaggctgggaaagccactggtcttgggccaggcaactacgtggaggggacgctgtccccatcagcatgggtgtgtaggagaggttggggggc

SEQ ID NO: 63304 - DNA, 1030 bp, Bovine  19866880385788
  misc_feature (1)..(1): n is a, c, g, or t
naatgagtaggaaggatctcattcaaccttttgaagaagcatgacaggtatctactctctgaacacagggagatggagagggaggtgaaaccccagaatggagtttccggcttacctgagcttaattttaaccggattttttttcgtattccctctgaaatagacctggggaaaagaaacgtgatgatctcctatgttttcttaagatatgtgtctccctctctccttcaggaaacatcaatcagaatgaatctaagcagtacctgcacaccagggaagagtaagtgactgattttcttccaacttctgaacttccccaatcccaaagtcataactagaattttactcggcaggatgtgaaatctctcttctgaagtcctttggccttcttcagatttgtccccatccctgtcattccccatcacgagctattagaagaatacatttcttttccttgcccatcagctctgaatttctctccaggtaggtcaccagtgagggctaggtgatcccccaaggtcaaagtacccgttacctttcagtgtgactgtttctttcttacacttttccagattaaaggcttttccaagctagtccattgaataaacatccagagatacagagtgctccattcctccaggaggcttttatgagatcaccacagagtggagatgagatggagtttgaagttgcattcgtgggcagtcagagcaatcacacattaatcttgctgaaaggaacagaatccagtctgtaagacattcgaatgctcctgggagctgactggtctgcagttcttcccagaccttcagttcagttcagttcagtcgctcagtcgtgtctgactcttttcgatcccatgaatcgcagcacgccaggcctccctgtccatcaccaactcctggagttcacctaattaatgggaattcctggcagaggggcctcatgagagccaaagcagacagtgggtgagctgtttgggagatcatgcttgcttatttccaagtggacacacggtctttgggcatct

SEQ ID NO: 63305 - DNA, 1311 bp, Bovine  19866880442158
  misc_feature (1)..(1): n is a, c, g, or t
nggatggggagcctggtgggctgctgtctgtggggtcgcacagagttggacacgactgaagtgacttagcagcagcagcagcagttaactcataggctgttaacattatatgttaatatcatcggttaccaagtacttcatagtttgcaaaatacctgcacgaacattattacattttagtctcaccattaccatgaaaatgatactgggcacatttaaatgccctcctttcacagactggaagactgaggaagaggtagagatgtttgtacaaaaagcccaaactagctgcagagacccctcaaggggctacgtctcccaaataaagtctggagttctttccacttttcctccctcatacctaaactaatttagtatctgaggccctgcccccttttcttagctgagctgtggcatgggggatcttagctccccaatcagggactgaactcctgccgtggagattggagtcttaaccactggaccaacaggaaagtccctgagacccattttatagagaccggaaatctgcttcttctgaaacatctgattctgaatggctaacagaaatactcagtgtataccttaaactaacacaacattgcaaatacctgtacttcaatttttaatggtttaaaaaaatactcagaaaatatagggaataaagtatatcaataaagcataccaaacacatttataatgattcaatgcagtgaaaaaataattttaagaaactcagaagacagagatagaaactaacctctaaaggctgtgcatggtaatgatctgtgggatctttcaattctgctgcttctttcatcaaacgtttaacagctaaaacaaaattcacaagatagagacttttcaaataaactttttccatgtgattagcagatttacagacctaatgaataagttcctacttcaacaaaaaacgtgcagaggacttattcaatacagcatatgatttaattatgcgataatagtaataatgggggaagaaaaggcagctaggcactagaagagttacatattaaattaaatatatagggaagtttcaaagagacactatttttctctactaagtactattatacactccttattaggtagcactaaaatattaactcatgtaatcctcaaaacagctgagataggtgctgtttttatccccattttccagatgaagaaactgagacatggagagattacacatgtccaaggttacacagctggtagatgacagaactaggatttcaacacaggcagtccaactgtacctcgttaaaagatctccattgtcaagaaaca

SEQ ID NO: 63306 - DNA, 936 bp, Bovine  19866880473199
  misc_feature (1)..(1): n is a, c, g, or t
ntgaccccggggacagttacctcatgctatacagcacctgcccatctgggaacactctcagcatgatgttgtctgtggtggtgtcatggatgaacgaccttttggagtgaacaaagaacacatcagggacccagatcttcttcaccagccggccgtcgaaggtcatactcttgttgctggcactggggaaagccagccgctcatccttccagtaatgccgcaggtacaaggtcatggtgaagtcctgtggagcaggggtaagaccagacagagatgccttacaaaactcccttcctgaccgtcccttccaccaccatgatggatgcctcaggctcagcctccagggtctgggtgacagtccactgtcctgccggacgacagccaccgctgccacaggaaagaggactcattcttgtgccttgtgagattggagcccaggagaccgcacagctcctccttcaggctttgcaaagggaaaatggcagctgtgatgccctctggctggcgtggagccagcaggccaggatttccccaaagccctgcatgctcaccaatacctgtgcacacacggctccttacctattggctaaccattcaactcaactcagtagacacttccagaaacctggacagtcaagtgtcccatttaggaggatttcttagatttgtaagatctttgaaggcagaattgtgtcctgcacaccactgaatctccagaccctagtttagtgcctggaagagcagagaagtcgatgctcaataaatattttcaggatggaaaaaatgaagggaatgaatggatgaagagataggcagcagtgtaatttcagcctggaaacttattctgttaacaagtgtttccatggttgtgtcttaaactaagagtgaagcccttacaccgcagccagagctaagacacaaatgcagatgagtctt

SEQ ID NO: 63307 - DNA, 1565 bp, Bovine  19866880487233
  misc_feature (1)..(1): n is a, c, g, or t
ntgggactgagtggtcctctcccattcagagactgagatgggtagaaaaacgtaggttggagaaagcaggagagagggtgctgtaaagtaaattcttggaggggactggaaaaggaggtataagaaaaaagtgtgtgctaagagattaattgtttttatgtgttgcccatgtaattatatgttatagagggatatagtgaattagttttagtcaatatatattttagcttgaaatatttaaaaaaatattcagattacttttcacctttagaattctaattgttttctgtgtcataaatagtttttttaaacaatagaaccatcctactgcagagaggagagtagtcacctataaagacagtctgctaatactttgtgatgtatttaaatatgtctttagtctgttttaaatctgtgtcaagtcccctgttgcatattccagttatccttattgcagttgtaatttattttacaattatttgttgtctatttcactccccagaatgtacgttccttgaggatcaggcctctccactgcactgtatccctagtgcctggcatagtgccttgtatatagtaggtcgtatttgttggttgaataaatgaatctgaggattggcactttaaaaatatactaggaatacaggtaaagaaatgacaaagtttagtaaattagatcgcacaaacaatacttttgttatttcagtagtcttttctattttgatttcttccttattttttcttccggttttattgcaatgtaattgacatacagcactgtataaatttacaggtgtacagcataatgatctgacttgcatatatcatgaaatgattaccacaataaatttagcaaatatctagtagctcatagatacaaaatgaatggaaaaaaaaatttttttctgttgtgatgaaaactctgaggatttactctcaacaactttgatatgtaacagcaatgttaattgcattaatcatattatacattgcatccttaggacttatttatcatgtaactggaagtttgtaccttttgactaccttcatctgttttgcccacccctctggtaaccacaaatctgatctctttttctctgagtttgtttttgaagtttaatctacctataagactatgttagttctgtgcacaacgtagtgatttggtatttctatacattacaaagtgatcaccacccattttgattttaaagtacctaacacagaactcttcttcacaggtataggtaggtaattgataccaattctggttaaaacaataaattgcatttagttacaagtttatctcttaattatatttacatacagattatctcagagtgtgattatataatttgatcactagggaggtaattgaaacctggttttggctgggggtagctgctttacatcagagaaggcgatggcaccccactccagtactcttgcctggagaatcccagggacaggggagcctggtgggctgccgtctatggggtcgcacagagtcagacacgactgaagcgacttagcagcagcagcagcagctgctgctttacacgcca

SEQ ID NO: 63308 - DNA, 785 bp, Bovine  19866880506821
  misc_feature (1)..(1): n is a, c, g, or t
ncgtatgctgcacagtgtggccaaaaaaaaaaagatcttaaaaaaagaaaacccaaaaaacaatttaaccccttgcaaagccgccttgcagacttgaccccaaaagagtttccctgctctggggggtccagcagggttggcatggatggtggctgcccctctcaggaactggagaaaaaggccacggggagagaggagcctggacggggccagccatctgcaccgacaaggcaggggggaaggatgggactcacaggatgcatgagacacaggcccaggcacccctagtgcaggtggggaaactgaggcccagagcatggcagctgatgcaccctggccagagagaccctggcaggctggtctctattcccctttatcttgctcttgaagttctctcaggtgccagcgtcctcttggggcagcaggaaggagcaggagtgacttgtgagcaagccaccgaccctctgcttgtggtttgtgaagtggggaaagtaatccctccatctgtgggggctgtcaggattaaacgagatgatgtatgtaaagcccccagcacctacgggttcacagccccttagaaaaagccagctgtcaggcctccctcttgtgtgactgttaggggattaggatgttaatctatcccaggggcctttgcattttcaaagcctctcgctcagttccctgagctctgacacttgccaagcaggaggagaaagcaggcgaccgatgacagtccctgcctcttcttcctgctgggacagaaagctgctcagccaggcatccag

SEQ ID NO: 63309 - DNA, 1985 bp, Bovine  19866880540754
  misc_feature (1)..(1): n is a, c, g, or t
ncataaagatgaataacactgagcttagcatgattgcagcctagtgggggagacctgcaggaaccaaaggattagatgcagagagaggcacggacaccaaggaggtgtgggcagggagcgacaggtaacaggaaggtgaagtttcctaggcagcaagagacaataacaagtgaaattcacaaatgagatgctccatcacactaggtagattgaaaaatcaattccatggttcttgaattcccagtcagtttcaagatttgagagtcaatgattgttgggaggaagagatttttcttgggagagaggtgtgggcatgccatttgctggactgcagaggacacatgtgtgcttatggttgggggacactgcagttagagggtgagagaagagctgtctcaccactgaggggcagagctaggaggagttttggctcttatggggccagtatgcactcccaggcttgttgggaatagttcagcatgtgtggcatggagactggtgagccaagagatggagtggaagatgctgctggaggatggaggtgcccagtagagggaatgaaggacctggggaaaaagtctcagcttcaaccacatagtggtcccagagagcttgaaaccacctcaccagagaaccatccctctcttatctcacttctacccatgtaggaggtgattagagatgggcagacactgaccactcaaatgccaactctgtgccttagctgggaagggggagcagaagtctcaatgtgaatgaagtttgaagtgtcgataccttggaccaaaattctttgtttctgaactgagatatatttggttacttctgaggattttgactgcctgttacatgagaggggtaagcaggaaaatctcaggaccggccaagcttccaagggaagatgctctagatgaaataattcaaaaggacttgagggaaacaacagtgagcatgggtgagattacaccacatgctgggcttgttcaatgcgtgggaaacaagcagaaaagcatcaagtcagggtgccaagaacaagtctgataatgtctgtgattctaaaaaacctgttcctgtatcaactgacaacagagagaagagctgtttaatactttcgttcatagcaaaacctacctgcatttgacatctgatgtccccaaagtttgccacaagtgtctctaagcttagcccctagtttctttcttgctggtgatgccatcaggtatggttgtgctggtgatgcacccatagaaatgggagcccacccattaggtgtccaagtcagaggctggcctgaccacccccccaaaaatacatcctgtgtatcagtattcccaggggagataagatgatccagctgctaacaatacaagatccctccctacaacactcaaatggaatgaggaaaataaggcaaatatctggataactgagtttcaaaaaagctcttttccttgaaatttccatttaaaagtgattttttctttttggccatgaattatccagataattttcataacttatacatagccaattttctgtggctgaaggaaacatagtatgttcaaagctaatgactgttaatcataccctgccatggaattccacaccgggtgggagatcttctacgactaacaatctgtctttgcttattctttgacgcaaaagccaattttcctgtgtaaactccgaagcaaaatcattagatgctagcaagtgcttgcatgttgatgcataagatcttccagtgtttttccatttttatgatctctatggaattatccactaagaacacctgtgcccactagtagatgttattatcaatatagaaatatcaacattgtaaaaaaaaaatagaatgcctaatttggcaactggcataaatacttcatgaatattattgtaaaaacattgtacacaaatagtgaatgtcagtaaaatcaagaaaaggaagaatttgaatgaatctgaaacaggagagcaatata

SEQ ID NO: 63310 - DNA, 1363 bp, Bovine  19866880588318
  misc_feature (1)..(1): n is a, c, g, or t
nctattagcagaatgacagattactacataccagaggctttcacagtcaaaacctcgtatattaaatctgacgtcaagctttgaaacggcataataacttagcaccaaagaagaaaagaatgtcaaaaagtctcctgtccttccaccagatataaaatactgagcttgataagaatttatcatttatgtagggtattttttcctgtagctgaacggggaatcacttctttattgcatttgtatgtaacgttcactctttattttcaagggattttgcctgcccaaagagtttatggaagattcagcgggagaaggggcgactgaattccatgactacgagggaggagggattggagaaggcgagggcatgaaggatgtgagtgatcagatagaaaatgaagaacaggtatgttttcatggccatgaaatatgtaaattggatgcagaagcatacactccttttccagtatttaaattacacatataaatgtttttgctattaggttaatggttttcagactgatttaggtaccttaagaatactggagtttagggagtggctataaattaaaagcttgaagacaatagaaaggatattttttttttttttttagttctaccaggttattgctaccaacccatgaccctccaccctcatgcacacatgctcagtcatgtaaccccatggactgcagcctgccaggctcctctgtccatggacttttccaggcaagaatactggagtgggttgccatttccttctccagggaatagaaaggatattttgtagctcagtcattggttgtacctacaatttgggaaggaaatagttttaaaattttttattttaaatgggaacatttttgctgattttctagagaacacttttggtagtagttcatttaaggaccaagagtttggctattttaagtaatgactacattaaacaatagtgccagtgtttgttattaataggttttattgttgtatgtctttgacatgttcagattttaaatatctatatccttttttagttggaatcaagaatgcttttgaaatgtttagatgctttggactaagattcgtgtattactttttaaaattcaatctgatttggatttttttttaaatattctttttgtcatttagtcattagattaatcaactgtgacttgaagaaagaacaagtagtggaatttcattttatcatctctattctaaatgtaaattagtccacaaatttctatttaaggtatggtcatacctattaaaaatagaggaacaaaccgatccagacttcctctcttcctttgaagggaaaattggaaagatataaagaaaccaaaagaataagctcgcattt

SEQ ID NO: 63311 - DNA, 1088 bp, Bovine  19866880625927
  misc_feature (1)..(1): n is a, c, g, or t
nataaatatttacatcagtctcacccattcaacccacagggtctgtcagtaactcccatgagaccgatttaatgaccagggaatgggttgataaccacagcctgaaaaacatcgacccaggtgatcactagagtctttttctatctctaaattccattataaccaacaactggaaaagtaaactggcatgcaatcaaattgtggtaatctgaccaagcagaaagctacaattaaggaaaaagggctaaatgtgtgcaaggtgtttggaaggcattggacaaaataaaatgggaacctcggatggcatacttaagtcacgtcgtctgcagacaatctgttaaacaaaaatacaaacccattgagttcagtgggttatcgtgttatttgggccacataatgcttgagtggcaagtggtcctaagagctctggtcacttttgcagggtgccctcatcccacatccgtcatcatctggatcagttccctcatctctaagccctgctgaagctgctccaagccatgaggtcttcataaaattctcataaaaacatttttaaagagcaccatgcttccagctttcaaattatcattagatacagaaacttccaaaagcctgaagcccctccattctgaccacagtcctctaggctccctgcctcctgctgtagcgccctcgtcccccaactctcagtggctgtccaaatcctcaccaaatgttatctgatgcaatcttaaggtattctctttccttgaggatatttttatgttgagctggaaaatcaaaaaggatgaacttctaaatgtaaaattttaggcacaagggaatgaggagacatgtttagggaaatcctttctgtactcctttgaaacacacctactggggaactagctctttaccttctcgacttgacagtgagccagcctggctacagatacatcaacccacgggcagctggcatccttaataatgaacaacttccttctgttctgtcaagagcagagacaaagatgtgattcaggggcactcaaattgaattattgtctttgtttaaaccttcccactcagatgggagctgtcagctgccgcag

SEQ ID NO: 63312 - DNA, 1804 bp, Bovine  19866880763656
  misc_feature (1)..(1): n is a, c, g, or t
ntccgactctttgcaaccccatgaatcgcagcacgccagccctccctgtccctcaccaactcccagagttcactcagactcacgtgtaaaaatatacaataaagctaatggaaatacaggtactccgatgtcaaaaagggacataagaggcacttttcagaaagaatttgggaatttgaaaccagattgttggttacgatttgcggagtttatttcacagcattagcatctgaagatcaaattatcttggattagcagctatggtggatcatcctattgtgcaacgcagaaacttgggttgaatttgatcttgtgtaaaattcatgtagccatcaactgaaagaagacaaataggctggtcatggattggcaattttggcctttttactcatttaatttagcctagtttgttttcttcatcttcaccttcattgtgtattccctgggctaaaaatggcatatttatgtgtgtttaattgtacatattgcagacttaattttaaaaataaaaccatttagacaagactacagcagtgtaaacatttcacagctgcaaaatgtttccttactacccctctttttgtcgctctctcctttatatacattgcatttttcaatttcttttcatcgtttctctagtattgtaaaattatatggtatagggtcttgtctgttaatgacaagtataaaccttgactatttctgtgtaataactttgactttagaccttttattcccatttcaaatattaattttggttcacttctattcagtagtatacactgttctacagttaactttgctctgtgttgaactctggtattgaatgttatggtcaaatctgggttttgaagctttcaaaccaaggtgataggtacattattacatgtccttatgattgcagatcactagtcaagtgttcctggagaaagaaactgacttcttggcaacaacaacacttaggtaaaattataaactaattttagacaagaaaaagaaaaacacagaagagcatcaattgctgctttttttttttttccatacagtccaaggatacagaacttttattaaacagcggatagtgggagtgggccaacctcgagggacagaccaattgctgccatttgatatgaattagacaatgaataaaatatgtttttctgaaatgataagtgacattctagatttttaaaaactggccagctatcatatttccctgaaaaaaattaaaatattgaatgaaatctctcttctctcataagtgagcttgaatgaacttttctcctaagccatatcaatttataacaaaggaagctagtttcagtgaagttaaatagcttataataacaaaaattaaatatgtgttaactgacataaaatgcattagagcaaatagagaggtgaaaagcaccttttgaagaacattttaatctgattcatacttattactttaaaaaaacatgtaatttcaaggaatgatctctagaaaggaaatgaacattttcaattctaatgttatcaaaaaatacattaacagtttttaatttttcaaggccaatacacaggaagcctttattaaaaatgtatctagttttgttaagtgtttaccatacatgtctctttttagaaatactttttatcatagcctataatgagagattactcaaaacaaatcatctgctttgctgatacgtagttatctagagctgctgatgtttggtagctgttatagactgaattgcacttccccaaattcataggttgaagttctgactcccaatgcgactgtcttttgaagataggg

SEQ ID NO: 63313 - DNA, 1854 bp, Bovine  19866880821800
  misc_feature (1)..(1): n is a, c, g, or t
ngactctgtggggtcttcctgggacagacccttcccccatatcctctgctatagctcatctctgaagtgcccaggtaatggtatctgatgcacacacttccggagttgttttacagatgctaaaacccccaccaaatggaagaaattaactacctgatgacaatgagaccccagacccatgggagcctaaggataacataaaccacccagttaccccagcgtcaatcagtcagagaactgtgcaagagtgggccacatgccctgagatcccctcgtccctcacctgggttttaaaattgctttgctgaagctcttcggggagctcagggtattctgagcacgaggcctttccagcctcacacacacccagctcccttgcttggccctgcaataaaactcactctgctccaaagtccgcttcagtttgtttggcctcactgtgcatcaggcacacaaacttgcatttggtaacattaatgagattccaaactgaatatattcggaatcaatcaaacatcttcctcataattgtgttgggtcatatggtttaaacgttcctgtttgcattcgtgtttatcatctaatgcaggtggctggactgctgagaacacaaaagcaggctttatctagcaatgatacgtgcaaaggccaggccaggtcatgctgggcagtggggtctcaaccacctgaccaagacaatgggtaggagaactaagctatcatggagcgactggtaaagacaggcctgctgaacaaggaacccgggccacagctctcacttccaggtctgggagcaaacactatggatcccatctctgtatacaccaacttacaacagttttgtcatggtaaatgtaaaagtgaatgcaataacgtgagtgattttcatactaacacagaacaaagggaccaatctaatgttttacaagttatatggctaatttcatgtacgtctcctatcatgttgctgaaggttaattttttttttccttccagtatgtctagaagttaaatttggctggaggggaagacagcttgaggactacacttacgcatttcatattactttctcccacacataaacaattcttgatcaatgggagaagtcagagcacaggaaataccaaatggaggtgaactgccttgttttttatttgattatggcatgctttatggaagtcattttgtggctaattcatttccttaattatacttgccctagagcaatattacatgagtttatattccccaatattggaaggggaaggtcccagaacacacaggatatgagaaggaagccaagctgaatgtttttttaaatttagctgaaaaaagctgttaggtgtgaattctgagaaaggatgaaaattcagcaatacatatccaaagcctctaactgtggtttgctctctgacccagaaatcccactttcagaaactgacccaaaagtagtacctctagaggtcagaaaggatttacttgcaagaatatcaggaaaggggtcagtagagatgggttcagtcatggaatgaggagatgatgccttatagtaagtgtttactttatgcaagggtctattctaagcactcaacatctgtctcctcatttaattctcaaagcagaccagtcgagcgggtatgattgttctccccattttacagaagactagggggagacacacagcagttaaataacttgcccagctgataagaggcaaaggttgaggtatgcacccagagtctgactctagggtctctgccctgtcctctcaatggatctttagaagtcatgtaaaatgatgtaatataactgcgatagaagcatagaatatctcattttcatgagatagtgtga

SEQ ID NO: 63314 - DNA, 1476 bp, Bovine  19866880874139
  misc_feature (1)..(1): n is a, c, g, or t
naatttccttataatattttctcatattagtcaattaaaaaaaattttttttggtctgaaaacaagcatacattttccttctgtttcgactagcctactctttgtatcttcaatggaacatttttttaatggaactttaaatatatatatataattttaatttatttttggctgtgctgggtgttcctttctgtgcaggctgtctctagatgcagagagtaggggctgctctaactgtggtgctcaggcttctcattgcagtggcctctcttgctgtgaagcacaggctgcacggtgagagggctttcagtagttgcggtgccagctcagtagttacggttcccaggctctctagagcacaggctcaatagttgtggcacaccaatttagtcgctctatggcatgtgggggagaaggacatggcaccccactccagtactcttgcctgaaaaatctcatggacggaggggcttggtaggcttcagtccacggggttgtgaagaatcggagatgactgagcaacttcactttcacttttcattttcatgcattggagaaggaaatggcaccccactccagtgttcttgcctggagaatcccacggacggaggagcctggtgggctgctgtctatggggtcgcacagagtcgaagcgacttagcagcagcagtagtatacaaactgacactgacaccactacctggtctgaaaggtatgaagtactttaagagaaagacagaagatccacagtgtggaggggttgactatggtcctcatttattaatttcagtgcattaagatacagaagcagtttacatgtgcccagttaagaggatttacagatttagattttattaaataaaaaatgggcaatattcccacaaactaaagataattccaataacattagcaaaaaccaattataaaatggcagagataataattattttactcttagcaatatctaagttagaaacaatgaaaatctaaacaaagtcacacagttgtgtctgactctttgtgactccaaggaattctccaggccagaatactggagttggtagctgttcccttctccagaggatcttcccaacccagggattgaacccaggtctcccacattgcaggtggattctttatgagctgagctaccagggaagcccaacagatactataagtcagccaaaacataaaaattattaaaagactatttaagtataagaggagataagcaatctatctgataagatatttaaagtaataatcataaatatgctcaaagaactcaggagaagaatggatgaacagaaagagaagttttaaacaaagagttggaaaatataaaaaagaactacacagagctaaacaatacagtaactgaaataagaaatacactagaagaaatcaacagtagattaaatgatacagagtaacagatgagcaaagtggaagacaaagtagtgataatcactcaag

SEQ ID NO: 63315 - DNA, 1451 bp, Bovine  19866880896124
  misc_feature (1)..(1): n is a, c, g, or t
ngaaggaagttaaattaagacaggaatcaggagagaattcctatcccacgctgttctgaactcatgccaccctgagcaagtcactagctttatttcacatcacttctataggctaaatggtggagagaaattggccttgacccacttgataagcgtactgggaggtggttcattttcctaaaatgctccgaactgctccaaaaaaagtagggagccaaaaactcaatgatgcaaagtgaaatgatctttgagtaacagaaaaagaggtcacatggtatttaataatggaagccaaaggagattctattccagtggtacacaatctgaggtttaggactattctctattgtaaattttaccatattagggaggagagagtcctaaaaattatgtttttcctataccagaaaagggcttcccttgtggctcagctggtaaagagactgccagcaatgcgggagacctaggttcgatccctgggttgggaagattcccctggagaaaggaaaggctacccgctccagtactctggcctagagaattccacggactgcatagcccatgggggtgcaaagagctggacaaggctgagcgacttacactttcataccggaaaataacttcagaagacatgtgatctcatcaacttacctgagcaatcttggttttcttttgctggaatttgcagagccgcagaatctgggaccctgagtagtcactaaactgttcgtggaatggatgtaatagctttacagactctccaaaacttggaggagaaaaaccaaacaatgggaattactttttgtcatggcaaaaaaggttgggtttcccaaagggattaaaaggcacctttacctgcatactgcaatctgaccaacttccagaagggttagagcatttccaatcacagccaaagactcaaaggcaagctgtaaaacagaaaacggagggttgaaggcatcagggtattcttgacaccaatgcctttcaactctttatacaacgagtcccacaggaaacgctatttctttggtatggcacacaggggaacaccatcaatatggctgttcaccaactcagaggccttggtagtcttcggccctgactaatgccacaggcaccaaacccagtatctgttatagtagtaggaaaggtctgctttagcattacccaatataagtgatctccggaaacttggtccataaattatggtttccccctgcttttttgactacataatctctcatggataaaagattttattagcctatttattctaatctatgcatacatgatggtatagttttagaatttaaattcaactgaaaagaagatatttatagcaactaacacctactgaacatgtatcaagtacctggcactgaaccgagtgctctatatatgttatttcatttagacttcataacaactatgagtttgagttaagtatt

SEQ ID NO: 63316 - DNA, 791 bp, Bovine  19866880935903
  misc_feature (1)..(1): n is a, c, g, or t
nttacctgcagcttcagtatattgttctgtatgattcaaggcattagacccaatgtaaaaatatggatgaatcccgggaaccacaaaagaaacatttccaaaatcggtagatccttggaaaggtaagacgaatcatgaatttttaattgctagtccaacagagcacatgtaccttaatctctatacatctgacatgatttataactccttcccttccagaaattctctacccttttggtttccatgactccactctctactgactggctttctctatgactccctctctagtcacttctgttgcctgtttcctgagcactggtgatccctagggcttcatctctgggttactccttcctctgtgtcctcaggcaacctcctcaacattgaaacctatgtcttcaatcacctctcatgtgttgacaacccctaagtctggacctagacaacttttggaataggctattgaacagctttcctgagaagtcctatgaagacctcaaatttaacaaatgaataatttataccaacccaccctacttcagcctgctctttcccttgaactcttatctcgttgaatgacatcaacaccctgtttttatctccaagtccccctgagtctacatcatcaatatctaccatattttaggagatacatttctaacatgtaaacatgttaacaataatgctctttaaagcacacacaaaaaaaacctaaaataacctgatatacttatgcatgtttaaattctaatagttggttggtatttctcagaaactgaaaatgtccc

SEQ ID NO: 63317 - DNA, 968 bp, Bovine  19866881000586
  misc_feature (1)..(1): n is a, c, g, or t
ngtcttgcattaaaaataggaatgtattctacaggcatttggtctccccagggaattcattcttgctgcagcacaccagccgcggttgctagctattttcctgcccttggtataagccgaacactggccaaagcagaatcagccccctgcccataggagctgctgccctcggggaaatgggggcagggttttgggcagaaagggtattcagagggttcctgttgatagtcattttcccatctccaggatcaacaattctggctttaggaatgaggggagaaaatagtaatattagcacaggtcaaactcaaacccctcttcctttctgtgattactcaagttgggaagttggttttctgctgcttcaacaagtggtcttggaagatgcacctgcgatgtagagggcctttgacagcccttgaaagagctccctgccttctcccttccccttttcctgcagagactctgttcagaggaggatttctgagacaaactatcagttcacaaacactgggaacagtttctcaaccagcccctagtctcctgtgctgctgcggtccctgtgttgggaaccctctgcctaaagggctgggttgggagagtctctgggtctctgctgttcccacaaagcgaacatctccctaattgctgtcctaaagacagttccttacagatttcaactcttctcatatcccccctcctttacaacctgtgcattcatctctgttttactgctgaaagaatgcagacttcgtttctctgtcgtctgaacatcattgacaagcattccacccatctgtgaattattccctgactctttgatcagagcggtgttacaggtcctctgccagcaggagggagcagtccaacaaaatctgaagacccaggactttgagaagctgtgccgggcagactaggaagccacaaaacattgcgagctgaggatgtcctagtatgctttttccatg

SEQ ID NO: 63318 - DNA, 1020 bp, Bovine  19866881263742
  misc_feature (1)..(1): n is a, c, g, or t
ntttgcttcctaaaagcagatgagtatactccactgagttttcagtgaaaactgtaccagtttttgtcaggtgtttaaagaggtctgctaaagctcgctgcttctgcatgagaatgtgcttggcttccgaccgctgcttctccttctctgcggaggggtccacctttaagctctgaagctcactcataaaggagattacgtcgcctgcagggaagacaagggagaaacatggaaatccccaggaattcttaatatactcagattacccaagaccaaggacattttggaaacaaacaccaagtgtcattcatctttatatctaacagccctcagcactggtaaattctcaataacaactgatgacacgcatgacaagagaaaaatcggaaacaatctatcttgacaacaaacaacccaaataaaagtagctaatctttttatccaggggttttataatcagtcaagcaaaaaacacttattgaacatggatcatgtgccatgatttacactaggaactttaaaacacttgaatgaacttcccataactacaatatgaactagcttctatgctgtaccatgtgcttcgaaaacattcttttaacctgtacagctccagaacttctttgtagccactctaagaggctcagaaagtctagtcattttccaaaggccattcagctacagagcagacttgaagccaggacttgaaccctggctgaactgactccaatgcccagattctttctctgccttcctgagtagccacaggaaccgagaacacgaaggtgctgccaatctgccacaggtagtgtcatgtcctgccaagtccatgccgaagtcctaatctcccaggacctcagaatacgactgtgtttagagatggggcctttaaggagcccatgaagccttgtatgtggactctaatctaatatggctggcaaccttaatagaggagacagggacacagaaaaggcatctacaaggagagagcctcagaaaaaaaccaaccctgctgacatt

SEQ ID NO: 63319 - DNA, 922 bp, Bovine  19866881402516
  misc_feature (1)..(1): n is a, c, g, or t
nttgggtaataatgtcttttctcttagaaaagtgagataaagcatcctatggttctccttcaaggaaagtacttgctagtacaaatggattcactgcttcttctagttggaacatatttatttgcccatatcttccattctattgattcctctatctaacagtgacataaccatgaaaacagaagccaagagaaagaacagatcacagtgttggctgaattcccagacaggagcacacctctccatccactggtcggggcaagggggtgcatggccacaggcacactgagccacctcttgtctccacagacaagctctctgggtcacagagcaacagagattaggcctcccgtgcttacgactcctaaaactgactgaggttaacaaagcttcctatgaatgcccatgacagcatttttagatctgtgtggggcaaataatctcaaccatctttttaacccctaacgttccaatgcagaagatgaacaaatagatttgctcctcaaagcaccctttctgctttctaaatggtcttccattgcacagcatgaggagtgaagggaccaggagagctccgtgcggctgctggtggaacctctccacccggcataaggtctgactttcagcatcaggttatacatgtatcttgggaacattttcaaagcaagtcctcctgaccgcgtttcctgcatcctttatttattactccaacctgggcccttcctgctgggctggcctggccccaagctggaatgctgtaagtggaaggcctgatgcagtctgggcactgtgccaagtgaggaccactgatgctctgtctctttgagtaggaactaggctccttaactccctgctgccactgaagggttttattactcacttaaggtcaccccagaatcaggtcacacaaaaagggattcca

SEQ ID NO: 63320 - DNA, 1761 bp, Bovine  19866880110382
  misc_feature (1)..(1): n is a, c, g, or t
ngcatctggtcccatcacttctggcaaatagatggggaaacagtggaaacagtgtcagactttatttttggggggctccaaaatcactgcagatggtgactgcagccatgaaattaaaagacgcttactccttggaaggaaagttatgaccaacctagatagcatattcaaaagcagagacattactttgccaacaaaggttcgtcctagtcaaggctatggtttttcctgtggtcatgtatggatgtgagagttggactgtgaagaaggctgagtgccaaaaaattgatgcttttgaactgtggtgttggagaagactcttgagagtcccttggactgcaaggagatccacccagtccattctgaaggagatcagccctgggatttctttggaaggaatgatgctgaagctgaaactctagtactttggccacctcatgcgaagagctgactcattggaaaagactctgatgctgggagggattgggggcaggaggagaaggggacggcagaggatgagatggctggatggcatcactgactcgatggacgtgagtcttggtggaactccgggagttggtgatagagaaggaggcctggcatgctgagattcatggggtcgcaaagagtcagacccaactgagctactgaactgaactgaactgaactgtggtccatgtgatcagtttgattagttttccgtgattgtggatttcattctgtccacagtctgacagataagaggcttatggaagcttcctgatgggagagactgactgagggggaaactgggtctttttctgatgggtggggccatgttcagtaaatctttaatccactttcctgttgataggcagggctgtgttctgtccctgttgtttgaaactatggtggaggtaatgaagataatggtgacctccttcaaaaggttccatgcacacagtgctgcactcagtgcctctgaccctgcagcaggccaccgccaaccctcacctctgccagaaactcctggacatgcacaggcaagtctggctcagtctcttgcggggtcactgctcctttctcctgggtcctggtgcacactgccactgctgcttctaggagactctcctggagaggtgggagggtgtgtcagcaggagccatatttcagacctcattctagaagctggtgctggagacttgttagctcattggtggcaacacctggccacacttggccccacctgacatcctggaccaaatgcctcaggttagatgccttggcttctaattcactgctaaaagctactgagcacagcgtgcctgtttctggtcactgtgtccctagtttgtttgctttctgcacccaagtccctgttcccaccccttgcccatcctccaaatgactcttggcccctagcctctgtccccagagactggagtcccagcacaaaccaattcctctggccacagccctgctgtttgctaactggcatccccaaaactgatacagtctgggctttggggggaagaaaaggactcttctacatcttgattgttgatccttcaggcatctgggatatgtgggaagtcagttctctccctcacaggtgaagatgctgaggcctagacacaaacctaaggccacacagcttacaagtacagaatcaaatttcaaaccagacttggcaaggccaaagacagatctgtccgaccttaacactcacctgtacccactgtactttgtggttttcagactattccccaggaatttaaagtc

SEQ ID NO: 63321 - DNA, 1502 bp, Bovine  19866880384718
  misc_feature (1)..(1): n is a, c, g, or t
nctctcttagctgttgtttgtgacctttacttcgctaagctgggaggaattccccagtgctggagcgctggtgatgctgcattcactcatgactaatttgaattgggcgtcattgaatctgcctactccattattacacagcgagattgtcagctctacactctcagcctccttccaacacccactcactcccaaacatgcaaacactccaaattgggcagtggggaggtggcaaatgcttgcagtgtgagaaaggggctgggtttccttttgaatgaatgttaaagctttggttaaaaggagagcatgagcattgcattatcctccccacagacaggttcttaactgcctcctcaaatccacaaatgctgaagggaacagccccaccatcccctgagttctgaatgactgggaggacggagatgctgttctggtcactgggacaacagtctcagtatcaacccagcctgtgggcgacagctgtcaccctccccagagcaggcctgaggagcagtaggtaataaggctccagatcttcagtggacagtcatacctgcctgacctcagactcctggatggaccaagggagatggccagtctgtggaaggttggctgcgcccatccattgaggcaggtcccccagacagggttctgaggccaagccagagaacataccaagcctcagactccagtcatccctggaggggctaaactctcagagaactggaccacataaggagggccagaggccagaaagcaggaatgaggaggactttaagttccgcaaagtcagaaggcagtagggtgaggtaagggggtgaccacagtgggcactgccaggaagaggcacagaggtatgcccatggaggggctcctctaggacacacttcactgatgtgggttcatgccatgcccaagcatcctgggttagaccctggaccctgaatctggattcaaatcctggctccaacccacttactcaaggtgcagatggagtaaattctttttttcttaacattagcattttattttattttttaatataaatttatttattttaattggaggctaattactttacaatattgtattggttttgccatacatcaacatgaatctgccacagctgtacacatgttccccatcctgaatccccctcccacctccctccccataccatccctctgggtcatcccagtgcaccagccccaagcatcctgtatcatgcatcgagcctggtctggcaattcttaacatccctgttcttcagttacctcttctgaaatgaaaagaataatatttcctacagtctaagattttgtaaagattgaattaatatttttaaaacctctggaacaggcactacatttgttttagtaaataaaatttcttctttcagcttttaaccaagacaagaacagaagctgcaaggaacatgctcccatcagaccaaaagaggagagtagcaatgtaggtcaacttctttagtgattattgaactg

SEQ ID NO: 63322 - DNA, 1644 bp, Bovine  19866880387293
  misc_feature (1)..(1): n is a, c, g, or t
naaaaatcaattatcattcacatttgccttcacactctgacaaagacttgcattgagggcaactaaaaccaaagcacagtaacagtgtttgggagtccttggaaacttgtattcacaggcagctttgaataatgtggcatcacagggaacaatataaccagcattacataagatattaaggaacttcatagtcaagaaaatctatattgtttcaatgcaaacaggttcagaaaaaacctgtttttgaaaaacatttttaaaccattttaaatttaagtatgtataattaacctatcatgtgttaatttcaagtgtatagcaaaataattcagatatagatatagagatatatcatgtatatactttttcagattcttttccattataggttattataagatattgaatatggctccctgtactgttcagtaggtccttgtttatctgtgttatatacagtgctgggtatatgtgaattccaaactcttaatttatctctcccctcaccctattatctcctttagtaaccataaatttgtcttctgacaaatttgtgtttgtgagtctatttctgttttgtaaataagttcatttgtatcattttttagattccatatataagtgatgttataggataattgtctttctgcctgacttacttcacttaatatgataatctctgtatatataatgatatattccattgtatatacataccacatcttctttatccattcctctgtgatggccatttaggttgcttccatgtcttggctattgtaaacagtgctgcagtgaacattggagtacatgtatcttttcaaatcagaattttttccagatatattcctaggagtgggatatctagattatattgtaactctatttttaggtttttaaggaaacatcatactgttctccatagtggctgtttcaacttacattttcacttaacggtatagaagggttcctttttctccacactctctctagcatttattgtttgtagactttttgatgatggctactgatgccttctgtgagtatggtttcagtgtgtttgccctctgatgccctcttgcaacacttaccatcttacttgggtttctcttaccttgggcgtggggtatctcttcaaggctgctccagcaaagcgcagccattgctccttacctaggatgaggggtatctcctcaccactgcccttcctgaccttcaacgtgggatagctcctctaggccctcctgcgcccgcacagccactgaaaccatactcacagaaaactagtcaatctaatcacagtaggaccatagccttgtctaactaaatgaaactaagccatgcccgtggggcaacccaagatgggcgggtcatggtggagagatttgacagaatgtggtccactggagaaggtaacggcaaaccacttcagtattcttgccttgagaaccccatgaacagtatgaaaaggcaaaatgataggatactgaaagagaaactccccaggtcaataggagcccaatatgctactggagatcagtggagaaataacttcagaaagaatgaagggatacagtcaaagcaaaaagaatacccagctgggatggactggtgatagacgcaaggtccgatgctgtaaagagc

SEQ ID NO: 63323 - DNA, 1230 bp, Bovine  19866880403765
  misc_feature (1)..(1): n is a, c, g, or t
ntatggatgtacagttggactataaagatagttgagtgccgaagaattgatgcttttgaactgtggtgttggagaagactcttgagagtcccttggactgcaaggagatccaaccagtccatcttaaaggaaatcagtcctgaatattcattggaaggactgatgctgaagttgaaactccaatacttcggccacctgatgcgaagaactgactcattggaaaagaccttgatgctgggaaagattgaaggcaggaggagaaggggacgacaaaggacaaagtggttggatggcatcaccgtctcaatggacatgagtttgattaaactccgggagtgtccgatggacagggaggcctggcattctgcagtccatggggttgcaaagagtcagacacaaatgagcgactaaactgaactgaactgaagacgggtagttaaataatttttttaaatatttaaaaattggaacttgataagtgaaatttggaaaatactctacggatgacttcctttaagtaactgcacattgaacctaaatctggctgggaataaaaaggatttgtcctttatgaattcacatcaagcaggctgggaaggtgatcagaggggagggtggccttctggccctactgaattgtgcccatgaaccaaagcccccactgctgagaagtaaggctagccctatttcagcagcacaatgattgggagttctgccaagaatgaaacaactatcctgcagctgttatctcatttgtatgagtaatatgaaaaacgctgcacaatttaatatgccatctcgtgcttttattcttatctcaccaggagggcaggtggtagtatacatgtttgaaagccaatgcagattgatatgggggagggccccaagaaatgatgtgagctgctatctgagctgagtaaaatgatatgagcacagatattattttatataggcaatctcacttgtatctttgccggtgagatcttaatcacagcatgcaatgggaatggaaacctcccctcctagttatctgggtgtggggcgacagcattgtcatcactgggagaacggttatctgttatttcactcgtgagataccaataggaacagtatgagggtgtttgtaaccaaactgtgcagctctgagtgataaaagcaggaggaggaggctcatctccaggagcgtggagataatgcctcttgctcggggaggagatggatggtattgtt

SEQ ID NO: 63324 - DNA, 4565 bp, Bovine  19866880420556
  misc_feature (1)..(1): n is a, c, g, or t
ntgaagtgatgggaccgatgcctgatcttcgttttctgaatgttgagctttaggccaactttttcactctcctcttttactttcatcgagaggctttttagttcctcctcactttcttccatgatggtgatgtcatctgcatgtctgaggttattgatatttctcctggaaatcttgattccagcttgtgcttcttccagcctggcgtttctcatgatgtactctgcatataagttaaataagcagggtgacaatatatagtcttgatgtactccttttcctatttggaaccagtctgttgttccatgtccagttctaactgttgcttcctggcctgcatataggtttctcaagaggcagatcaggtggtctggtattcccatctcttgaagaattttccacagttgattgtgatccacacagtcaaaagctttggcatagtcaataaagcagaaatagatgtttttctggaactctcttgcttttttgatgatccagcggatgttggcaatttgatctctggttcctctgccttgaggaaaaatactaagtcccatctccttctccctctatcccaacacctaatttttcatactaggaaatgagacaaaatagttaagtgactttccccaaaccacacagctgacccatggttataccacgatttgaacccaggactgtcagatttcaagtgtataccacaatgctttccattttctgtgtgtactcaaacttcatgatcttgttcttcatgattttgttctgtatgttctctcaggacctttgggtttgattcttctgtttctgaatatctgacctcatatgatggaagcagctgttacttgagtagctcttatttcagtttatgtcattaagaccctcttgaccagtaagcatgtttccctggtggctcaaacgataaagaatctgcctgcaatgcaggagacctgggtttgatccctgggttgggaagatcccctggagaagaaaaatggcaacccaatacagtactggaagtgggatctaactgcttgctgctcaaaagcgaataaagagggggaggttagttgaaaggaaagcttgctttatttcagaggctggcaacctgggaggggagagggggaagggtaaactcatgtccaaaggccaattcctgcccctccagcccccacctgaccccactgacaaaaaggaggcaagagctttaataggtggagtgaggggactacatgcagaaacagcacagtcattctgacagtcatcttgaaattggttatgcggtggttattttgatcagcttcactttgttttaagtactgttaatcttctgttccatggtcagttcattatcattttttgaggctaattcttggaattgcagcagtttatgtcaaggctacaatctggtcatcatgtagttaacttcttccacctggtggggatctcagtatctacaagacacctcgaaggattgtatttgtttagtgataaaactgtttggtcttgtttgactattttcctttgcttctgcattttctcacttctctgattgggcttattctttgactgaaatttttctatagacaaaggcgggtggaggatatggagatagggaagaagtatagcgtcctgctctgtttcaagtacatcctctggtgctcacggcagaccagggctgctgaatgcatgctgctctgggggaggtggtgcccaaaaggcttgtgtctgcaaagcctggggtcaagaccacagcagaggcactgagagggctgtggcccccagaagcctacaccatcctctgcagctgatgctgtgggctccaggggccttcccatgcttccttcagcctggaacacccttctttttccttctctgaggaaggttcatgtcaagagccattgcagctcagttaacgcctcatgagggcttttcctctaactgagccagtgagtgaaatgatcacagctctcctctaagtgggtgaaacagagtttcaaatttctcagctgtttccagaaccctagcatattttactgctgggaggacagatgcctgctcaagtgtctgatgaaaacacttaacttttatcgttgtttgacattcattagggaaccgtcttctgtaggcaaaatacaagacaattctttaggcaagagacataaaagggctaatggtgggtcataggccagatggtatggaaacaagatgagctgagccctggagccacaccagctttgtcctccactgcctcggagaaatgagtgggtgtggagaagagagaaagaaatgactccagggcaccggtgagggtgccattgagcaaacatggaggcccatatgtggggaggtgggtcacacagtcccctttcccagctgagatttgaagaaacagttgttgaattaatgatcaggaaatgaggaccagtgtttattggagcccaaagctatgtctgcaaattccttgggttctcacagtaaacctgaagaatgcagctagttccagatcctgggatagggagatgagggtgagataaatgaaattgaccaaagacacatggttcattagtggtgctgctggagttcaaacccagatctacctgggtgtcaagtccccttttattaatatttccctacacttcaagaatcctgaaaccaaatacttattttttacctccaaagaaagagcagaaaggggatgagggagggaaatcaacaagcgagggctatagggtaaggaagtaaagtctgaaatctccctcactttgctataggcatctcaagactcttctgttactgtttcctagctgactcttgaggtgcagatggaggactaatgggagtttgtgatggcagagcattggctcagcgtccagggagcagtgcctcctccacaactgcccctcagaggaaggaagaagaaatgattgacttgccacagggtatttttaaattagatatatagatgggaggctttactgtgaagacttcttcctgattaaatgtttctggttcctttgatcacatctcctcagaaagtttctcttgctttccccaatgaggtcacggaatttcacaaaaggaaagtccctattaatcagcctaatgtaatttgggggcaatctggcttgaaagtggggtcatctctgcaaatttctccagatgtacatatgcagagatgccaacattttctgtaccgaaccaagtattctctaactatttagcttagttactgctgcctacttatatattttaaaaatttatttaaaaaattttaatggagtataattgctttatgatgtgctagtttctgctgtacaacaaagtgaatcagctatatatatatatatatatatatatatacacacacacacacacacacacacacacatatcccctccctcttgagcctccttcccaccctcctatcctacccctctaggtcatcacaaagcactgaactgagctccttttaacctgaattttcttttccttccccaaccccagtgccttctttcctatcaacccaactatatgttcttaaaggaaaggaatctccctcttgcttggaaattcatctcaagttgctggggctgggctatttccttgattgtgaagtagtgaaggaaagcatccccttggcccccttctagggagagggctgccatatactaagactgattaaactccatctggtgggtatgttctgatgagtttttcctcgaggaagttttaagttgataccagttgtgggtttcccatgttttaggggtccaagcaatctaaaatgtgggagtcacctactgctctctgtccataaagccatgctgtcaattgaaggaactaagcaaagcagatgcatgtgaactcacaatctcagcatggtttcattttaatgctagctgtcctatttggagcaagagtaattagaaaatcagcagcaagttaggggaaaaaaatgctgaggtttataatgacctgggcagggagagagaatctgggatccatttactgaaggtctcattaaattctccaccaggagagtcaagctgctactgcagaactgtggaagaagcagtggaggcagctgtgaaggaaggaggccaggaatggggctgggggccacgttcaccttgtcctgaagcctggggctctctgtgctttttgcgtcctactaactgtcacctccatgttgtgcttggtcagagggtctccaggtcagtgttctcacatagtctctctccttctgtccagccctccccttcctttcctcattgatcactccatgtagcgccccaaccccgaccctgactcatttctctctctccctcctccttggctgtggctgggtttatgtgtgcgtgttgggtttgaacatttgtaactctcaagcagtcatcagggatgcaatgccctttccacatgtatctagtggtaggttgaattgtgcccccgtcctctaaagagatatgttgaaatcctaaccccccaaaccccaccttttgggaaataatcattgcaaatgtaatgtaaggattaaatcacactcagtcagagtgggctctaat

SEQ ID NO: 63325 - DNA, 2068 bp, Bovine  19866880442266
  misc_feature (1)..(1): n is a, c, g, or t
ngaggtctggcgtgctgcgattcatggggttgcaaagagtcggacacagctgagcgactgatctgatctgatctgatctgttctgatatttacacagatgttaagaaaaagagagaaaagaaagctggggagagagacacagagaaacatttctaaaaatgagaagattctatgaatgctatttataaatttaattttttttcttgaatttaacagaagataaagaaattaagggtttcccagggagctcagtggtaaagaatccacctgccaatgcaagagaagcaagctcaattcctgagtcaggaagaacccctggagaaagaaatggcaacccactccagtgttcttgcctggaaaatcccatggacagagaagcctagaagtttacagtccataaagtcacaaagagttggacatgacttagtgactaaacaacaaagaaactgaaggaaatttgactcatagtacattaaatgtttcattaacttaaaaattaaggttaaagaaaaattttaaatgttatgagaaccatggcaagttgtagttacattttttaactagaattttaaatagtattgactaacttgctgcttcaagtagcatggaggtgataatactctcatacttcctcccactcctctacccttcaatgtctactgattaggctggttcattttgccagagttataatagtagcattctatgctgcaaccacactttgctgagaaaaaaaatagttttttattcaaatgaattcattgctcaccactaacccttttttatagctttgtcaaacctgatctcattgccaaagagctctggtttatgtaagcgggtcatatttaagactgctgtctgttgccttcttacgtgggcaactgcttggctgcatatagttttcttagtcttactttccaaacctcagaactttataaacagtgtgccatcatctttgaacataggaagttatcatagaatatagcaggatagactcatttttcccactgtcaggaattgctttgtgcctacatgtctgaggaatgccttctttattctttaaattcaatcatttaacctagaaaaatcagtcattctctctctctttttttttttttttttcatttggggggtacccttccacatgtgggtttgcaagtttgaatattctctgaattcttcctctttgtaggattctctattacaagaacacccattaccttattttgaatcacttttgtttcacttcctcttccttctaactattaattctttttttttcttcttcctctatattcaatgggattatctctagctttcacttcataccattaattcagtttttagctctgtctattctgttctttgctattttatgttgtaaaaagtgaaaacgttaatagctcagtcatgtccagctctttgcaaccccatggactgtagtctgccagactcccccatccatggaattccccaggccagaaaactggatcaggaagccattcccatcttcaggggatcactctgtttaattcatttccttcagttcagttcagttcagtcgctcagttgtgtccgtctctttgagaccccatgaattgcagcacgccaggcctccctgtccatcaccaactcccagagttcacccaaactcacatccatcgagtcagtgatgccatccagccatctcatcttctgtcgtccccttctcctcctgccctcaatccctcccagtatcagagtcttttccaatgagtcaactctttgtatgaggtggccaaagtactggagtttcagctttagcatcagtccttccttaggtctgcaatatccttttatagctcatcctgttgtattaccatctcatctttcagattttgttctttcacatttataaccctactaatttattctccacaaagagtgtccacaaagagtcagacacgactgagcaactaaactgaactgaatttattctctaatgaaaacgttggtgaggaagccacttctgccacctgattcgtgtttcttccagactgggctcttcatctgactttttgactaattg

SEQ ID NO: 63326 - DNA, 1370 bp, Bovine  19866880503878
  misc_feature (1)..(1): n is a, c, g, or t
ncagaagcaccactccctcactttacttctaactcattggccagaattctgtcatgggtaagcagaatgtaattaacaaggtcaattcatacgaagagagatttacctcctgggactgagatgaggtccagtaggtgacagctgggtacctaaacaaaatcggttctgtcataaggcaaggaatgcactttcaagcagtccaagccagggaagaaagccagagaaagatggtactccctattggagcatggctccttctataaagtcactacagaggaacaaaaccctttctgaaatgttccttcagggcagaaaccagggtggaaactgattcttcacaagcccgtcccttggacactgtcccaggtactgtatgatttgaggtactgtatgatttctcagtcatctagaaagactcagtccctgggttcttccaggatccatcatttcaagtcaaaatgtctgagagcttttaagggcaagcatacagtatattttgctccacaattgaaagtaaagattcagtagtttcagagacagttcttattcaggcctgaactcattcttccgcacgtctttcagagccattaaatcctcagtgatgaggcactggatgataactgctttccctggatgctatctgacgtcactggtaagagcaatcctgcacttccaagcactctcttcattactctgatagacatcatatttaagactaattcattaggatgatatttcatattacattagagaatgcactatataatccgaatgtgaaggtgaagaaaatttctcctcctctctcttacctgctactgcaaaatgaaagggcgccatcgacctgtaaaaggcaacgacctcattcactttaataacctctaccctttgcccgtggtgtgtgcactctcaaccaaggcagaagaatttatgggaccacttgggttctagtccaccatcacctttagcaatcttaattaatctctgaggtaatcattcccatttcttaaaaatgggccaagttaattggcatgaagttcactttaaaattctgtctcccttcagatgctctacaagtttctgaaaagagccccttagcatgaaaatgaagagctgaggtttcccagctggtggagatttgcaaaggactctaaaaggtgatacatacttagatttattttctttagttttaggttggtacaactttaagagactaaggattgtttagagtggggaagggtgccatggagccagccatccgcacctctgctggtcagatagatggaaaagagttgtggttgacatggcacaatgccaagagcaccagaaaatccttccaaattctgtctgctctaaaatgcaacaactgtctt

SEQ ID NO: 63327 - DNA, 1644 bp, Bovine  19866880739044
  misc_feature (1)..(1): n is a, c, g, or t
ntttcatgggtatgcaagacgatggcaaaagttaattcggggtaaacatgagctaatcatcactgaccaactaggaaaaatacaatttacaaaacacggaggatgccttcctgcttcatttaatcagagtgcaaaagaacccctccccagccccgttgaattttgctggattattgttatcaaccaatgtggattaaaggatgaagcagggattgatcattgtctcctctgtgtctcaggcctgtacatgtgaaccgtcccagacacttagctcatcttgggtcatcagtcaggtcattcacactcctagaagcagatctctgattaactgctgccctgtggtgctcccacaagctcagcctggatgcttggcaggcccacaactaacccatggtgggtttggagattaaatccttcctgcccaactgcctatcaataacctgtatgtcctattcagctctggatccacacaggtttcctgaaagctctgcaagagaagaggccacatgctcaagacagctcttctacaggcattcagggccatgtttgggatagttgtcctgaggtcatgacctggacatgagatgatagaacttaggagttggccagagcaggagagatcatcatcatgatctctggcaggctttgtttaggataatgaccaggaaggacagagacaaagactggcagggaaagcatcactatggcagagctctgggtgcctgaggttacagatacctagaaaagctcggaacagaattttctctgacagctctcagggacctctgctacctctaaatcaatgctttccaaccctaaacactcactttcattaatctgattttgggttggtggggttttgtttttgcatttaaaataacatatataagcacatatgaagtgactttatcatggagccacttttcttgggtgaataagatagtcttgacagaaagtttgcttctctaacacctggcacttgccatcttgtgtcatccttaccccgtcttcatggtgctagttaatttgtgtttccaaccagtatggacactacagggttgaacacaatcctgtgtgtggtgtctactgggaaatgccccatgagggttggttctctctgaggggggtctatgctgtgagccagcctagaggaggcaagtagaaccctcatcctggagtcatgagtggctaaaattttgggtgtctgaacatatggttcaggacctcaaagagagccctgtgatcctccattcctagatcccacccagaaagttaatagtcatgatacctctggctccatctcactcatctaaggctggccaggatgagataatgccttggacaggactgctcctcacttccctctaatttctcctttctaaacactttttatatccatagattttcttccccaccctttccaggtatgggatcatctatcaaaagtggccaccaggaaatgatgtgtattagcaatgtatacttcagtgaggactattctactggtgtttctgaaacacagggtttcaaaaataactataggttatcactcaaaattattttagatgctatgcagaaaacattaataattatatattttaataccaattagaaataatgaaataaaaccagcataacaaactt

SEQ ID NO: 63328 - DNA, 1546 bp, Bovine  19866880781239
  misc_feature (1)..(1): n is a, c, g, or t
ncccttagtgaaggtctctcgtgtggttgagagagagcgtgtgtgcccatggggcatctcccccacctccccaggtgcggcgggaggtgcagatcacgtgattactgcaggcaagattaaagaggtgggaagggataaaagagggcagttgctgcctcgagagactcccatcgaggaattatctccgagtcttctctccccccaattcttcctgaaaactgagcacacatcttgcatcctccaagggccccaagagcagttccgttctgacggcaggaggctgcccttgtccaaggacacaggcagcttctgaggggtgaacacctgccttccgggcggagcagcagcagagtagatggtggaaaatcagcatgaggagcggaagcccacccctctcctcgggaggctccctcacgagaccgtcttgtatgaaccggtgaggggtgactggggttttggacctgcgctgtctgtactcgtgcctttgtggtgtggaattaggggcaagcggccttcaggttcacatttgtaaaaggtctcaaatgtagacgtgtgctgttacttccaagtgaggctaagtggacaagtatgactcttgtgtgtgtgtgtgtgtttcttgttttctttttgacacaaaggagtctacttgttaaatgtaaccctttaaaatagaccacatatttacaactctgttttggcatttacaatcaaccagtacctttcagaagtggcccgtgcccaccacccctgtctacctctgaaagcctagtttaacttctccccacacatgcctggcaccttgcagtagattgctaatccatagatgctgccacgcattgataaatggctggtcaggcccaaacccacacatttgtgtttagtgcactactgagtcagtaccactggccttggggaagaaaaaaggaaataaagccaaggcatatgggtttaggatggagtttagtactggatttgcactttctgacttggctgcccgatctatttcccactggcctttagaagcgtgctggattgaattgcatttcccattgcaaattttaaataaggtggatgatacagaaggcattactatccacagtcccctgagtatagctgcaaatatgcttttaaacctcagagcaatttccccagtcatcaccaagcaataattgctgttaaaaagaatatacacccacacacacacacacacaatccttatagctcagcaatggggaatatcgattgctgtcaatttttaatgcaaaaaataattaaagacttagctgttcaaaatatttacaaacagatttactgcaagtatttatcttcaagcaagcaagatctagagataattccttgggacagtagctgattaacacacattttgtttcaacagtaaaagtttctgagcctcatattagaagatgtatggaggatagactttccccagtcactgaagttagctaagttggagaagggtgattctccgcaaaatgacagaggattcctggattcttccaaatgacatcagagagtgaggcagcat

SEQ ID NO: 63329 - DNA, 843 bp, Bovine  19866880783429
  misc_feature (1)..(1): n is a, c, g, or t
ntgattagcttgcaagttccagctggatttgggttgtgaaggtgacaccttctgctggtgggaatgctgaggccattaagcatgcacagcacatctccccaaccataacagtcaggctccacgcctccaaatgtaggtcggtggtgaaaaaaacaaaaaaacaaacctttattttacatttcaaagtgctgttgggggagaaaggctggcctactgcttggaagtgagttaatctggcaggagccaacttttaaagaccaggatgtatctttttgatagaaaggacaagggaaaatctggagtgacagacatcaagctcagtcagccggaacagtgactgctaacagagtgcccccaggcctgcagcgctttgatgacaatcgacagtataatcttttcacgtgggaacagataagtgaaggttagaaccacaacttgtaagagttaagagaccccctggttcgctcccaggatcgacaacagaaactccaggctctgagaaaagatgcttgtctggagtcactcagggcatcggtggcagcaattgaattagaacccggggttcctcttgttcagcttgggcttgtgccatcatgccaccttgcagctccctggaacaggggacccagaatgcaaataggaactaggcattttctcacttccaatgtgacaagttttcagatttgaacctctttttaatcccatcccacccctcttccattggtgggaggatgagctgttagttaaaataggatgccttacagttggtctggtgagctttgagtgcttagagaaacaccaaaccattttcctgccacatagctaaaatgacctctgtttgta

SEQ ID NO: 63330 - DNA, 793 bp, Bovine  19866880942731
  misc_feature (1)..(1): n is a, c, g, or t
nccgcttccctgcattgctctaatgctgttttttctaaagaaatgttaatgttgctaatcaaaaccatgtggagcgactttttttttttccttactgttgctaaaagcaaacattttggaagaatgaaattctacattaatttaagaatgggtgcagggcataagcctggtagattccaatttctcaaatcagaagagccctccagtgaggactagaacaggctgtagagttctgcagatctgaaatcagatcttgacactgcagcttgctggctatgttgcctgagtaggtcatgtaagcctctcaatctcagtttcatcccatttaaaaagaattaatagacctaagtagatctcactaatcgtgaggaatgcttgtgataatgtgtgtcaagaaccctgtttcagggacagtcacagggtggggttcaactgggactgacactttcacctcctctttcagacaccatctggttcactcgctgcccctctctgataaatctttacaaaggaggctccagtttcagaatagcttcaggtaggagatttgctgagcactcttggtcacccagcccactgtcattagcatccctaattttctagctttcactaaagcactaagctcaatggggagcctcacagctgaatgaacaggcaatgctgggccagggagccaagacagccagagagaaaccgaaaaggttggttaagaagacccttgagaaaaacaggagatactgaaaccactcagcctgaaaccttcaggccggcttaaaggatttattaacagtcc

SEQ ID NO: 63331 - DNA, 1027 bp, Bovine  19866881001110
  misc_feature (1)..(1): n is a, c, g, or t
nagaagctgggaaagcccatttctggcttctctcttggagaggcatagattcagaggtgagaaattctccaaaaataggaaagggtgtccaagagggctgggtgcccaagtggcttgacagctatcctacaagtagcttgactacatctgttacagtgttagaaacaccttgcatccaagaaatcctccctagaggctaaccaaactcccacttgctgcagagccctatttaaccagagtcctctgtatgttgtcttcagtggaattctacaagagcttgccatcaccttccaaatgtttgaacactgactaagtcccccgcagtttcctcttatgctggttaagacgctacaatcattttctccttctcttccttatgactcctcggtgctttagttgcctctaaaaccatcctctcaaatattcagacctctctccaatgctctaaaagtttcattccttgttctgttctccacttaattacacaacttgtcttattttctctcttcttgctgtctcccaagttcagaccctgagctacctgctccaattaacagcatctcatgttcctcaggctcatccagtgctgcaaggatatgctgtcctgtggctgaaacacaaaggaattttgctgtgacattctggtattatggggtgtccagagctaaaagctcagcagcccacctaccctcttgtcattgcatagcaaaaatgcatgcccagctcagaggtcactagcataattgaggctcaaagacgcaagtgggcacactactgctatagaactgaactctcccccacagacttagactagctgtgtgacctcaggcaaagcactctacatttctgaccttcagactcctcatctgagatgcttagataataatagtatttgccttacagaattgttgagagggttaaatgggggtgaagtatctaaagtacatgcagtaagtattcaatatatgcaacctcatagagatgacttggagacccaaagtgaccatgggtgtaaaaacactttgaa

SEQ ID NO: 63332 - DNA, 1826 bp, Bovine  19866881017181
  misc_feature (1)..(1): n is a, c, g, or t
ngatctgggtgtaggaataggcatcagtagttaaaaggatctcaggagaatcagtgtatgtgcagcaaagtacagccccatgtgtccccagtcggataggcgggagaatacggagccagcagtcaggaaagcaggcttcagttcccgcttcgtcactcctgacagcccagtctccaggtactaacaccatcgcctttctgaatctctgaatggaaggggtagaactagacacagatttcccaaactgcaggtccacaaaaccctgccttctgaaatacagttccatggtatttaataattttccatgggcttctttatctcaggatttttcatggcctttacagtgctaatatgtgaagtgaatctccaggagagtgataaagtactcagtacttcctaaatttatttgaccatgggaccttttttccaaggagaacctattaacatttcccagaacgggtgctgctcagaacattcttgggaaaatgatggactgcacgggtctttaagaccctttctggctctcatcttatttgaataattttagtttgtgtattcctccacactcctgtgggggctgcagttggaaaataatttgtgggggctggaaacgtctgcttatttataagcgctatctaaggatgaagacaggctccaggcacataggcgactgctgctgaatcagtgctctgcctcttcctgctctgatgtttaaagtgctggctggctgtgttctttccatctggttgctctctttgatgggctgagtttaaaaacttaaacggaggagaggctctcggtgattaggcaaatgacatatggcagtggtttggaggaactctcatttgggacctggaataaatctcagcctccccacctcacccctacatcattcccaggctcttccctgccaggcctggttctatcccgagatggggctctgaggatgaggccagacccacatcacgagagacagcaacgagggagccttgaccttcaccctcaggcaggacagagacgatgcccaccacttactctgatgtcatctgggtgaccagctggagggacgtgaagccggcagtgaggaagctgtcccctgtactggaccatcttgatggcgctgagccagtcatccacggtggtgaaggctgtgaagtctgggatggagcggtcgagtaggggctgggaaggcctgcgagacagacagaggggagcagtgaccctacagctgcagggggtcatgggcagaccacactctgggcggacggtggacttcatggcggtttggcgcccctggtgggataaggattatggaggaaaccggggctgacccttccttctctacacagttctgagctggcacagctcctcaaggccaggtggcccatcccccctgtccctgggctctgtcccatgccagtcagcccggaccagcagactgacacagcgtggagtctgaagggaagagaaggatcccactcctttgtaaactgaaatctaagagcttcaccaaccaaagatatggttcttttacaaatatatgaagttcactgtagcctccacaatgtcagcaacattctttcctccttgttccgtcctctactgactgaaagaaatggaatacagcagcccactgctgaccttctctcgcatactctcagagcagacccccaggtaccacccccagaaatcaaggtgccatcttcacatcacccttaccttcagcatccacacccaacccttcaccaagtcataaagattttactttcaaaacctctcaagctcacttgcttctttctacacaattagcctattcaagacgctat

SEQ ID NO: 63333 - DNA, 1160 bp, Bovine  19866881146918
  misc_feature (1)..(1): n is a, c, g, or t
ngataaaaagcctcatgtattcaccaacttgcaaatttttgcctctctcaaaagtttttaaagctcctctctcctagttttttttttttttaatttatttatttttaacggaaggataattgctttacagtattgcattggtttcagatatcaacataaatcagccatagctctctccttgttttaatttttatatccctggggttgagcacatttcctcaatttttgaccatttttacttcttttttttctatttggatggcataacaaagactgctggttacctcctatgacccattcttcctttatctttagtaataggaaccccagcttttacataggtgcattgctgccagcatccagaagattacatttctgggcttccttggagctaagtataactatgtgagttttagctaagaatacataagcagaagggctcgatgtaactttctgaagcctctttcaagagagaaggcactccctcatcccttcacccaatctgtatattggaacacagaagtaataactggagctctaacagccatcctagaggaccgtgagctcaatgagccagaaaatcggggtttctgagcatttggtggagctgctgcaccagacctcaacttctttcccataagagagaaatttaacttctgttttgtttaaacattctctctctcttttttttttctgttatatacaatgtagaaaatgctttttatttatttacaggagttctttgggttctagatactcaatctttatttatgaaaattgtacattttcttccaatctgtaagtcctctcccattgtcagtttttagttttggggtcaaattttcctatctttgcttttatggctttttgatttgaattttttttttttgctaagtttttttttttaactaactttttaatggatgtctttcctgtcctgaagataaaaacatagtaatcttacattttcgtatatgttcttataacatttaggtctttaattcatctgaaatttatttttgtgaatagtgtaagggaaaaatcttgttggctattcatttgaataatttttctagtaagtggcatgtcagattactaattaataatttatctatatatgtatagatggttttagtactctatttgttccatgatcttca

SEQ ID NO: 63334 - DNA, 1790 bp, Bovine  19866881190204
  misc_feature (1)..(1): n is a, c, g, or t
ngaacatctgatgtggtttggtgaagacgcacataagataacatactagcacacaccacgtgtcaaaccccgcactctcctgcctcactgaagctgccactgcagcttctcctggctgccttggccccagtctgctctccatctgccctctcctccctgaaagagaggaaatgacagaaaaacctctccatctcccctcgaatcacagaatcatagcattttaaggctaagaggatactttggagggccttcacgctattttacagataacaaaatgttcctatgaattcaaactatgctaagaaaaatgggacagtgagacccatataggtgggttatgtaaccaatgtgtgaggcaggaataatgtccagattcttgcctgggaaatcccatgcacagagtaccctggaggggtcacaaagagtcggacaccacttaacgactaagcaacaacaaatccataatgatggataaatcttccccagaatgtttttctgtgtgatgctgaccctaacttcccacaacctctgtggatgtaaacaggttttaggactcagaaactgagcagatctgagactctggcgtgagctgagatgaaaaattaccggagttgctggagcacattcacttactttaatctgcccaattccatgtggtcaccgttaggcctggactactgtgagggcaatgaacttgaaggacagtctcagagccttctctcagagcaccgagctcctcaggtggcttcaccagttttacccccattgctctgcctgccctagactttatctgccccttcaggacaaagatcagggaggaaatggccagcatcttcagccccatcagccctggcaacagagagatggctgaacagagccccagggccacctgcccatggctccagctcttcacaaaatcagcccaaaaacagtagagaaaaactccttgaaaccaaagtgtgtaggtatttctgactgtggatatcaatcacctactatggacattaagctgaataaaagcacaaatgaaaacagcaatgatttttgaataaatattaaatatgtagcttctgatttcagattgatatttcacagtggcagggctcaaacaccccagagctaataaagacacatcgtgctttcattagaacagatattaggatgaaagtaccgcttcgacacatctttatacagtgaaatatagtatgagcagttctttcattagggatgggaaaatcaaattttaaaaccaatgtctactttagaagtttttatactgatcatcaattcagcactcatttccaatattaataactcagctaagcacctggcaggaggcttttctctgctgagttaataaattttttctgtgagccttcatttgattgattacctcatcataagggtgaccacataagttgtcctggaaatatgattctctgaaacaacagttaaagaacaaagaattactgagaataacaagttctatttaaaattttttatgactatgctaagaaaagtggaatcaaaatagatataggagaagtgagattgttgacaaaatttaaaccaaaaaaaaaaaaaaaaaaagaaaggctttttgcatcatatatatgcacttttgggggaatagtttaaccttaaaaattcctaaagggttttcttatccagctggaaaaataattaaaataaatgaatatcggcagcaaagtcaaaggtaaagtagatcaactttgttttccactcaaacctatgggtttgaggctgaaaatgacgccagggatcagctt

SEQ ID NO: 63335 - DNA, 997 bp, Bovine  19866881199653
  misc_feature (1)..(1): n is a, c, g, or t
ntgagcccaccaagccccttcccttccctacacctactgagcagagagcatgggtgacgtttagacccaggataaaatctccagaaggggagaaacaacccaaggaggcaacacagagctagaactaacccccagacatccaaagaacaaagaaaggaaaaaaataggatgactgattcacgcatttgtccctagaataaactctgagcatagctgtctgaagcaggaagagtcctgacccaggaaacttagatggacagttaggccagaatagtagagaaatgactccagaagacttacactcctggaggggttagcccccatcccagaaagcaagctactagtttgcaattccttcccttcacttcccagcctgcaccaccttcctccccgccccccaaagtcacccaagacagctggagtcagcacttatgtactcaggcaaacaggagtttcaaattcaagtgcaaacaatagttaagaatgtccaaacatttaaggaaaacagacatcattaaaaagaagaaccaaagtcaacaaataaaatagctaatgtctatgggaaggaagaaataactttaaaataagtgtaattaatattcagatgtgagatgctggtacaccatcaattaacaatgagtgttgtgaaataaaactaattaggattccatgatcaccaactagtttaggaaaatttaccagatgtgctgaatagcagcatgaaagtgaaagctgctcagttatgtctgactctttgagaccctatggacagtatagtccatggaattctccgggccagaatactggagtgggtagcctttcccttctccagaggatcttcccaacccagggatcaaacccaggtctcctgcattacaggtggattctttaccagctgagtcacaagggaagcccaagtagcagcatgggcacagataaagacagaattcagaatcagagagttaaaaaagagaaaaaaaaaataaagaggaggaaa

SEQ ID NO: 63336 - DNA, 953 bp, Bovine  19866881297934
  misc_feature (1)..(1): n is a, c, g, or t
nttcatgggatgctttaggctatatacagtttccatcttgaacccctgaaaaactttatttctgagattttttaggtcatttgttacacagtattattgccacaataactaattgatacatggtgcttgataaatattgctggattgctttccaaaaatattgtacttatatttatactgtaccaagcttgccaaactgaacattatttttatttaacttatttaattgaaatgtaattgctgtacatcactgtataaatttaaggtgtgcagcataatgtatttctgtttttaacttctaaaattttaataagcttagtcatatttttgttattgtgttgtttttcagaaacatttctaaacttcccaggcacctgtgagccatgctggcaagaagcattaatgggtctcatttcccttctggtgggtgcaccagagggaaccctgcttggcagctggttgtagaagaagccaaaattaaagttgacagcaaatcatgaaaccgctgggatggtgtcctatttaaagagatcaccttgtttccaaacattcatttatttcctttctgactcttaatcctccatttgcaatcttgtattttcagattactcctatttatcatgtgctgggcatggtataagccatattaggcattgcacccataagaagcaaatttgcttctgtgccgttgcaaccctcttgtttctagttgctatttgccccattgtcagctggctctgaattcacattctggccctgggcactgtgttgctccctgcatttctcctagcctactaagaatttgagggcttttactcaaacacatctcacctagcacattgaaatacagcagcagcagcaagtaagttttctggtgagtgagtgaggtgggtgagggggcaagtgatcttttctcatttctggactcaggtcctacatgtcaatctgtttta

SEQ ID NO: 63337 - DNA, 1033 bp, Bovine  19866881345772
  misc_feature (1)..(1): n is a, c, g, or t
ntgctaagtggcctctggtccgctcttctttgtattcatcatgtctatgtctaatgctcaagggaggctccaaatcctgagtgagaacacgctcaaggagctagagttcaggaagaggttgttgtttttttttattttcccccaaacccagtgaaccaaatccactggctggagtcagaacagtctctatgcccaattccatcaagcattgccctgtgggctatcggtttcctcaacaggagtcaggcagataagaaagagttcctgggaggtggacaggactgctttggggattctccaggcagtgcctagtatattatgggtcctcagttaatattcattgaagtttcattgaggtttgatgagatggatgaaccatacaatatgtcaataaagttaagtattaccctaaccacattcttaaagttattaaaaatgtcaagagcagggtgatttatttgctcattctatggaagtattgcaaagacagtatgtataaaaacgttcagtgcttaaatgataatgatttatctttctggctccatctcaaacttagtgtcagtgactgtttctgatgttgcttgtctcttctaggtctttggcctttcgacaccgtttttggctctaagagggatgggagattgtaggacaggctggaggttcaggggctgatgcaaattccttccccagccgtctcccatctgtggatgatgccaagcagctgcctcagggtgacctttcacatttgacatcatggcccctgagtacataataggcacttcagcagggggataacaaagctctggcctggatccgacacctgaaaaatgtggttcctgctctgacaaagcgtgtctccctagagaattataagcaatagcaactgtgggtagttcaggaaggagtgagaatcagagttacttgctttgggagaatgtgttcacgttgtatcacttgcattcgacttgcagcacagcctgctgaagagtaaagcccctggcagtgccagcctttaggatttgtcatcctgggt

SEQ ID NO: 63338 - DNA, 755 bp, Bovine  19866881399311
  misc_feature (1)..(1): n is a, c, g, or t
ngtttgctttataagtgattgaatccttacccttgttatatactttcccttgatcttcattgtctgcaaatattgtgctaaatttcccgaacagcagaactacaccctccatgtacttcttgtttcagagtttttttaaaaaaaaccttttgcttgtctttagttttttttttccccccacaagttttggcttgttcttggctttagcctttctgacacccttctcgtggatatgacaggcctgggccagcaatttgttcttcccattgcacgtcatatctgtgggattatatttacctcattgtgcaaagatgttgaatacattttgtttttttttcgctgattctgcaccttacagacttgatctcaatgtctatggacactgcttctaactcatttactggatgcttccacatgaatttcatattcattttgtgctgtagtggttactgccatgacacctggtttcatggtgttattagaccaatttctccccactccttccaattttgggtaaaacctctcaattagataggtgtttcctgtcaaacaggtcttcccagatttagtgcaaaatctctgccagaagctctggtatcaaaaaccgccatctagaaaactaaagcctgatacttaataccaggattagccaatacttcaattttcactcctcattattcttcactaggggcaacctttaaaatacaaggcaacatgattatgaccactgcccacctctacctttagccttccat

SEQ ID NO: 63339 - DNA, 1012 bp, Bovine  19866881403502
  misc_feature (1)..(1): n is a, c, g, or t
ntcctgctgcctgccactcatgcccctcattaggtccttagcgtctgctgctcttttccttgaccctcgcatctactgataccaggccctgataccagatacaatgaccaagaagccctggttcctccaatgtaattttatcttaaagcacttatatttaagacacatttaagtgtatcaagggaggtgagtgttgggccttctctggtattccagaggctacgactctgtggtcccaatgcagcaggcctggattggaaccctggtcagggaactagaccccataggcagcaaataagagttcacgggctgcaattaaagagcccgctgctgcaatgaggactgccgatcccacaggccacagctaagacttggtgcggccacataaacagactgttctaagagtgggcggagggggagtaataagtgccaaagggagcaccgctggtgaccacacaggtgcataagaagcccagcaaggagctggatctcatcaggaagcgggggcaaaactccagcgggacgacaaaaagaccaagaaaactgggacagggatgggatgcggagcccaaacatcatagccggaaagaggctgaatccacacctggaatgctttgggaacagggaaggaaggtgccggagatggctggaatgccagagagaggctgttggcaggcctggtggagagtgtggtgtgtgagcagtgctgtgctccagactgaagaaggagacattcagccacacagccaacagtctgacacaccagaatccctattcagcaatactgattccagaaacactgaataagttcattgatattttattggaggctgaaacttttcactttaattagattaattctctaggtttactacatttttaatgtgtttttattatgccttggggtcatttcccccataggaatgattctagttttataatttaaaaatgaatcaacattctgaatttaaaatatggatttttttcagatttaactttcctgggtcaaagt

SEQ ID NO: 63340 - DNA, 966 bp, Bovine  19866881413222
  misc_feature (1)..(1): n is a, c, g, or t
naatcagctaagaattatcaataaaacagttgaactaaataaagtgtataatctctaatgaagatgcaagaagtaatatcaagaatagaaaaagtgaacggtcaagagttaatacttaaatagggcttacctgagattcagggctacagcccccaggacttttcccagacacttgaacaaattaaacacttcagtgagtatgctttaactggctggataaaaggatgcatgcactgatacacaggtttcaaacaagccttaaataaatacatctccaatccaaaaactaaccaaaggccaatgtgaaagcattagtgatcaaaaattaaactcttacagatatagcccatatgctattagtagtttacatttcactcatctgtaaaatgaaatatatttttcagtttattcacagagtgattaaattgctttcaaagaaatttctgatcttcaagtgccaaccaaagaactcttaagaggtgattatctgaggcagaaactattgagcccagaggaaatctatttacccccatctggccactggatggcaaaaatcagttgttcctaatgtgattttcatggcaataattaaccatcatgactttacagatgagaaggagctctctatactctctatacattattccgtgtgattctcacacccattctacagatgagaaaaagatgagtttcaaagaaggtaaataaatggtcccacaaagtaaatcaagattcaagagctcttaccctctaaatcccattattttctcactagaacaaatatgtccatcaccaccttcattctcagcaaagatggaaagcaagattgtatgattattgcccccacaggggtagttacttcttacctcccagggatttacacctgatatatcttcgcaaagattttctgtttcataaaacccacagactatcttcagacagccccagaaccttcatcttccagga

SEQ ID NO: 63341 - DNA, 876 bp, Bovine  19866881417904
  misc_feature (1)..(1): n is a, c, g, or t
ncagagatcaaacctgtgtctcccacataggtaggcagattctttaccactgagacacctgggaagtcaaactttcactgaaacctcttcaatgcctccaaaaggaacactttcaaagcagcaatctgataaatgccagatccatccttagtctagactggagcgagacatcatgaaacatcagaggaatgacaaggtcttgggctctttggcagaacactttatggtggtccatttcctcttgtgtacccatctggtcctctgaatgggggcacattgtctcacactgcaggattctgcttgcctgggaaagggtagtcaggtcgctgtaaggatgaaatgatctcaatagtttttatttcttaaaactttttttttgtccaaactgagaataaacaggaaaacaaatcccccacatatttctggatttctttcccagtcctcacatctctaaatatatcaaacatgataattttatgagcaaccaagtttatacataatacattttatgttcttaaatgtatcaagtgattttagatctgcgcaggatgctaaaaaacaagaacacacagcgcccaatttgtacattaatttgggaatataacttttttaagtgggttgcttgaactcaaaatgttttttcttatggaaacaatggtggttgagttccaggtctacactacaaaagcccacatgcttttgtacgctgcagtctcgtcatttactaaacatgccagtacatttaaaatgcctctcctgtatggctgactctttactccatctttatatatgttagctcgatgatctaattctcacaacaactctgtgtcaaaaggaaccaaatctctgatagcttaagtagcttgcccaagtaca

SEQ ID NO: 63342 - DNA, 1576 bp, Bovine  19866881511420
  misc_feature (1)..(1): n is a, c, g, or t
ntaacaagggattaatctccaaagtgtacaaatagctcatgatgctcaaatatttttaaagagagaccaaaataacctaatcaaaaatgggcagaagatttaaataggtacttctctaaagatatacagatggtcaagaagcacacaaaaagatgtttggcattgctaattgttagagaaatataaatcagaacaacaatgagtatcacctcacacttatcagaatggccatcatcaaaaaaaaaaaaaaaatctacaaaaaataaatgctagaaagagtgagaaaagggaaccctcctcctacactgttggtgagaatgtaaattggtacagccactgaagaacaaaatggagattcttttaaaaaactaaaaatagaactatcatgtgacccagcaatcccactcttgggcatatatctggagaaaaccataatttgaaaaaatacatgcatcccagtgttcactgaagcactatttacaatagccaggacatggaagcagcctaaatgtcattgacagaggaatggataaggtaaatgttgtgcatatttacagtggaatattactcagccataaaaatgaataaaataatgccatttgcagcaacatgaatggacttagagattgtcatatgagtgaagtaagtcagggagagaaagacaaataccatatgatagtacttatatgtgtaatcttaaaaaaatgatagaaatgaacttatttgtaaaagagaagtactagtcacagatggggaaaacaaacttacggttactagggaattgggggaagggataaattgggagattgagattgacatatacacactactgtatataaaagagataactaataaagacctggagcttcccttgtggctcagatggtaaagagtctgcctgcaacgcaggagtcccaggttcaatccctgggtggggaagatcccatggaggagggttggcagtccgcttctttcctggagtatcccatggacagagaagcctggtaagctacagtccatggagttgcatagagccagacatgactgagcgactaacgcatacataataaggacctacttactgtatagcacagggaactctattccatactctgtaatggcctgtatgggaaaagacatttttttaagtatatatatttataacagattcacttttctatttgtttcagttgtatagcaaagtggatcaactatattgcaataaaattttttaaataataaagtgagtttggaagtagtcccttttcttctgctttttggaagagtttaaggaggaccattatagtgtttttaagtgttggtcttggttgtaatatagtttaaattgtactcatagtggactgttggttaaagatggaacatgtgtgaaacacatgtcagaatatcgtaaattaatgaagcacatgaaaatgataattctgtaaaactgtttcaagatgcttttatggaatatgtaatttgcatttatctgatcaaaatttgtatgaaataccaagatgtttctaatacttaaaaaattagattaaaagaagcgggtaaaggtataagggaattc

SEQ ID NO: 63343 - DNA, 1623 bp, Bovine  19866881945576
  misc_feature (1)..(1): n is a, c, g, or t
nccttcacatcctcatgcaggagactcttccattcccatggttttgctgatcatctagaagaaggatggcccccaaatctatataatctacccaaatctctttgctgaattatgaaccctgtgtccaatggcccatcagcaactcaaattcaattgttaccccctctctcatatcttcctcctttcatatcttttatttctgtgaatggtatcaaaacccactcagttgcccaagccacaagtttggggtgtcctcctcaactcctcccaccctcatccctgacagccaatctacctctaccttctgctggtcttacctccttcatattcctcgaattggtccacttttcttcatccccaatggtactccatacccccatccagaccaccatcagctcctgcctgcattattgcaccagcctcctaaccaggctcccagaattaaatctagttcctccactacattttccattttgtggccagagtgatttatagaacatattaattcccttgcttcagtccactttccaccattcgcacttagaacagtacccagattccttatgccacataagacccttcatgatgtagcccctgcctacctgtccaggcatccacatccaaaatcttcttctccagccttgttgagcagccagtgatcccacaaacatgccacccaccctatggctttcaaattttcatacgtgctgctacctcctcttgcaaggtgagtttcatcacggacatctcccgcttcccgattttataagtcctttccatcctcagtgaaccgcctcaccaaggcctttttagaccctctgggataatggcagtgcctttctctgggctcccatagccatgtttgtttatttcccaactaaagttatttacaaaatttagttcagctaccaaagatggtagctggaaattggcatggtaatctgagtcagaaaaccatttccaaagctacattaattcatactgttgttgccaatatgaatttaaagatcagaaaaggaaactgaagtctcatcggaatgaagaaaacctctctcttttagaacagcatagcatgggctcagcatctcggtagcgtagacgtggcttatttgcccatcattttgttttttgatttcaccttttcctgttgaatgtgtggctacaggaaatcttatagtggctttagaaatgtaaaacaactcttagaagaaattcatagggtacaaggagtggcaaagatgaaataaagtttccttgctcagggaagtcctgcccatcctttctgccaaatttgacattgtcctgaagggacagggagctggttctgctttcgggaggatgaccattcagtgtgttcctttgcccttccagtttgtctttactgtcccacagacgacgtcgctttcatttctgcatctgcggaacttcgtacagtgactgacactcggtgggaggctgctctcccagattggtactctgggggaagttcatgacatcgtatcaaagatgcagggttgaaagggggcgtgttaaacttcacacaactaaaattagaatagcctacaattgattgcagttaagagcaggttagaaggattcccactgaatacctagcaatttatt

SEQ ID NO: 63344 - DNA, 971 bp, Bovine  19866880209309
  misc_feature (1)..(1): n is a, c, g, or t
naatggagtattactcagccattaaaaagaaacatttgaatcagttctaatgagatggataaaactggaacctattatacagagtgaagtaagccagaaagaaaaacaccaatacagtatactaacgcatatatatggaatttagaaagatgataacaataaccctgtacgagacagcaaatgagacactgatgtgtagatcagtcttatggactctgtgggagagggagagggtggggagatttgggagaatgacatttaaacatgtataatatcatgtatgaaacgagtcgccagtccaggttcgatgcacaatactggatgcttggggctggtgcactgggatgacccagagggagggtatggggagggaggagagaggagggttcaggatggggaacacaggtatacctgtggtggattcatttcgatatttggcaaaacaaatacaatattgtaaagtttaaaaataaaataaaatttaaaaaaaattttcagtgataaaatttgatttgattctaaaggtttattctttcttccaagaggatttccagactggtgagtctgaaggtacataaacttgtgctattaagtttgaaatgttaaatttctctctctctataaatatctttatatacacctactcataaagacaaatggtgcattgatgatgtttgatttaagtttgtatagaattttaacaaaataaacaacatggttgacatgttttcctaattgtttttagtatgtaatttaaataaattgctccatctccagcattccaactgacataactttctcaggaatttgatctgtcattcttccagttagcagagccccgcagccatgctgcagaatggttttgtaatatatcttgagttttaacaaggaactttttgatgtatttcaattatgatgtacaaagtaacatctccttaattaaagaagaaattccatttgaagctctttaa

SEQ ID NO: 63345 - DNA, 2570 bp, Bovine  19866880467000
  misc_feature (1)..(1): n is a, c, g, or t
ntcagactcatgttcattgagtagtgatgccatccagccatctcatcctctgtcatccccttctcctcctgcccccaatccctcccagcatcagggtcttttccaataagtcaactcttcgcatgaggtggccaaagtattggagtttcagcttcagcatcagtccttccaatgaacacccaggactgatctcctttaggatggactggttggatctccttgcagtccaaaggactctcaagagtcttctccaacaccacagttcatcaattcttcagcgctcagctttcttcacagtccaactctcacatccatacatgaccactggaaaaaccatagccttgactagacagacctttgttggcaaagtaatatctctgcttttccatacgctatctaggttggtcataactttccttccaaggactaagcgtcttttaatttcatggctgaaatcaccatctgcagtgattttggagcccccaaaaattaagtctgacactgtttccacacacatatgcctaacaaattaactaaaaagtcagcatcttaaaataacaaagattttattatctttgattttctgggaagcagaaatctgagagaagttgagctaagtagttttaattcaaggtcttaaagatgtgaccacaattttattctaaggcttgatccacttccgaactctctcatggttattgacaggcctcaagcttttggctggctgttctaaagacttcagttccttgtgtcagtgatcccttctgggggttgcctggcatggaatctgagtaaacaatgaaagagagaggagaaaaaaatcctaagatggaagtccacagttttttaataaccaaatcttaacagtgacatactatcacatctgccacatgctcttgtcacattgaacaacctttggtgcactgtgggtggagacaacacaaaggtttgaatatcaggagttacagatcactggaagatcctcctagaggctgcttatctttcttgggaattgtgatagactcaattttgacttgtttgagtcttaacatgtgctgtaaaatatattattgtttggttgttgtttttcagttgctcattcgtgtctgactctttgcaaccccgttgactgcagcacaccaggcttccctgtccatcaccaactccggagttcacgcaaactcatgtccatcgagtcggtgatgccatccagccatctcatcctctgtcatcctcctttcctcctgccttctatctttcccagcatcagggtctttctcaatgagttggctctttgtgtcaggtggccaaagtattggagcatcagtttcagcaccagtccttccaatgagtattcattccaatgagttgatttctttaggatcgactggtttatactttatttatttatcttaaatatacttgtgtcataattaaccaatgtcccaaatatgtaaatattagttacaaattcatttggggaaaaaaacacaaattatccgactgtcgcattttctctgacctgtcatagggttcaagtaatgtttggtgtgcacgtgtgtgtgtacgtgtgtgcacatgtgtgtgttttcactgcaatctaagatattacacagtgcctattattaagaaagattattatcttagttatatatatatatatatgcatacagtagttacataagatttcaaacataaatcttagtaaatattaaggatcattttaaagagtaatatgaatgcggttatatattggtactaagttaaaaaaatcaaattgtttgctactaattgatgtacatactactgtgttctttcataaagggaattttttatttaaaattatttttaaacaatttcataatgttatgtatcagttaagtaactttgtattgaatgaaggaaaaataccttaactttggggtcttggtctgtgcattaaattacatttgtaaatgcttcactgaacagtatttttcaaatataatccacatatagtaatcatgtttaaaatataatttttcatagttatgacccatctgctcaatactgataagaagttcaataaagctagctgtaaaaatcaatgctgttaaatgtttattaattatctaacacattgcttagcttactgagcacatttaataccccaatacatatttcaaggtatatatggaaattttgtacttaggtttaaagatacattttaagtatcctttcagctatgttctcttaatccaaatttataagcatttcgcttattccatttaatctgatctttcattgaggatacaatttcgctgaaggtaaggcagacagtttctatctggggaaaaaaatcttaaaagtacattgtacattaaaaaccactgaagcataatgggctaaactgcacatggaccaaatttcaacatttgccaaaattatcagtaaatttaagactcattctaattttctcagccattattttagactccagtagcactagaaactgatttaatcaggcagtaaagcataaagtattcaggtcaagtagatcagcacaaaaatgttttctaattcctttcatt

SEQ ID NO: 63346 - DNA, 820 bp, Bovine  19866880900109
  misc_feature (1)..(1): n is a, c, g, or t
ncctgttgaggggaactccctctgccagacgctctcaaggcaccagtgtgaaatcagaggtgtggaaacatctggaaagtactgagatgtcagaagccaaggttctctatccatgtgggcttctcagctcctgagaagaactgtgaagaaacaaatcaggtagagaaaaacaacaactaagcaaataagaagtaaggaaaaaaagagggaaaaatagcaataccagcatgaattaagatctgtcacttctgatacgtgattctgaagagtggaggtacactaggtgtaaattcttgattttcattctcttttccaaactttattgcttccaccaaaaacctgttaggaggccagtgggacacatctcaaaacgatctgatcctgttttgactcttaacgaggattatgcataaaaattaatcatttttaaagtatatgaaacttaaactaatgaacaagtgatgtgaattcatcctaccctgccagatccaaactaacaaaaacttcttggtaataaatttacagcatttgaacttaaatttctaagaatttcacatgcatccatggctcgtcttgtacttgtatataatggttgctatgggtgacctagaaatgaaaccaatcatagcactgtaatttaaaactaaaacagctggcaaaaatctttcctctcagagcgtgttgtcagagaagtaaatgaaaaggtcgggagacttttcatttgcttctgtgataacacagactacctgaactaaggaacatattaatgtttcctctgaagctttctattatgtgtcaagggccctattccagaatatca

SEQ ID NO: 63347 - DNA, 1038 bp, Bovine  19866880936970
  misc_feature (1)..(1): n is a, c, g, or t
ntttagtgtttaaggggaattattgagacccttgaattctaaaacatatgcttctaaaaagaaaaacactaataattttccaaaaactccttatcttctgcttactcagttattagatatgagaatattttgtactacattattaggctgaatttttagggaaaaaaataaacttaaaaggtcaaaatgtaattgttttcaaaaatgttcaaccagagatttgctgtgaacatagtcaaggaaatagcaacacagaatgtatttttgtatctcttttcctaatagcttgttatatagtccttagggggcaagtaatttttcataatgatagtaattgcaatagagtttaaagcagctgaaagccaaggccatgtcaaacttttatgtcaaataagtagaaaggtaaagaggggaagaggcagaagaagaggaaaataataggaaaaaaagagaaaatatgtgtgttccatcattgtagacatggaatgaaagtgaagtatatgaagttcaagactattaccatgaaatttgcattctagatttttctttttttaagtgcgaagagcgctatttactctggtgtgttgtgacagaaaatagaggatatttcattgctaattatcccttctaacattccaaacacatttgacagcagtatgatgagggaagtcagtgatctacacctatttttgcactatgccaatggttggcataatgtttcaaacaactataaagcaaactttgcacagacacagggaggaaaacaattgcctccttgccatagatcccaacaaagtgatatcctctccaatgtcagaaagtgagcctagtgtagaatacagcatgagagcaattgtgtattgttcaatggtttatagagatcttgcacatggaatatccaatttactacttgcagcaggtctttaaaggagaaatcattaatgtattacataatttgtccaattcacagttcgtatgtaataggactctattgactaccgaaagaaacatcttaccactgcataatcaagaaatctt

SEQ ID NO: 63348 - DNA, 1051 bp, Bovine  19866880568996
  misc_feature (1)..(1): n is a, c, g, or t
nctgccatggaattctccaggcaagaatactggagtgggttgccattctcttctccaggggatcttccccaacccagggatcgaacccaggtctcctgcattgcaggcagattctttaccatctgagccaccagggaagccccaaatactgtccctttccttaactatcatactgtccattcatccaggatagactgttaatccgaacattaggaactgttattatattaactgagaccgtagagagagaaaatgcttggacctgtggcacacagtattttctcaataaatattagcacatcatcattattattagctttagtattagcattattactgcttggtcaaagttcatctctttcaaggcaaaactccagaaatcctgccaaactcagaatctttctgaacaatggaatcaatcattaagtaacagttttctcaaactactttccttcctttctttccttagaattcttcaaaactaacctgtaaaaaaacacaaaatgaggttgctctaaatgaaatctctttccacttccttccaccagcaagtcattccttggttattgagggctacactaaaaagtctttaaaagtctgtgtttcacatctttggtgtcattattctatcgctgttttagtatgatgtccatcttgatccttttggcttgacctaagcccgttattggagaaggcaatggcaacccactccagtggtcttgcctggagaatcccagggacgggggagtctggtgggctgccatctatggggtcacacagagtcggacacgactgaagtgacttagcagcagcaggcccattatatgtgaggccaaggtagagtgaatttttacaaaactctttatttctttagggatgtgaaaccgaaccttgtcccagtggcagcagcatctatttaaagacaatctgattttgtaggaacttagatggataacaatgaaaacaggaactgtctgctgttaaatatgtttcctgtaacccaagctcagtaaaattgagtctcttcattttgctggtgttccacctctgg

SEQ ID NO: 63349 - DNA, 3312 bp, Bovine  19866881063093
  misc_feature (1)..(1): n is a, c, g, or t
nagagcaagagagtaaataatttaaaatgtcaaaaccgggaaataaaaggaaaagcagctctgctgaatataatccagacctgtaagagcattataggaaagaagaaaaagataaacccctcaatcaagttccaatcatgctctagccctggctagatcctatagtcaacggatgtgcttacaagaaatatacaagtctgcattagttcctaattaggttaggatggctgccaaggaaagtagtagtgtttttaaatgtaagggtttggttacaaatggatatcaaaagccttgacacttaagtggccatgacaataactgccaactgaatctacataattggtcccccaaggttgcgccagcgacttgggtttcattctcgtgagggccgtccctccaagaatcacagcctctagagggtggtacaatgtcaacaaattaattgatgttattaacttggattaagataaagacaaaatgcaattgatttaaaaataaccgtgggctttattatgctatttacttctaccactcacctgggaagagggtcctttgatagtagtttctttaaaaatctctgatgtggattcaggaaggaaaaaaaaattaactgtttctagacaaaatgtgcaccatttttttgctccacaaaaaccactctaagaaataaaagaattgactaaattttccaaatcaagttaaactggtctttcagtttaatttgcttttattagccaggtaaataaataataaaagtagaccatttggaatcatcatcagtggcactgtctcaagtaaaaggtacaaatgaaattcttgcagatcacaaatctaaatgcattatgtcttagaatccaacaaaatgtcatcaagaggctcacagaatccatttttccactgcactgccaaagaagaaatgggcaaagttcaaagtgtctggagagcagagaagtccttttgaaccacacttgccaattagcacatttattttgcctttaatgaatcctaaaaatatttattgaaaatggcatttattgttaatgaaaattccttctttcctccagcagaattcagtgctggatcaaaagtagcaagtgaaaataacctgcaaaagcaacacgccactattctccacgtcagaattatatcaggaagcccactgcagtgagtggcacctgtctctcacttaggtaccttgtcagtaatatgaaaacatgaatctaatttctaaggaatacacctaataaaatgttatagaaatctaccaaagccaaactcaatttcacagctcttgggagagacaatatgaaccatgtggtcctactgctgaagaaagcgacttattattctttacctagaacagtggttctcaaccaagggttatgtccctcaagggcaattttggcaatgtcagaaaacatttctagttgtacaactaagggtggggtgcgtctggcatctcgtgggtagtgaccaggaatgctattaaacattttataatgcatgcatggcaccaacacccccaaaggaaaaacaaaacaaaaattaactggcccaacatatcaatagtccatagaacaaaataccagagacaacattctagagctattgtactatagctatgggaatccaataatttcacttttatttttttagcttcatcattcagatcctcaaagcattatgttaagatcaacaacaaaatagctcacacttactgagcagtttcttcatagtatgtgccttcctaagtgttttcatatatcatttaatcctcccaacagtccaatgaacaataaactgctatcatcatttcccagttaagaaaactgaggcatagggaagctatgacccacccaggacacagagctacaaaggaatgagatgcaaacccaggcccatctgactccagaagcaaacacttaatccacgatacccccacaagacagccccagagacagaaaccagaggagagagcttagagacaatttcctaaaagagaaaaaacaagatttttttaatgagccgccagatgaaactaaattatacttagtcagctccccaataccagcacttaatccacagaggcccagcccctctcctttttttttttaacacatgagaatgtctagaaatggcccaacttacaaatactgaattagttcagtttccatctgggtggttctccaaatctctagctttaccttatagttaaaaaaaaaaaaaaaaatctgtttctaaactaattcagagctgacttgtatatataaaaataactaatattttccatggaatcttgaggtaaggtttttggcctgaatgatgttgagtgggtggggagcagcaagctaactgttcctccaaatattttgctttgtgttggagccccaattagaagcactctaaaccagctttggcatggtacccccaacttagcctaaacaagtcagtagagttggaccctagagccactagcatgtgaagaacacacacacacacacaacacaactgtaattgtgaatggaaacagcaaactgttgccatctgtgactaagtgaagtcaccttagtcatgggtatggggcagaatcagggatggagggagcataggtaagttatataaaaggaaaacagtcaaaaatattcttcataagaaagcatttagtggttgttgtcatctgtctggtaaagaacatccagagacgataaagagtagcgttcagcaccacaccattgctgggccttcaacttgatggccaataagcataaaatagtagcaactttttaggtgttgtatcagagtgataaatggggttcattcgattggaactagtctgagataagtgttcctaaactatgtaggtctacttgatcccaaatcgattttcatcattctgtgattgttctaccaaagtcctgattctatcagcatgtcttgtgcatccttctattatatccctcatcatatagcactgatttgttagtctccttccttaggctgtgagtctcctgataccaggaactagaccatgttcacagtttatcctcaggtcataacatcatttggtatctaacaggtacctaagagaatattgacaagtgcagcaatgtcatcatgaagggagatcctagagaaatgcaaccagtctataactgttaaatattttctattaatgacttgtattaatatagaaagctcagtaatatttttaaatagcacaaggatggcagggttagctaaatatattgtatgacagaaataaaattttaaaatagcctctagaggcagactattaggccaaaactaacgaga

SEQ ID NO: 63350 - DNA, 837 bp, Bovine  19866880410457
  misc_feature (1)..(1): n is a, c, g, or t
ngcccttccttttcctgctgtgtagtattccattgctaaagtgtagcacagcttttaatccactcaccagttgatacatatttggattgtttctgacttgagctattatggaaaaagcaaaattatggattcagaaaagagacaagtggttgcctgaaatcggtgaagaagtggggtttcatggcaaattggtaaaaagggactttttccacagatggaaatcttcttaaacaagatgactggataaaaaaatttttttctaaaattcatttaactgcacacttaaaatgggtgcattttatgttacataatttataacaaaacttttttttaagagctctaggtaggaatataaagtcctgtgccccaccactagtttttccaactatgtctcagttcaagtacaattccaaagcagacaaggcccaccagactaactgctgaccaaatcaaccaccagggttaaaagactaataagttaccaaagaaactttttgaactggcacccagcatggaagatgagtactgtcagaaaaaaaaaatgagtttagaaatgatagcaaatccaaaacatgtgctcttaaaaataaaataagacatcctggctgaaaaaacaataatcagagcgaaatttttagaacataagaaacaagatgatacttttcacagttggactgtaaataaagcttctttggatggatcccataatttttcttttgtttcttttttaatgttccatgaaatactattatctttctaaactgctccccaggccctcaagaaaacagataatccaaatatagcttttgcttcttccagctaagcacacaggaaaaa

SEQ ID NO: 63351 - DNA, 1832 bp, Bovine  19866880431308
  misc_feature (1)..(1): n is a, c, g, or t
natggatgattgatagattcatataggtagacgtgtccatacggacatgttcctctcaaagatggaaggctcagttcaagaagactgagtaaggaggcatcagaggctagacattccaggaaacttcatctcatttaattctccagaattctagaagggaggcattgctagcttgtgttacagatagaatgtttgagggatttccctggtggtccagtggttaagaatctgcttttcaatgcaggagaagggggttcgatctctggttggggaatcaagatcccacatgcctgcaaccactgagcctgtgtgctttagagcctgtgctccacaattagaggagcccccatgtgtcacaactagaaaaaagcccacacaccacaatgaagagcctgcatgctgcaatgaagacccagtgcagccaaataataataatttgagaaaggataaagaagctgtggtacatatatacaaaggaatattactcagccattaaaaggaacaccttagagtcagtgctagtgagtggaagaacctagaacccattatacagagtgaagtgagccagaagaagaaaaacaaatattgtatattaacacatatatatggaatctagaaagatggtactgaggaacctatttgcagggcagcaatggagacccagacacagagaacagacttatggatgtggtggtggtggggaggggagtaggaaggagagagcgcggcaaatgcagagagtagcatggaaacatatacactaacgtatgtaaattagacagccaatgagaatttgttgcatgactcagggaattcaaactgagtctctgtaccaacctagaggggtaggatgggaagggaggtgagagggaggttcaagagggaggggacataggtatacttatgtctgatctatgttgatgcatggcagaaaccaacacaatattgtaattacccttcaattaaaaagtaagaaaaacaaaccaaaaatgtaatttgagcaggaagaaagagttaagtgactcactctgagtttcagagctgggatctgaaccagatctcaatgacattaaaacccagggcctttcttctgaaggggtaggagagaagagaaattcacaaactgaggagaaatgaatctttgcagtgagaccactgtaggggcacttttccccaaagtttaaagagagggatgaatgggagacactgattaaggatatgcttaggagggcattccatagacagagagacactgagacacagagacagagagaccaatggaaggaggtagagatagaaaaaaaaatagagaaagggggggacatggagaaaacctgaaagaaaggacggggacttaattttcttaaaatggacaaggaatttgaggaattgaaatggtatcacagaccagaataagaaaaatgttacaattttgagttacaaatctgagttgtaattttcacatttgtatgacagaactaaaatggtgcttaggacagggttttatggctgactttgctaaggaaattattatgaaatctatgcggttaataaacactattcacattaccagtctctcagccctctgactattgtgggggtcgaagcataacacactcaattaattttacaacagcattaaatatccctctttgttagacagaaattgcctgcacaaacaaggctgcagcaattaaattttggctacccttgggagtatggtaataaagaattcttttgtccaattaacaacctcaaattgattataaacgggactttgtaaacgggaggtcaaggcaatagagaattaacccgtgaattttaagccttca

SEQ ID NO: 63352 - DNA, 1453 bp, Bovine  19866880437939
  misc_feature (1)..(1): n is a, c, g, or t
natcagtcctcagaatgcagtgtgcagatgtacgctgaactattctagggacatcattcacagtcagtgtggtgtatctttgagttgggcagtacctgcaccgatgtatacgccaatcctagcactggtgatggtggttaaatgggatcatgtgtgcagagggagttgtgattattgactattttagagttgagaaacctgaggtttaaggagattaaaaattagatcccataactaatagcagtcaggattctattgtgagtgtaactcactccaaactccattctgtcaactactatatttgcctgcctactatcttgtctagagaatgttcatgatgacaaaataaactttcgtgctgtaaaatccctctgggagtggcctcaactgtgaaggttaataggtggatgtttgaagcctttgataaaataatgtaagtgctctttctttcctcaaatgaaactgataacaaacacatctaagtgcttctgtgagaaaaacaaacttcctgatgaaattctccttcacggcagctttgcgagattttagcaaatccccccatcatgccccaaaccagaaaggcaacactgacttaaagtttgtctttaattatatttaaatcatgaagcttaactgaatgtattgacatttatactgagaaattcattgacattctattaacctcgatcagcaaattaattcttcaacctcagacctagagcatgtgaggggctggagcacagttacacattgatcatgggatatggtgtggcttggtcatgtgggaatcgactggctaagcctaaagaaacagacccctggcttgcagaggagaaattcactagatacgtatttgaattattttttgttgtgaaagaataaaacatctgagcctctcacctttcatttgtcatgtcagatgggagttgagaaaaccattgggagagccaatctctatcaattaatagtcgtgtttacattttcacatgaatggagattctactccacaaattcagctacatgcttaaagagatcatggctagttaaagaaaatttgtctctggttatcgtaacttccaggatcaagctgatgttgttagatttttgtgctaagattttgcatgcaatgtaactgtcagaggtgtttgtttagggagtccaaccttgcttttctgatgaagacagttctttggccatcacctgtgagcggtagcactgactctaagatgagttactaaaagccctgtcaagacacaaagaatttcatcccaaaatgtcttcctttgacccgtctggtgacatagcccttcagagacagagtcttagtagacgtttttttctttagtgtgctctcttaacaaataaatgcattaaagtggaggaattagaggaatttttttttaatttttgaaatactaatttgaaaattttttatattgaactggtagttgat

SEQ ID NO: 63353 - DNA, 1377 bp, Bovine  19866880444361
  misc_feature (1)..(1): n is a, c, g, or t
natggtaactatctccttaatcaacaatccagttttaaaaaatctaacttgataaaaattatctgttcctcaggtttttttttttttaattcagatatcagtcttgctgtattagcagttctatatctgagcattgccagggaagttagataggaaattcagcgaatggcacactatactaatctttgctagaactctggagaatacaatcacaagatcagcccatcatgtctaaatgctcacaggcagctggattggatccacaggggccagtgcccctgtcatttattctttaaatgtcccgcctcactgttcagaggcaacttggggcagatctaaatagctggggctctatctgccagaaggctaatttgcaaagatcgctgcaagatgaaagtgatatgaaacatgacaactgaattttccagcagcaaagagaatagccaaaggcacgaacagccatcttaagctacaaacagagaaagggaggggaaagcttctcttaggaaaagattaaagccaggtgagatcaagtaagtttagcgtgcttgtaagctccctttgtatttgacacatataagggtatcatattgggaaaaagaactccagtttcaaacactacaaagaccaaacaggtcacacagtgagggggcacaatgagctaaaggaaaacagtagtggtagagactgttgacaactggaggaggttctgaaaaaaaatgcagtattggcagatcttctaatctttttcaaagaaaagtccatttaaaaaaattgaaagctccttattattaaacatggataactgattaaacatgtataacttttttttaaaatttcttaaaaccaacatgcaagccaaacaaatacgtcttcaaaccaggtttggcacaaatggcttgcaatgtcttcaaggaaacttagagactggatgtttcacactgtattgccatgaagctgggaaagtgataaaggtttccggagactcctcctgacctttgataccttgggctctgagcagggctggtctgcatggcgcttgtgtgaattagtgcactgccccctctctctgaagtgacagctcatgtcagccacggcactggcaatagaatgaagttggggttcagagccccttcctatagaagaacttaaataatcagccttgtccatgaagggcctccattaggtctttttaaaaaaaataactggagtgcaattacaatgttgtgttagtttctgtgcaacactgtgaatcagctatatgtagacatatatcccctacctcttgagcctccctcccaccccaggacttaatcttagtagacaaagtatatgctcttccctccagattttatgagttcgcttttctacataaaa

SEQ ID NO: 63354 - DNA, 811 bp, Bovine  19866880516862
  misc_feature (1)..(1): n is a, c, g, or t
naacttggcccctagaaaacatctaagttatgcagtgcaccatttttgcaatggatacttagcaaaacaaatttgactacaaaagctcatgaccctttcaaaataaaaataattttattttttgcatgatgcatatttattatgcatatatgtgttattataaacttagacatgtataggtaagttatcagtatggatatatatgaaaatacagatgcagagataaagatatacagatatatacatatcaatgtagatacagactttttttttttcctttaagacttctactgataatgttctccatgtttggaaggaaggacactaaggactatgaatttgtggctatagacacacacgtacacacgtgtacacacacatatccagtgaagtttcaagttcagaaatttactatttaatattgtatttaatttactatttaaatttaatattgaagacaaatattagcccatggttttcttgatgggatattacatgtcacaccagatacttctgctactgcagacatttttcatcatttctgtgaaggaagaggcaatatatagtggcttggtatgactttgtgaaatcacaaacctgggcaacccaacattagccatgatctacaaccctggagtgtgcttatgaaatattctgatgaacaccagccagtggcatcatataattattgctgctattaggttattatttatgctgcattcgtgtagctctagcagagaaaacagttggcattttttattatagtgccctggatatcctacccaaaacaaaggcagattctctagtaaag

SEQ ID NO: 63355 - DNA, 1471 bp, Bovine  19866880529600
  misc_feature (1)..(1): n is a, c, g, or t
ntttcatcaagaggctctttagtttttcttcactttctgccataagaatggtgtcatctgtatatctgaggttgttgatatttctcctggcaatcttgattccagcttgtgcttcctccagcccagcatttctcatgatgtactctgcatataagttaaataaacagggtggaaatatacagccttgacatactccttttcctatttggaaccagtttgttgttccatatccagttctaactgttgcttcctgacctgcatacaggtttttcaagaagcaggtcaggtgatttggtattcccatctctttcagaattttccacaggttattgtgatccacacagtcaaaggctttggcatagtcaataaggcaaaaatagatgtatttctggaactcttttgcttttttcgatgatccagcggatgttggcaatttgatctctggttcctctgccttttctaaaaccagcttgaacatctggaagttcacggttcacatatagctgaagcctggatgattaaagtgcattatatttattgtgcactttatttctactattattgcatcaactccacctcagatcatcaggcattagattttggaagttggggacccctgctctagaatataccccaccgtgatggtaggagtcttgccctccttggttcacagccaccttccccaaagtctacaccagtttctgatctgtaacaaaccatcaagggttacttgtggagtgaacagataatgggtaaatgggtgaaccccattccaggcaaagctagaagagatcagaatggattgtcattggagacacagaaataataaccaagtgtccatcatgaaagaacaaattatgaaaagatatactcacatatcaattaagaacaaagtggtaaataatggatttttaagagcatgcttccagaatttcaccctgaccatgcacctagatagagctgtcgactttccaatgactggcttctctccaacccaaaagaacagaagaaagccgaatacttcccagaatgatgaaattatactggacaacttaatgaaaaattcgcagctgccactgaggcattaaatggttggtttccacatggaagcctccatggcttgtgacaagctcttgacaaactgtttctttattttttcatggaaatgttatggatgagaaagattaaccaaaaaggttttccccaactgcagccttgtctgagcttcactgctcaccagtcaagacacagccagagacaggaccagaaggtcccaagatagatgacactctcccatccagtgaaaatgaagtattaatcctgtgttgttgtttttgtgtgtgtgaggggacttgcgttacaaattgctcatatagaaagagggctcgtttcttcttttccagtgtagtttaccacccctgacttccaccaggaaaaataaagcgtcttctttggagattttcaaattcaa

SEQ ID NO: 63356 - DNA, 2554 bp, Bovine  19866880624801
  misc_feature (1)..(1): n is a, c, g, or t
naaaataaaagtaaataaaatgtgaaaaagagcagtcccaacatcagtaggtctcttagaactgaatgagttaatccctgcaaggaggaacctagaggcatatctggtacataataaacagtacggacctagaatcatcatgactgacggtgttttggggagttagtgactcaacagacacccaaaggaaagggtacgtcttggagcagagatttttctcaaggcctgttgcagcatcttaatttgcacttggttgagaaagtataaaaatgaaagcagtgctatgctatccaatgtgattgaattttcaaaaagtctgaggaaaacaacagagggtatctggcatattaattagcaggctgacacaggaaaaggatatcatgaaaagtcaaataaaaaaagagccaaggaatctgctttgatgacaaaaataaaaagaaacttcattactggagccaggagagagagtttttcttctataatttgggacccttatctcaagttcagatctcaaaaggtgacggtcagggcacgtgacctgtgctaagttcacagttgatgggggatgaagcagctggtgtgaccctacaagacccatacggctctagtgagtggtaaaactgttctccaggcttctactatgggtggtaccatgccttcagccaggaatacaaatgtgaagggacatggattaataataaccacagtgtttgcaggagatcatccaggcaaggtggtgtgcaagaagattaactcctgaagatcctaaaaccaggggaaggtatgggagatgaaagggcagttcatttgctttaaggagacaaatgtattcaattcaggaaagcttacttaaaatgcatttatttcatcaggagctttacaatagcaaattatatggtaatgaacgtgggggtgagttttgtctctaaggtttacagaaatggaatttctgctgagtcctggatttaggaggacatgccttgattggcaagatttaagaagatgcaagtgagatcaggaggaaagaggttatttgatgattactttcttgaaatccccaaaattgtagaagaaagaactcaggcctcagtcaaagaagagaaggatctggctatgtctaaacttcatggttccctgggacttccctgggtccagtggctcccaatgcagggggcccagattcgatccctggtcaaggaggtagatcccacatgctccaaataagagtgtgtgtgtcgcaactaaagatcctacatgctgcaactgaaatccagcacaaccaatatataaataacacaattttttaaatggctgctacctgctcttgtctggcttatgaggcccttaactaaggcaaactcaagagaagaaggcatttggtttggacataaatggtaagtcaggagtggcgccctggagtctcgcttcttctattttggaagagggacctggacatcagaaggatttaggtggagttcaaacaataagatgacataaggaaggactttgaaggtatataaaaggacattcagagtttatgtctttccaagcatcttgggtacagctcttgctcccagtggtgtgatctcaacctgcaaaaagaactgaagagcgtttgaattccccaacttgattgttaccctcacaaatcgtgtggtagtcacagaagaaggtccaataagaatcacgtcgagctgtgaagatccaggaggactccctggaggaggtgggcaggggaaatgggcttatacagagaattctgagtgatatctgttctcccatgagtgtcatgtttgaagaaaggtttggaatatatcaaattgcacttcataaagagcacatggcacatctgactgtttttgcttaaaaactctgttggccttccccaagcatcttcagggctgggtctggcagacacatctgtactcttatgtcatcttatgtaaatgccatggaacgtcaccatcaccaaggcacttttgattattttcaaggataactgcctgtccagactgtatcttgtgattaatttttatctaaagttccaactcaattctaataactaaaattcagggacttccctggtggtccagtggctaatactccatgctcccaatgcagggggcatgggttcaatccctggtcagcaaactggatcccacatgcggcaactaagtgtttgcaagccgcaactaaagatttcacatgcctcagtggagatcgaagataaataaagtcaaataaataaataaatattaaaaaataaaattcagtggtcaaggctgagacacagcaaaatcagaaacatcagaagctcagcattaagaggagggtgtgcccttacaatccagaggagagctgagtcacccacatccatcctacattcagaacagccatcacagttatggtacccaaatagctaccgcccagcatgaatgaaaacactgtttgttttatattaaaataaagaacacatgttaataggtttgaaaggatattcaactaactgatacggcattcaaattgatgaatatcagtctcatcatctttgaat

SEQ ID NO: 63357 - DNA, 1304 bp, Bovine  19866880707721
  misc_feature (1)..(1): n is a, c, g, or t
ntcttgttgcagattataggctctaggcacacgggctcattaattgtggtgcatgggcttagtctaagacccacaggtttgggatcttcccggaccaaggattgaacccatgtccacgcctgcaatggcaggcagattcttaaccactggatcaccagggatgtccctggactactcttatgcccatttcacagatggatgagagcacgtagtgtttgaagaatggcgccaagcgattcaggtgagacactgagctggaattagattctagatagatgggctgcggagtctgtgctcgaaacctgtgtgctgcacctccctgaaaacagagttaaggctgttgatcagttcaatatgtgggaagacctttggaaaatgcaatgcaagaatgtgcactcgtaaaaatatgaaattgagaagtcttaactgaaataggaaaagtcatctgaaaatgaattatttattacacacaaagccactgccttttcttttcagcccactgtgctacctttgatgctcgctaatgagctgtcctctccagaggtgatttataatgagacagtggtggctgcacctcggtgcttttaaaggtacatgatgcaaaacaaatagggagacttactgctattgttgtttagtcgtgtggttattacagccccagagactgtacaactggttgttctcagtgaacaaatgctcatgatgtaactcattttgcaggtaccccagaaaggcagtccattgaagaagcatttactgagtttccctctatgtaccaggcactggcctttgtgagaaggggataacagcatgcatcgcactcatgggaggtggctggtaaaaaatgtaccatatgatccagcagtcctgggcatccatccagacaaaactgtaatctgaaaagatacatgcacctcaatgttcatagcagcactcttcacaatagccaacacatgggagcaacctaaatgtccataaagagatgaatggataaaggaagtgtggtgtgtattgtattaataaatggactactactcagccataaaaaagaatgaaataatgctcttgcagcaacatggatcgacctagacgtcatattaagtgaaataagtcaggcagaaaaggacaaatatcatgatatctcttaatgtgtggattctaaaaagaaatgatccagatgaacatatttataaaactgaaatagactcacagacatagaatacacacttatggctaccaaaggagaaggggggataaactaggaagttgggattaacatacacacagtgctatatatcaaacag

SEQ ID NO: 63358 - DNA, 611 bp, Bovine  19866880717279
  misc_feature (1)..(1): n is a, c, g, or t
ncatcgaaaaacaaaaaacactattatgtaagattctgtcttgtgtgcttgctaagttgcctcagcagggcccagctctttgtgaccctgtggactgtagtccacccggctcctctttccatgggattctccaggcaagaacactagagtaggttaccatgccctcctccaggggatcatcccaatccagggatcgaacccatgtctcttaaatctcctgcattggcaggtgggttctttaccactagcactacctgggccacctaagatattgtcttatttatttaaaataaaatgatcagggatacttgtgaatgtatatatgtcacgtgtatatgttaagtgacacacattccttggccctatagttttgacaactgcagttgtaaatgttatttggccttgaccttttaaagaataccatttttatgtgctatattcctgtgagatcatttgagggaaatgggaatcattagggtagaatataattatctctttaaaaacttttattattttctaaaatatgcaaatagtattcttaaacagtagacgagttcataattacagacacacaagggattcttaaaatcatcattataaaatcccaccat

SEQ ID NO: 63359 - DNA, 1628 bp, Bovine  19866880724060
  misc_feature (1)..(1): n is a, c, g, or t
naggtttacttagacaatcctaaaatacaatctcacattctcatgatttctgaggctgctaagaaaagtagcttggggaaccaccctgcaatttctcttctgaaaaaaaaaaaatctgattatatccgagagacgtgcttatttctcatttaaaaactttctaaaatctccagacttccgaatatcttcaaagcaatatatgcaaagaactatcaaaagtttgcagcagatcctaaattcaactaaggctaactcccagatgggaattggtaatgataaatgccttgaacatcctgagacctggattctaatgatccaggctcagaacaatttctccatctgtgaaatatatgtcttagaccaaacaccgcttactcacaatttctgtgattttcttaagtgatgttggcgaccacaggagagattaaatgccaagtattagataatggctttgtaatttggccaaagatgcaaaatcacagaaaaacagatgttaatatattccctacttgaagccacagatcaaatgaagagatactcagacggcaccctcccaaagatttaaaattttttacataagaagtactcatatatagaaacctagtaatttcaagctctatatctttagtcattttaaataaatgcttttgcacactggctggaaccagaagttcttctttttgtgccactgttgcaattccatgacatgtattctaaaataaaatttgacatttttatactaatttgcggtatataagcagaacggtaatctggtgtataagacaggtctgcaacgagcagaaacccagcttcgactgctttttgccaataaacattattggcaagtgtatgtgacaaatccagggaaagtactaacttcaggtaaagcttgacttaggtgtaaaacatggctacctagaagacacatctaattttacgtctttctctgtgcatactattctcagaaagagtcatgccacattatggcaaattaattaccagcagctctgagtctgcatcctaccattccatgtagaaggagcagaagaaaacggaaaaagcttatttcctgtaaaagttgtaggaatggagacttcactggtggtccagggactgggacttttccctcccagtgcagagggtaggggtggaggttcattccctggtcagggaacgagatggcacatgctgcagctgaagattccacatgccatagctcaaagatcctgcatgctgcaactgggacccagcacagttaaataaatattatttttcaagtcatggaaaatgacattcaaacctatttttcatctacctagaccaggggaactatgtggatttggaccatgtccctctctcctctagagtcagagggtgggcttggttctactctaagcaagtgaactgagaagtggggaggactggccccaattttatctagttatgcattagtctgtctttggcccctagaatataagctccatgagggcagtaaacttgtcagtcttctttactactgtatccctagtacctataataccgaatatcacataataggtgcacaatgagtatttcagaagaatgaaaagaagaatagatgacggtcagccaaaagcaacagaagtcca

SEQ ID NO: 63360 - DNA, 1812 bp, Bovine  19866880735239
  misc_feature (1)..(1): n is a, c, g, or t
ntgccctgtggtggccgaaatgggaaggaaatccaaaagagaggggatatatgtatacatacagctggttccctttgctgtacagtagaaactaacacacattgcaaagcaactgtattccaataaaaattaatgaagaacaatcacagaagtgatgctggatgcattttgcaacctgagactcggtttcttcatccttaaaataggaataataactgtacctagggcttcccagggagggggttcagtggtaaagaatctgcctgccaatgcaggagatggaggttcgatctctgggtctggaagatcccctggagaatggaatgactactcactccagtattcttgcctggagaatcccatggacagaggagcctggcggggctacaatccatgggatggttaaaaagctggacacggcttagcaactaaacaactaaaaaaaaagtacctgctttgtagcatgctgaaaggatttaatgagtttatacatagaattcagggcagagcctagcacagacttagctatcattattattatgattcaccaacttgtgtaaattccaataaaacaacagagattaatacacagtgctttgctgtttgcaaggaacatccacatactctcaaaattattgttaattaaacgttggatgatttttatagctagcaatataaatagcaatatttacaatagagtagaattttatttttaagcagtatgcatacactttatggtaaattggtgttctttttataataaaaatataacatatttattctcatctcataggataacaacatccttattaaagttattctagaggcttatagctttggtacattattttaagatgctggtcatatctttgatttacctgatacagagactttgcctaaaattcacccccccccccccccgcttatgatttctatagaatctatgaccgttttacaacagagtcctgaatgatagagtttctaggaataggatgtgataaagcacactgtttattcctctctgcatgtgagactgaacaaaaaaaaaaaacacagactgaaataaagcaagagagagtcgggcgaggagtgagaaatgtcttcgccgctggcatagaaccctggatgctggctgaaagaaaagaaagaagaagaaaatcgcactctggaatgttgagagtcactctctgaggccctgaaatttttttcttctgggctgaaacagctccccatttcaacgaaggcaatattctgaacacacttgtgcggacgatgagaaaagtatgttgacacactctgtcatccactctgtgcaaggtggtggccacagcccttccatccctttcatgaacgtctctttgcaataggacctgcccactcctcccataaagtgggaggtctatttccccatctcctgaatctaggctggtcctggaatttgcttttactaacagactaggtcagaagtaatgttgtctgacttccaagcaaagcttcaaaagggcttacagctcccaccctcgccatcatgggtcccttgaggtcaccccacaaagaagcctgagagagcctcctgaagacaaaagaccactttgacaaagatgcctggctaccacctgcatcaccaccagacactcatcctgtggaccaaagaaccatgctataagagctgtagcaaaactcccagggtctttcctggtggcccaagggtttagggagtctgtctgccaatgcaggggacacagggttcgatcccaggtgtggggaggatcccacatgcagtggagcaactaagtccgtgcgccacaacta

SEQ ID NO: 63361 - DNA, 845 bp, Bovine  19866880787710
  misc_feature (1)..(1): n is a, c, g, or t
ntgagtgccctgtgctgctagaactggatgggggcttctgccttctggtcgggcccctcctacagagcagcaccggagaggcagagaggctaagggacttgcctgatctctcacgagatctgagcagcaaagccacagtgaagactcctttctctgagttctttgctttcccctctgttcacagacaactgccaggaggggtccggactcctgtaggcgtcatgtatcagaaaatgtgctcacgtgggcctctgaaacaggtccgcctgatgaatgtcagggcctgagttgcttttattgcaaaataaccagagagagtgacagggctaatgagaaggggtctggataatttgtggagctttgcctagaaagtcagtgtttccagagccagtaatttccatttctaaagccccttaaattggttcttgaattatgtaatctctgtttctgtgtttttcttacagaatataaggcacattgtaaaaataacatttttggattctttttctccctgagggcgggatatgttcaggaagggggtggggggagaaagactttctgtgcattggtgtcaacacagctttcacgaaggatgtggaggccacaaaagtgatggacttcccttgcttcttgggtttttagggtcacatggactcgacatgatggggttgggtcatcgcatctatttcaggtttccttccagcagtatctttccaaggtcttttctgtccatctctcagcttagccctaaggaaagtacatgatgtgcaagtgatttatgattgtccatctttaaagtcttttatcatgttcccaggtaaatgtgtcaagggtagagtatgtat

SEQ ID NO: 63362 - DNA, 1234 bp, Bovine  19866880840746
  misc_feature (1)..(1): n is a, c, g, or t
ntttgttttttttttttcatggtgttcctttttttttaaataatttatttgcttctagagtgcttgctgccatctctgaggtggattttgcttacaactcccattttgcatgtaaacaaatgtaaacccagcaccgttacaagagtttcctcaggttctgtggctctgaagtgaaaatccagtatctgattgcaggcagtctggctctggtgttggtttgattcccttataattgtttaaactttgtcacgaaagtccacatggcatagaggcagagtctgacaaattttcataaaattagtcaggtagttagctgacttcatgtaaatgaaatgacagagtgtggactctcccattaacatgagctcatccctactgttgagtacaatcatggatcgttaattctcatagcggtattgtgttgcattgtgtgaatacactggaatttattcatcctactcttgggtatttcagtagtctcccagtttgggccatgttctatgtacattctagtccatatcttctggtaacatacatgcacccatttcttctggagtataattcactcaggggtgtaattgatgggtcagaatccatccatcttaaacacagcaccatgttcttggaaaaacttggtggtggttgaagtactgtaaaagcctatgagatttcaataacaatcgaaatttccattctgctactgaaaaagaacttctatgctaaaatattcaagagtcagtttaaatatcaaacccttctagctgataatcaaatgtcaattcagaagccagtttacaagactctttctttgaaatttaccacttttcaagccactatcatttaagtcaaggttagaacatcagatcacagttttttgagcacttacattctttccagcccattaaactgaaaaggggtattcaattaccaagtattactgtaatcatccctgaaaaatcatttctaggcaatacttacagtatagagacttgctccagcaaaaacaataattgtcacttgtccatcatattgaccagtagggctggactcgagatccctttagcagggcagtttacaggtaaggtgatctgtgaagtggaaaagtacaggctacccactgttgcactgtactgcttgatagtagaaaacataaagtcctaaacctcaagtattaaacaaaatattgattcaatgaaagagaaagaagaggagaccctaattattaccctaggaa

SEQ ID NO: 63363 - DNA, 4307 bp, Bovine  19866880860346
  misc_feature (1)..(1): n is a, c, g, or t
nctgcagctggaactggcaacatctgaacatgttgtcttgtagaatggatatcagttcagttcagttgcttagttatctctgactctttgagaccccatagactgcaacataccaggcttcccggcccatcaccaactcccagagtttgttcaaactcatatccgtcaagtcggtgatgccgtccaaccatctcatcctctgtcgttcccttctcttcctgcccccaatccctctcagcatcagggtcttttccaatgagtcaactcttcacatgaggtggccaaagtattggagtttcagctttagcatcagtccttctaaagaacacccaggactgatctcctttagaatggactggttggatctccttgcagtccaagggactcttaagagtcttctccaacaccacagttcaaaagcatcaattcttcggggctcagctttcttcacagtccaactctcacatccatacatgaccacaggaaaaaccatagccttgactaggtggacctttgttggcaaagtaatgtctctgcttttgaatatgctatctatgttggtcataactttccttccaaggagtaagcgtcttttaatttcatggctgcagtcaccatctgcagatttttattgtctctgtatttccactatctaaaagaaggaggtctgacattcagagggtattcaagatgtccttacttactgaatgaatgaatttactgcttacccttgccaagcttcagtcatccatacatagcatttttacttttgccacgtatctaagcaccatttctgttattatcttttttttttctattttttggttgcaccctagggcttgtgggatcttaatttcttgaccaggaatcaatccagatcccgctgcagtgaaagcatggtgtcttaaccactagagcactggggaagtccctattacttttttttttttaccctaaccttcttccaagtgaaatatttgcaatcccagttttgatatgttacttacagtttctaagagattaaatgaaacacacaaatattgtgtttcaaaagcatccatctatgatctatgtaccacctagaattcttacactggctatgagttgaatcatgtccacacttagtgataccctgctggactgcagccagtccttaattgggtccagggcggtctgacttcttcatgaataatcaggaagtctccaaatccctttctcacttagagctgctctttctaggttaggggtgaagcaatgggggggagattgtttctcgaatgctcttagcgtatgcaaactgtgaataaataaaagatgatgacatctgaggctggcagagaagatcctcgaggcagtaactaatcaccaacagatgtgaggtacaaattacagtgaagagagcaagcaaatatgcccaggatttattgctataaagatgaataaaccttgcctcctccaaaagtctctaaaatggactgtgttttaagaaaaactacttgtgagatgaagggcatgatactttgtgtccctgggacatttctcctacattgtacctaaaaaattgtaaaaaaggatgttctctaatgagacattatttctcaggccagctcaagcaacctgtttctagctgcctccttttggtccaaaccctgcttatttctcaccaaagattcccagcctgggggactcttcatcccgtgagtatatgatcttttcaacatcagcagggcagtttctgactctcacattgcattaatgcaactttcttttgtgatttatatttatgccaatgttcaattcttccactttctccttcccacagcctcaatgtcctctccaattcttttcatcctgataatatcctttttgtagctaagtcataggctgtcactttgcatttgtgaatggagtcagagatgtgcatgattatttttatgaatgcccataatgactaatgtactgagtgaattctgagggaggggctttaacttctgcctaatggattgtctcctccccaccccaacgaaacgcttagctttttaacaatctgcctgtgtggaacaggtgatgaaaatctgtcattctttttcagggttttcagagattgtgaaaaaagccaagcctatcttccaattgcttgaattccagaatcactttaagttgtgattcaaaagaagagggaaatgcacttctattttaataagaattggaccagaatgagcttagcctggatatataaatactccttcaaagtcataattaggctgtctgaaaaaaagatgatctgtttttcaagggaaagcaacatggtgggctgagacgacccagcacgtgatatccagagctagatttctatgtcacttctgacttggctatcagataccaagaatgtcatttaacattatgtgtttctgcttcctcatttgtcttacaagtttctgtaaatgaggagaatataagaaagtatttgaaaacctataaagtgctatataaatgaaatcatcctaataaagcaaggctgcttaacaaaattgattattgttgcaaatgcaatgatgctttgtctacctaacatcctggaattaggatccttagccttccaagtttgttcttttacaagaaataattttatttatttatggctgtggtgggtctttgctgctgccggggctttcttctaattgcagagagtgggggccactctctagttgtggtttgagggcttctcattgtgatgggttctgttgttgcggagcacggggtctagggcgagaggacttcagtaggtgcatctcctgggcttaagagcacaggctcagtagttgtggtgcatgggcttgttgatccaccacatttgggatcttcctggaccaggaattgaacctatgtctcctgtgtcggcaggcggattctttatcactgagccaccagggaaggcctcaagtttgtttttgtcatgcccaagaaccttctagacttagcagaatgaaatctcctataggggtgaggatgtaaggcaaaatattttgcagaacatacacctcccctccccactgatcgcaaactcctttgagaagcactgcattggatccagagactgtctcagtaattccagcacggtccagcaccctcccagctctagaattggtcatcattttttggatgaacgctggatccactgagggggcttggatcagagaccatgctatgtgaaactaggcattttcagaagcttctgcagggagatgctcacatcctgagaaccgtctggggagggagatcatcggggaagagtagattctggctcccttttccccattgcccccaggaagctcctctgcatgtggaaggtgtgaaatctccttattatttgattaagacttctcttttgagggacttccctggtggtccatgattaggacaccaatgcagggggcacaggtttgagccctcatcttggaactaagatcccacaggcctcatagcccggcaaaaaaaaaaaaaaaaaaaaaaaaaatctctctctaagctcatgtgtgtacttgaatttccatgacaaattcacatgcgatatggttctactgggctcagatgcagctgccatttataactataactcctgaatattcattggaaggactgatgctgaagctgaagctccaatactttggccacctgatgtgaagaactgactcattagaaaagaccctgaggctcggaaagattgagggcaggaggaaaagggggtggcagaaatgagatggttagataacatcactgagtcaatggacatgagtttgagcaaactctgggagatagtgaaggacagggaagcctggtgtgctacagttcatggggtcagagagtcaaacacgacttagcggttgaacaacttgaacttcagaaaatcttcccaccacatggcaaaagccatagaagaaagcaggtctccaagagaagtctaaatattaatttaatttttaaaagaaacttattattttttggccataccaaaaggcatgcacgatcttcactccccaaccagggattgcgcttgtgcccactgcagtggaatcatggagtcttaaccactggactgccagggaagtcccgagtacatctaaatattagaaacatcacttttttgttctctgtgctagaaccaggtgaatcctggtcttctggaactctccatcccctattcactttgcttggatgactctttctacaaccctacagagaatacatttcttttcattacaggcattaaaatccattttgaggtttttgctggggcctctgagaaa

SEQ ID NO: 63364 - DNA, 816 bp, Bovine  19866880915911
  misc_feature (1)..(1): n is a, c, g, or t
ntaaaatgtttcctacccaaggcaccatttcattgaatagcaccttttatagggaactaagtcattggcaactctgaaaactatactgttaatctgtggggagcatgcaaaaatttttttttagagatagctttcaaggacactgatgataaatctatgaaaagaactcttacaagccagggatttatggaatttgccatttatttgtgtctttgcttttgtcaataacactacgatctgctgttggtgtggaattatccactgacccaaatcctagcaagctatcaaaatctgtttctcagctaaagtcgtgcagggggagatacatttatcagtgccaggcaggtggccactccacagagggggctatttgtgactcctttcagtgtcggtcgaaacggagaattagggataaatcacaacccacttacacaaatagttttcaaccattactaagcactcattgtttcaaaagtaccatcacagaaaggctgtctcctggtttcctatgaacttttaaaggataatgacacccaatttgtttatctaatgcacagccctgaaaattactgacacggccaacatgatttattgttctcacattatgcaaagtgctttggggagatcatggctcattatgcaaaatcaaaaccattgctgttcacttcaatgagtctcaatgtgtcactgccaggtgccctccttgactgacgaccgtgtttgtcagcgacctgctgcctaagagttcaaggcaagactgaaatgccaagtatagagtcttatctggggagatgccaagtggaccaaagtcggtcc

SEQ ID NO: 63365 - DNA, 1350 bp, Bovine  19866880938362
  misc_feature (1)..(1): n is a, c, g, or t
ncctcatagctcagtcggtaaagaatctgcctgcaatgcaggagacccaggttcgattcctggctcgggaagattccctggagaagggaatggcaacccactccagtattcttggctggagaatcccatggacagagcagcctggcaagctagtctatggggtcacaagagtcggaaacgactgagtgactaagcgcacacgcaaagtggtggttgtggtaaagaaaccagcagtgcaggcagacatagaaaacatggatttgatctttaggttgggaagacaccctggaggagggcatggcaacccactccagtattcttacgtggagaaccctatggatggaggagcctggtgggctgaagtccataggttctcatagttggacaagactgaagcaacttaccacgcatgcatgcaagccctaccatctaattagtatgtaattaagacacttaagaaagtaggattttctcttgctaataatggaccttggtaaaataataaatgttgtggcaaagtggcagatgtttttaccacttcctctgcttcctaaagaaatttttaggaatgagaactttgtactcatttaggagagaattaccagacagctctggcaatttgtgaaacatcatcttaaaactggaaacctggaatagaaatcctaaccatgctttgcactgtttgaaaaaaaagtgtgaaaattccctaatggctgcagtctttaatatttgatttttttaccttgaatttttttttttttttttggtagaaaagtgcaaacctagaaaaccttttaccaagagtttaaataatgaattagagccaatcctttaagggcactaagtcactgggaatcccaccatctcttaaaaagggaactcctggtctcgtgagtgaaaactgagaaatagtgaaaaaacaaatgtttggcccacccttcctcatggctgtgtcacatgactaggaaaatcaataacagtacaagcatccaatgatgatctcatttttttttttttatggagctgcgtcaattcactgctaaatgatggcacttcataaaggacacagtcagataattccattgtatctgaagtcgagtacgttaatgtagcctgaattaatttccctggtgttaaagtgcaaactgggctaataaaagtgacacattgacttttccagagaataatgtgcagcttatgaggaatggcagcgtaaatgaaaattagcctcaagacaatgttaattatcctctacccattagcagaaggggaattgaatgactcgttttacagcaaagaaaaccctgctggcttcgtaaagggaaactatagtatttaatgttctaatta

SEQ ID NO: 63366 - DNA, 1166 bp, Bovine  19866881099332
  misc_feature (1)..(1): n is a, c, g, or t
nataaatcttgatggagtgaaaatgtgtatcatatgaaaattttagaatggaatttcccatttatttgatgcattattcattgaaatcaaattatctgttaataaaatgcagttgtttagacagggcattgaggatttgttgcaaataaaattgacttgtatcacaattgaacataaatagatacatccttaagggagaaaccaattcatcattaattctcatttttaaaagtataggccatgtgcttggtaccctatgtgcaaagtatatgacaggagaatcataaagcagactcagtctgaaacagtaaaaataactaaagattcaaataattaaagatcttatgcaaatcatcaaggaaaaactaaacaacaggatagaaaatctagcaaacgacatgagtaagcaattctcagaggaaaaaaatgtcaccagcccccaggatgctctgtcttcaggaatcagggaaacacaaaatgcacaatgtcgtttcacatttatcatattggtggaaagagaattctgacaagaagtgggataatgggcatactggttcactggggttccctggggacaggtgtgtaaattggtgtgtctcctcaagggaacaatttggcaataaagccaagcagaaggtcttcctctgtgaccagcagttctgctagacagacacttgtgaaattcttggcatctggatccagaggcagctacaaagatgtccactcattgcaataaagattgtgtttgggggctcagtcacatctgattctttgtgaccccatggattgtagcctgccaggctcctttgtccatgggattttccctgcaagaatactggagtgggttgccatttcctccaaagggatcttcctaacccagggatctgtgtctcctgcatctcctgcattggcaggtggattctttacctctgagacacctgggaagccctagagaaagattagaaaccctctaaacttccatcccaggaaagaattaaatacaaaccttgtgacttatgcgtacagtcatgcaatgtatgtgagttaaaatagagcttatgcatcaaaatggatacattcctctcaaactacaaacaaacaggaaataaagtaagttgtagaaaaggtatggtatgaccctatagccatttaaaagacatgcaaag

SEQ ID NO: 63367 - DNA, 1339 bp, Bovine  19866881099897
  misc_feature (1)..(1): n is a, c, g, or t
natgagattatatacacttttaattattgtcttatgtctttggacaaatgactttgatgctcaaagccttttcaaatggggatcatcacaccctcgttcatttggctgaagagaggagtcaagatgagggagacaaagtggtcacaccgggcccacccccttacatttgtagacttggaacaagcacgtaaatggagcttgtgcaccatcttggtttggattctcccagaagcagaagctgaaacaaacattgaaatgcaggtatattttgtggacaaaaaggggaggggaagtaagacaaggaagggcatagagccaataaaaggtggcatcaagcgtgtcggtcatgtggatgacggcagacttcccctgatggggtaactgagggtgaacacccctgagtggagaacctggagtacttctgtcccaacacccatcggtcttttgttggaagttgctcctgggagacccatttctctcatgttccgcctgctgttctggcagcagagcagactccagcaggaacctgaagccccgaggcacagagatgcagtcttgacaattggaagtcaggctgagtgcacctgtggggaagcctgggaacacgaggaggggtgaggggcaccctcagcatctgctgcacacaacatatgtctccatactcaagagttataaatcaagtaaacaagctgataaataaaagatgctctgtcctcccatcatggctaatctacctttgtaactacctgggctgccacattaggatccagaattcttggatgcaagtcctcagattctgccttagaatctgtgtcccatggcacaatcaacctgggcccacttccaaacctccccacctggccaaccacgaggggcatacacaggcatttggagagcgtcttcagtgccctctgcaaagagctgcccctcaccaccccttgggtttggctgtaaacacatgggcagtggacccatgtgggttcgctgaagatgcatccagggaagaggatgtgcagatgcagaagtgggttggtccactgggacaacagctttcagggtccccaggcgacgaacactgatagtgcctgactgctagcgcctccatccttactgtgcccatgaaagctgacctcacagtggccgaaggacccccagaagtcgttgtcgtaatccctagtgtgatggtattaggaggtggggtctttggagggtgagtagatcatgagggtggagctcacacaaatgggattagtgcccttataagagcttcctggagaaggaaatggcaacccactccagtactcttgccttgaaaatcccatggatgggaggagcatgg

SEQ ID NO: 63368 - DNA, 648 bp, Bovine  19866881167797
  misc_feature (1)..(1): n is a, c, g, or t
ntgcaggggacgtgggttcgatgcctgctgagggatcacgggaattaagatcccacatgccgtggggcaactaagcctgcacacctcaggtaagacccaacacagccaggataaataaataaacatttattcttaaaaagatatgcaggatttttaaaaataaataaatataccccaaaagctcctctcaagaaatctcttttgggcacaaataaagattaattaattaaatgagtatttcaactcaataaacagaataaattgaccctatgtagaaacatctgggtctatctgctaatctttacctatgtctctgaggattatttccccagaatctattgaaccccctcaagtctgacataagcttttaaaacatgtcataaatgatatctgaagatcttatccaggcaaatcaagaaaatagaggcatggtataaaagaaatctgcatctgagttattttcaatcactaaaaagctatctggcaaaagccaattggcttatattgattttgaaaatcattctctgtattaaaatattctaaatacaaatcagtgttctttgctcaatatttattgtttcacttgccttgaaataacatgagttgaagtccttacatatatatcatttcctttgcaagatgagctca

SEQ ID NO: 63369 - DNA, 1411 bp, Bovine  19866881254431
  misc_feature (1)..(1): n is a, c, g, or t
nttgtggaagaaagaacattgcttggctgactcagtctggaccccctaatgttgaaagagtaaggccttaagcagatcacaaaggaggaaattacactcatcagtgtggaaaaagatgttggcatgaataatgatcagggtaaggatacattttggaaatgttccaaagatggtaaaaggcaactcaccagccagaaatattcgtgtgggaagaaaagaaaatatgaatctctgtactactaataatattatatttcccaactgcaacttatagtggggggagaggaagtcatgaacccccagtataaggagaggaagaagaaaatcctaaaggtttccatggctttcttgaaagtaaacactacatattgactgaacctgaaatgtagaagtctattgaaagtcatggtgcactgattattttctatttatctcttcttttgtccaagattcattctccgcctcctgtgaacccagggctgactgagatggaccacatcacccaggggctcagatcaaggtccccattagccttcagcttccaactgggtttgccaatgggattttcttggcatgagaatagaagacagaggataggtatcagtcttctttcccacttctctgctatattccagattgcatatggctgctgtattccttcaaaaccctagcttgtgacaggtggtcccctatctctgagtctacctcttactgggccctcctccctcgtcaagcaagagtcgtggcttgtgaccacccttgggagtctgagggaactaacactgcaatttgccttactcctgctcacacctcattcttcactgaagtttctcccattccaaccatctggagtttcctgctggaaccctggctcatatgaaataattcagtttgtttaataaggtatttgaacacatctaagattcaaaataatctgggggtgtcaactggctagaactacaagttagaaactatccattggttttcagaaagttttttaaaagtcctattgtttgagattacttagccacacaatttcccaggcttggttgttggggttcctctttgagcagcagaaattaaatagataaaaagaagtcacactaacaccattccccccgtggctcaccttcccacatgaactcagacaggaaacaggacataggatgcccaataataaaatgttccaggggcttcttggtgagaagaaggcactgtcagaatgaataaatgcaaaggtatgctgtaagcttcaagatgagacacgacataccaagatctcgatattagaaacagtgctatttgcaatttcccaaatccttctcagaaatatactagttggcttgggtcagaatgcagagttttaagtacataacaatacagatacacatttaggcaaataaaagtaagt

SEQ ID NO: 63370 - DNA, 1592 bp, Bovine  19866881425976
  misc_feature (1)..(1): n is a, c, g, or t
ncagcccatttatttcaacagataacttctctcctggtggatccaaacactcatgttctatttctctttacacagtccccagtttctgagaaagctctcttgcataacctcaggtgttttgtttttttttttctgtggaatccagcctgggtgctgccttcagaccagcaagatccccaggggttctcatcagagctgggtctaacgagggaagcttttgcacagagtgtcgactgattttcttccctcctgaggtgggagtggtgcgggtcagaataatgtactctaccctactccacagaagacaaatgatgcctctttggttcccccaaaggacaagtgagtccccagtccatatgtaatatctctgcaggagctctctgtcccaaagatataacacagcacagagcgtactttcttatcatgctggcggaaagtcaactcctgctttaacagtaaactctcctgacatctccaatggagataattacggtgcttaagggaacttttggccttgctaaaaatacttagcaacagtttgcatggcaaggaaggcacttacaggtgatccaggaaagactctggagccggtgtttgcgaattcatcagggtacccccctggctgcctgtccgcctccccatctgacgtgctttcattcctccttcatcctcctcctccttgacctcacactcctgcttctgacactagcaagcttaggtgaactccatcctacccaacagtgaggggaaagcaaggagataaagctgtttaattcagggactctggcagatgctgctaagggttcaccaaaccctaatttcctttccacttggaaacacagcttaactaaatttctcagggttccttgtggtagaagaaagcaaatgcctgaggcatggtcaatagaaatatgggagaaaatgatatcttccaattaaagcatggagcaaagaaagcctgtgggtatcatctctgtgtttcccccatccaccagctaaacggtgaagccctagagaagggcagagctacaagatggaaagaatctgggttcctgagtcaccatgtggaagatgcctactatacacatgctccaaactgttaaatgaacaaggaacaaactgtgttagccactgtttatgtcagataacccatcctgactaatacaaaattcctgacccagtgttcctcgtactcaaattctattgttcagttgctaagtcatgtccgactctattcccaaattcaactgggtcttccaggaatccctggaagagcccatgttggaatactacactctacgctgagctagctacccacaatgtacttcttcattcattatcatccttatatatgtcttccacctgctaattctatcctgtatgcgtttgctctaataaaacataatcatgagtatgtcccttggacagcaaggagatcaaaccagtcaatcctaaaggaaatcaaccctgaatattcactggaaggagtgatgctgaagctgaagctccaatactttggccacctgaggcgaagagctgactcactggaaaagaccctgatgttgggaaagactgagggcaggagcagaagg

SEQ ID NO: 63371 - DNA, 918 bp, Bovine  19866882032756
  misc_feature (1)..(1): n is a, c, g, or t
nactgaagtctctgtttttttttccccctatctgataaggtgaactataatccacttaaaaaaatcttagcaggaatgtcataggggggtggcacagggacagagcagttgcaaattgatgtttctctcctcatcattttaaagaattaggattctatcaagcaaataataactgaagtttggcgatgcatcatgcaagattaatgtatgaattagtctctgatgagattggttttaattaagatcacaaggctgagtgaggacagcaaagtgaaagagtgaaattatactaagacaagttttctgtccagcaaatctatttggaagtgcccttaaggtttcttaggaaaatgctttaacacaatacaaaattattgcaggaagctggggacgccctcccttccagggcccaagagtgggctgttgtctaacacttggaaatgaattgtctgagcagacacttgtgctcacaaagcaagagacttcactgggaaggcgtgcctgggctgagagcagcagggtaagtgaacccaggagaactgctctgccacatggctcacagccttgggttttatggtgatagagttagtttctaggttgtctctggccaatcaccgtgactcaggttccttcctcgtggcgtgcacatcactcagccaaggtgattccagtgaggaggattctgggaggttggtaagacatgtggaatctccttttgacctttcctaaattcttccggttggtggtggcttgttagttccatattccttaccaggacctccttttgtaaaataactcatgcaaatggttactgttgtgcctgtgtagggagaatggtttcagccaatgtttccactaacaaaatcatcatggtgtttctactggaagttgcaaaccctgtttagtagatgcagacat

SEQ ID NO: 63372 - DNA, 753 bp, Bovine  19866880467278
  misc_feature (1)..(1): n is a, c, g, or t
nttcctagaaagccataacactccggtaaccgccaatgccttctaactggcctggacaaatttagctaaattctgtctgatgtgagggatgcacagtaagttagaattcagtggtgcaggtcatgcaggtacagagtaaggagcaattaactttggggcttctaggaggaggagatatttggtttgaattttgaaggctatgtaggagttctctgtgaaaagaatagggggaaaactccttgaatgtggggaaaagagtgagaaaagcaccctggatgtttggggatggatagaaatcaagtgaggctgagtgttgggtttacagagggtggcacaggcagataaatagctgggtctgggacacagagggccttgagagtcatgctaaatggcttggaattaaccgtataaacattggtgtgtgtgtgtgtgtgcatgcatggagtttttcagagagtgatatgatcagatttatgatttgtaaccatggctctgggaatctgcagggagagagttggtgccagggcaatcaattccccaaccagattgtaagtttcttgggtgaagcattaagttagtagctttccctctggtatttttccataacacctagcaggtgtggggcatgtagttggtgctcaacaaatgcctgctgtatgaagtccatgcatgccccaggacacccatgcatgctggtggattttagtagcacccatagcctgcttgtggtgctgtccatggtgctaatatgag

SEQ ID NO: 63373 - DNA, 1593 bp, Bovine  19866880674186
  misc_feature (1)..(1): n is a, c, g, or t
ntgtgtctgggggctgcgtgcgaggctgtggttgtgcccgggtgatcctttatctgtgtggatctaaggtcacatttctctctcggttcgggtgaagggctggctttgtgggtgcgtgtggtgctctgtgtgtgtgctggtgcacgaggggcccaggggtccccgtgggtaggaaggaggtttgtggctgctcctttgccatcagctgtttcggtggctctgatgtgaggctaggggaatcaggagccccctttctcggctgtaagggggcgtgcttccaagacctggggtggccatgggtattagcagctcccaggaggacagcagaagttaggggacgctctcccacctcagggtggggggattgatgcacgggtggaagcacatgcagacccatttgtgtgtgtggaagagcacacacctgtcctgcgcacacgtgtggagacacagacccatgtatgtggacacatgcaggcactcagaaacagggatacacgctccccctagtgcacatgaaccacgcacagagacagcccttgtgctcacaagagcacatctaggcccacatctcaggcatctcagcccacccaagacagcctgaaggtgtgtgcgcacaaatgcagctgcacgcctgcccagaaatgccccttcgagtgccacctgcgtgcctcctcatgactgcctgcacacgcgcgtgcacacacacacacacgtatgtacatgggttgctgggcttctaaactaccaggaatgtgtccgtccttaatcccagctcttaatcccagagtccagggagcccaggccaaaggggcagctggtcagccggcctccttagaggtgattaaggcatgggcgggggcgggtgcaggggacgcagagctgtgtcttctgcctgacctccagggatgccacagagctcagagcttgggttccatctgagacttggttacatggaatttaccaaccctggggtgcagacctgctgaggaggccagccaggggtgtggctggtgtgtctccagggagagtgacagctgtgtcagaccagggaaggcagtcccttgatttaaccacctgcctgctggggtctcagtgggaagccttctgggcattctgacctctgggaaccctgtttctggctggagcgcttctggaccaagcaggaaaatgaggcccaactgggagatgctgaatttggggtcctgagtggggaggaaggtggtcactgagacaagggtgggatggggaggaagtgggggctgagctgggcctcgaaggtgtccgcgcctggggcattcggaggtgcacgaggacacgttggattgtcacagtatggggggtgctgctggtggcatttactgggtgggggtcagggctgctacagggccgggagaactgtcccaccccggtgtctgcagtgctcctgtcgagaaccgctgtcaggtcaggcagcctgggaggggtcagtgtgggccacagctcagagttgagactgtccccagcgcgccgtgggagggaaggccatgcatactgcccagggcgccatagaggggcactgaggttgtgcaggcagagtcctcctagcctggcccg

SEQ ID NO: 63374 - DNA, 1496 bp, Bovine  19866880717337
  misc_feature (1)..(1): n is a, c, g, or t
ntattccattccatatatgtaccagagggatttcccagtggctcagtggtaaagaatctgcctgcaatgcaggagccacaggaggcgcaagttcaatccctgggtcaggaagatcccctggaggaggatgtggcaacccactccagtattcttgcctggagaatcccatagacggaggagcctggtgggctacagtccacagggttgcaaagagtcagacatgactggagggactgagcacacacacatgcatatatgtgccccgtctttatccattcctctgttgatagacatttaggctgcttccatgtcttgggtattggaaacagtgctgcaatgaacactggggtgcacatgtcgtttcggatcatgtttttcttcagatacatgtccaggagtgggattgtagggtcatatagtagctgtatttttagttttttaaggaacctccattctgttctccataggggtaaatgaatcttgttgagagtaagctgagacttagatttagttttttctttctgttcagagaaaagttttcttggaatgccatttttgataacagattatatgagtttctttgcctttaaggaggaaacggggcaacctttgtaagtatgacataacccaaggacattacataggctgattagaagcaaaataggtggcctagtcgacttccactggaccttgagcctcagtatacgctctttgtaacacatcagcagactaagtgaccccaagtaggtggtggcacaattcaatgtaaagaaacttttagataaagaaatgtaaatgaaataaaaaaattttttaagataaggaagctttaaggaaagaaaatacaaataagagctttaggtgaacttttagaaataattacattttaggatctctccagatattcaacaaatcgaaagttaaaattgggctaattaagtgataagtttaaaataagtttaattgagtaaatgaactttaaaagtaagctggtacaaaacttcaatttggcttttctctctgttaaaaagagacaagactttaaattgccattgataacaggtttttaagtttctttacttcttaaatgatcggttctgtatttgcctttgaaatcatttattgttactttggttaaatgaataactatttctcacaatgacccatgctcctatctgagtgtcctaaactcttttgatatttattgacaaaacttccttaattaaattctaatgaagtacttttgacctctagctaagattggtatgcttcaaagggcctctgaaacattccaaagagagatattaaactaattaggttaatttggtatgttgaattgcatgggaagtattgtgaaatgagtaataaatctcctcaggttatatagtatgataaatgttactaatatagaataccctagaaatcatatggaattcctagaattctaatatatcctggtagaatgttatcagtcataattctagttactatcttaa

SEQ ID NO: 63375 - DNA, 2559 bp, Bovine  19866880783914
  misc_feature (1)..(1): n is a, c, g, or t
ngggccgctgtgccgctgtgaacagcctgacggagtagggtagtgtgaggagggactgtagcctccagccaatagccagccagaaactgaagccttccgtcaacaaccatgtgggtgagcttgcaagtgggtcctccagtcccatcgaacccacagaagatgcggcgtcaaacctcacgtgagaccctgagccacccacctaaatgggtcctccagtcccatcaaacctgcagaagatgcagcgtcaaacctcacacgagatcctgagccaccacctaagctgccttgcaactcttgcctctcagaaacagcgtgagatcagtgctgctttaaatcactaaatgtttaaaggggatcttttgttatgcatcaatagatagctgacacatcctggattatgtcctcttatttgagataacaactgtttcccctgccttaccccatctaaacaatcaagatcgaagcctggtgtcaggtgggtagaccacctggtctagcacagctggttggaccaggctgagaccttcttttaccaacagaggtccgcatagtgaaagttatggtttttccagtagtcatgtacggatgtgagagttggactataaagaaagctgagccccgaagaactgacggttttgaactatggtgttggagaagactcgtgagcgtcttggacagcaaggagatccaaccagtccatcctaaaggaaatcagtcctgaatattcattggaaggactgatactgaagctgaacctccaatattttggccacctgacgcaaagaactgactcattggaaaagaccctgattctgggaaagatttaaggcgggaggagaaggggatgacagaggataagatgacaggttggatggcatcactaactcgatggacatgagtttgagcaagctccaagagatggtgatggacagggaagcctggcatgctgcagtccatgggatcacaaagagacacaattgagcgactgaactgagatcgtctaggtattcttttttctcttctcttttttccttttcacctccttccctccttttctgtttttctttcgacaggagaagattgaatcaaataacatgatggaatagagtactaggtaaactctggggggagcaggaccatcaagatgatctgtggaaagaggaaattgaagtgagagagaaacagggatgagggaccccggttgtggagatatgtgctgcctgagggcctggcaggggttggtacatccagttgtactgctggcgactgaattctgggaaactcctctgatgcttaaaataaccctccttttgacttgagtttctttaaacttctgcttttcccaatcaagtcatttgaagtcagtaatcatcgtaggcaacattttctttgaatagacacaaaatgttccactgagtggacgtgcctgaagtttgcacaacccttctctgcttggacattaaggttatttcccatttctctctgtcataaacaatgccatgatgaacatctccagcccttgaagctttgtttcacatctccagcaatatcttcaagagagcttcccagaagggatgagtgagccaaagcattctatcagatgactttccagaaaactgacactgatgctttcaccagttgtagaagaaatcactcatctcaccggccctcaccagcctcaggcttctcttgctggaggctgccttgtcctggcacttactgggtctaggtggatctggctcagtgcaccgtgctgggggcagagcccagatgttgtagcagccacatcgtgccagcgcctctagcgtctaaacagtcaggagagatccacatagtgttcttttatttaaaatgaactggattctaaacaccgcttaaaagtacattaataatggtgttggtgtatcattcatcttgaacaagtgacagatatttcccccagcaaaatgccaaagtgggaaagtgggttagggagttagattgatgagtttctgtcaaggggctcattacctcttgcccagacgatctcccgactggcccccctgcctccagctcccgcacctcccaccctggccccatctgctccctcccatgctgatgtctagttaatcttgctcatgggatttgtggcagtgggatggcgggaggcctggagtcaggtggccagggttctgaccttggttcggtcactgagttcctgggggatggtggccacctgcttctgttcaccccctttctcaggtcaacactctgatttttcttttagggtcctggtccttccttagtcctggggtgtcatgtggggctgacacggctctgcccacctgatatccactccaacaagaggcatattatacctaggcttggtcatcgagagttctgcagacccttggctcagtaattagtccaagggatgggcagcatgtgtcccaagctgagccagccattgtttatggcctggatccaactgtacctgaagttcatgcttcagcatcctagttatgtgagtcaggtcccctcttccttctctgtttcttctttttcctcttcttttaaaag

SEQ ID NO: 63376 - DNA, 1373 bp, Bovine  19866880905351
  misc_feature (1)..(1): n is a, c, g, or t
ngaccatgttgtccagtcttcagccaccaggcaatttgcactgtggggattctgaacaactttattttaaaaaattatataacttggcagatctcgcttttcctcacctgggttcagattgcgagtccgcactgtagcggaccctgcggtccggaaccatggcggttgttgtctgagtggtttattgtggcgcttgaggctacaagcccaagtatcttcagctcaggaagaagttagaagagttctctgaccgcctggacatctgcagcgaggggactccccaggtcactgatttctttgaagtgttcgtagcgggaaagctgattgactccaagaagggaggcgatggctacgtggacacagagggcaagtttctaaagccgctttggcttgatgtgccctaaagacagagaccagtgaccttggcccagcccctcttagcagaggcttcatgacaggaaggactgaaatgtctcttggacgcctggtacttccctgatgttcccatggccgccggttggagcaggatggacaccctggtctttgcctgtgtgtgtgtgtccccagaagcctaatgttgctcactggtcctgctgccctcccccatccctcacctccctgcatctccctgcccccatgtcttccttctaccctctgttgtttggggtggtcctgctccaggcttccttttcaaggggaagccgagagcaggatcaggatgagtgagtgtcagatttcaccagcaacagcaacagttcacaactcaataaatggtgatgaggttaacaacaacaacaacaacaaattatataacttaattcagatagcttcctttgtggctcaactggtaaagactccgcctgcgacgtgagatacctgggtttgatctctgggttgagaagatcccctgcagaagggaaaggctaaccactccagtattctggcctgaagaatcccatggtctgtacagtccatggggtcgcgaagagtcagacacgactgagcggctttcactttcttcattttaattcagagggatagaactctgtctggcgtctttaacaacaaaacgcaccgtgccataaaatgtacacattttgggcttccctggtggtccagtggttaagaattcccctgacaatgcaggggatatgagtttgatctctggtctgggaggatccacctgccttggagcaaccaagcctgagagtcacagcaactgagcccacaagccctagagcccgtgctccgcagcaagagaaaccaccacaatgagaagcccgagtacagcagcgagggagtagttcccgctcgctgcaacttgagaaagcccgagggcagcaataaaacccattagagccaaaagtaaataa

SEQ ID NO: 63377 - DNA, 1494 bp, Bovine  19866880971331
  misc_feature (1)..(1): n is a, c, g, or t
nttttccagaagaaatgattaaatagtatttcaggtctagagaaattgtcaaactgttttcttcttcttcttcttcttcttctttttaatgttattttccttaaagtaatacatagctattgagttctactgcaaaatatgaaacataagacgtctcttagtgggctccttacttccctagagtgagccactttgaaatctggggaatttgtttctaaagcacatacattttgtactttggtaaactgggtatttcatgaatttacttttttggaattgtgaaatgttctttacttagtttcctcattgatactggagttaaaaggaaggtaaccatatctttgtataaggccttcatattcttcaaaatctcttttcaagtcttcatatcataccagcccaataattaaatgtattagttattcccaggttgtgaaagatgttttaggtaacttataagtagcagagattgaagaagaaattgatggccctccagtgggttaatgatctgctcttctgagtagagtctgtgtatcttatcttacgtataatatagttctctgtattttttggaatatttttcttctcttgtttttaaagtaaattgcagggcaggtgtgactcctacagccttgatttttaaattgttcacttttaatttatgaaatcttattacagcatggaaaatagagacaaaaaataaaagcaccccagatccagtgtctcaacaccctgaccacattaggatcatctcctagaccttgtattggtttttatggacttttgctaggattaggaaaatagaagacagaacctcttaggtctctttttggggtcacagtcctatttactgtcttgttcagtgtatttaatgtctcacccttgtatagtgttaagtattagggttgtggtctgataataagtgagtagctatttggggcccaactctctcatgtataacaactaataaattgttgacaaaatgccagaaactacctgcagatattagatggtgaccaggaacacagcgataaccagaagtgagtagaggaggttgttgatacttgaaagaaggttcactgcattgggaaaatttcctcctcctcctcccacacctccttttttgggaaagtcgggagatacataattgacaggtaacattgtgcaggttttaagtgtacaacctgttggtttgatacatttatatgttgtaatattcctacaataactttagctgttatgtcacataattatcattttttgtgttgagaaccattaaaaatctagtctgttagtaactttgaaatttataaaaggtgttgttgactataattaggaaagttttagtctgtaggctaagttaggatcactggtgttccgagaaggcagtgacaggggagaaattctggaaaggaagagaaccagggaggcggggggagcctaagtttaaactttgtacatctggttcactcctgaaccaaactgcacaggacg

SEQ ID NO: 63378 - DNA, 1701 bp, Bovine  19866881162391
  misc_feature (1)..(1): n is a, c, g, or t
nctttacttacctgggtttaccctcccctgttagatggttgggtctggtaccctccatgacctgtgcttggccattgttgacgttggagatcacagatggcaaagatagggtctcatagagccaaacagatgaggaattaatcttccaagaagcctcatttgctgctgaccttgaggtcagagcccaggccaaacaagcacagcccagcgaggtccctctaaggtttggccctggatttgtctccttacagcaatgttgtggagaagtgtgtcactcacgcctcccgtacagagcgcgctgtgcttattgacgaggtgtgcaccatgaacgatggtccccacagtgccttatacaccatgatgaaggaccagtatgccaactacgtggtccagaagatgatcgatgtggcagagccagcccagaggaagatcgtcatgcacaaggtaggccagtctgtgcaagtctcaatcagagaggaggagccggccctcgcgtcttctcagttctgcaatacaggagggtgggcatcttgctgcttcttgcacagtttctcactagattgtgacttctttttccttttatctggagtggccgctgtccttgtgtttgctgcccttccatcagtaactcaattggtgtgaatgttaaagtcagtctttgtggggagtcccctcccggtcttcaggccatgcttctacctgatggctcccaggagaccagcttctcagtctagcagatcagcctccttaccttatttcctttcctccctctcatcattgattccaccaccattactgaacaagctcctgcctaaggcagcacctggtctggcacactgatctggtgcccactgtgtgccagtcgccagcacagagatggccgagactgagcactgcccacagagcacatgtggggaaggggtgacgtgagcgcctgtgctcacgcctttgagggcagactttgtaggaggagaagtccaggctacagaggaggtagacaggaaaaaatgggacagaaatctgaggtgctgtgtgctgtgagtgggagctgacacagaaagcacatgaagaggctcatggcctcagagctgtcatggaggaggtccagccggctccacacagaccacggggcggagaagcccagccagcccccaggcaggtgtgcaggccgcactgtgtctgcgggaggcagtacctcgagctttgggtgttgcccatctgaaccctcagcctttgggctctgaattcacccagtccttctcgatggagggggtgaccgtggtctggcagtgatgagccacttgccctctctgagaacagagttcggtaatgagactctactctggactcaagttctgagccagacgaggcacccaccaacctccagttcaaaacaaaacaccatgctggtgttggcgatggcagttgaaggctggggagtccagagtccttaagctgtgagactcagatggggctgtcaagatgctggtgagggcggaggaaatgtatgggacacacagcaggttgggagttcattccactcagtgcccagcacaggaggtacagcgggaagaggaggatgttgtgtgtaagtgattagaagcaggggtgaggctactagtttgttttctcctaatgttcagatcgttatcagttttaattttccctgggatgttccaggatgaaaatatgatgactgaa

SEQ ID NO: 63379 - DNA, 869 bp, Bovine  19866881229485
  misc_feature (1)..(1): n is a, c, g, or t
ntgtattagctgtgtgacccagacaagttacttaatctctctggacctcaactttcccacctatcaaatggagatgatgtgatgagtgggataatgttacatggtagggatacggggagtaggaggaagagttaacaacattcacatatgcccctggatctagtcagcactcagtggtgtgagtcatttttatcaagggtccaagagcaagcaatggcctctagatagtgggtatcccatggattacaaagtgacagctcaggagaccaaatgcaacccacaaacggcctctgtttggcccacacagtgtctttcttttttcctttctttttcaaattttgccaacatttaataatcagatttcacatcaaaatccgaattttctgcttctcttgaaaaatataaacaccgggcaatcctaggcccgctttcccaccagttaggtaccctccagagccgagtggccactgcccagctcccccagcctttcctgggtccagccacctcccctgctctgccctgcaggccctggaggctgcaccccctgacctggtccagtgccttcatgaggcacatggggaaatggggctctaaagggggcagaaacccagccagggtcacacagcaagtcagtggcagagctgaaattaggactcaggtggccagatccccagtcctcccggaacactgcggagacgctaacgagagaaactggccatgcccccaaagctcctgcatctacagcccttagacacgagcttcactgggcatggaactactgccctgagccttaatttcttcatctattaaatgggctaaccgtcccttcctcagagtatgtcaagaagaaataagtttttaaagtaagg

SEQ ID NO: 63380 - DNA, 1877 bp, Bovine  19866881385345
  misc_feature (1)..(1): n is a, c, g, or t
ntaaaatgactcaatgagctttcatgctgaccttgagggtgcagaactgattcttccagggagtatgaaccatttccaagttgatttatgaggccgtgatgctggtgagctttgccatcctctatctgggagctataaccagggacagtaggtgtgatggggtctccgtgtgaatgtggggatgctgaaatattgagcagcctggatgccagcatcctctgcctctgaggagactccattctctaccctgaactgagagacagtcgtccatattgaacattttccttgcctactgctagaaaagtctacaactacgaactgggggcaactgtttcagacccaagaaaactctggaaaattcgattcctaggcctgagaaaacttctgtccatggctctggaaaaccctccatccttggatctgggaagcattgcttcttgggcacagaaacctacctcagtacaggctctgaaaaacattgttcctgaccttaggaatcactccattgctggctctagaaaacacaccatcctaagctgtacggaatactcccttcatgattgacaactactctgcctagggctctagaaaacacagtatgcaaaaatctagaaaaatgttcatcacaagatctggagagcttcccactctaagtctggaggtctgagcaggatgctggtaaccttagcaatgggctcttggtgggagaggggagctactgattggtagcatttgctgattttcgtggcaattggaatactccccatcatggctgattttgaattagcagtttgacgttgctgaaagtggatttgggaggggacgctacagtcacttcatacaatcactagtaagagtcggctgccttatccttcgtttctagccctggagggtggagggcctaactgtagggtgtagaggactctgagtcactgggtatggaagacttggagcctcagagaggagaagattcggtctggagtcctcacagtctgaaagactaccaggccctggctgaagaggacgctaggccacacgtctggctagtcccttgtcacttgatttatggtgtccctccatcagggaaccattgatcattaaccgaaaccacccgtcttggccaggcatgatgataaccacttgcttgagttatcttacaacaggagatcccaataaagaactcggtgccgatgcaaactaaccggaagaattgagcagaggccaaaaggaggaaagaggacaggatatgtcttgccctaacctcccagaagccctcagaactggaatccagtttggctgagagatgcccccaccaccaggaagaaccctgagtcaccagatgtgggccaagcgagacgattggccagagaccacctggaaactaatccctttatcataaaacctgagactgtgaggcacttggcagagcagttctcctgggcccccttgccctgctgctgtccaccaggcacccctccttcccagcagtctcttgctttgtcagtatgtgtgtctcctcggacaatttgtttccaagtgttagacaagaacctgctctgaagctctgaaaggggcccccccttttctgccacccctccctaaaccaataatttcaactcaaagatttaaggggacatgataggcaagaaagttctgaaaagctgacattcctaatgttctggtatgtcctgcctgccattaatatgtacatattgaagacgtctccccctgtctgtgaggtctggacttcgatcgtctggaaggtgaggtctatttcaggctgtcacatggatggaaatggttgttattacaggcccacagccccgtctgtgtgagcagagaggtgtgggacgtggcatgggtgagttgaggggagg

SEQ ID NO: 63381 - DNA, 2637 bp, Bovine  19866880418709
  misc_feature (1)..(1): n is a, c, g, or t
ngcaggagtactggagtggggtgccagtgagtttatgtaggattaaatccctaacctgtggaatttcatttccaggtagatattgttagggttgagtggaatttggctgccagtacctaatacctgcttggtgttgtgaaggacaactcccattccctccaacctggcagtccgcccacccaatacacacatattgaaattggatatagaaaactaaaaggattgagataaaatcacagcaatcatgctaaagatttctattgcttttaatccttagataactatgctttcataaatctcattctgtgtcagtttctaaccatagcttttaaaagttgttgttcagtctctgagcagtgtctgactctttgtgaccctgtagactgtatcacgccaggcttccctgtccacagaattctccaggcaagaacactggagtgggtagcctttcacttctccagggtatcttcccgacccagcgactgaacccaggtctcctacgttgcaggaagattctttactgtctgagctaccagggaagcctgtctttaaattctcctggattttgctcaaattcatgtccattgatttaggaatacttatactagcaaagagctgaaaatccctttagtgggtttaaattagtagggcattatgttggtcactttcaaagaaatctagagatcctggttgctgtcaacagggtagcacttaaaatgagttgcatgttagcagtgtcattaaggcacaaaaatttttctctagctatatacacttccatgttgtgtttttatcaaatgtatgtgatctcataaggccctgcagctctaggcattaggttcaagttcaagaaggaaagaaggaatatcaccaactgttatttgtcctttttttaccaggaaagaaacaatgcttttctaggatcttctactggacagaatttccctgatgtctcactgaccatatgtgggtcaccctccacatcaaactacaaaggagttgggttacctaaagaattgataacgcatagaactgtcaccattgatatagaaacaacatgataatcatatcatatgtggttggacccacagcccacacaaaataaggaaatctgtaagcaagagcaatagtagaataaatatcaggtgacaatcccctatccagtacagtaaatgctttccaacattataatcaaataaaactgcaactcacactttgacaaatggccaggtgaatatttcacagcgagtaagatgacaccgagtctgtgtctccccttacactgaggcaaaaccttcgttcacatgcctcatcattcatctgactcaaatatttttgaaaatgttgtgagaaaaattaatgataaagcataactgtctgaaatgctccatcataataagaaaaagaagagtgctcagaaaacaaatgtcaatctacatttttaaagagtggattctttcctaagactcttggaataagacacaaatctcttcttttttgaaacataatgagagtgtaatattaacatacccagctagcagtttttgatggttttcaacaagtttatgagtgcacattgttttgttttgttttgttttgtttttgcctagcaaaataatccctttggacaaatccaggcatgaagtataaagcaaatcatctaattataacaaaaacctgtgtattttaatccatattttaacattcacctaatgcaacgcttatgtttcactgggagaaatattggtatctctgattcttacagatgttttaaaaaaagcagcatggggagtggattgaattattgccactagagttttggaaaatgtatttgcttttaatttataaacgtaagtatatctttgatcattcttcaagggcagagatgtatcttggaggtaatgtttcatttaaatctttgatgcctggtaaaatcccaaagtattcaagttgaaagatttgatagtctacagaggagagagaatcttattgctgccatctgtaatgaaatttgctatttgtgctttagttaccttgagcaactggtgtatacaagcatggtgctttgccatacactgggcaatatttgcacagatttagggaaaagacacatattttatctgtgctacattctgtccatgccttcttcctcttcccctcaaaaaatttgatgctattcctccacaattgatcatttggaatgagacactatcagatgaatagaagaacttaatcatttttgagtgatgtgtgacattcctaaccttctctttaaggcacagtcaacatcagcagtgggttatttaaaagtgtgtatgtctccccatcaatctttaatccatagttttaaaaaatgcatctcctcttgtctttgctggagctgatcatttgttttatttgactcaaggatctgcttggtttagaagctggaaatacacatctgtagtattggcaaaaacctattcataaaatgtggagattctgccatatatatcagaggaaaagcaatgtggcaaagtgaagtacaaaattatttctgtcttcacattatttttgagtcatatatctctgcctttttatgaacagcaggcatatttggaagaattacatcgagtcataaatcccaattgcctagga

SEQ ID NO: 63382 - DNA, 1021 bp, Bovine  19866880573395
  misc_feature (1)..(1): n is a, c, g, or t
ntcacttcagtcgtgtccgactctgtgcaacccccaaaaagcgcagcccaccagggctccccgtccttgggattctccaggcaagaacactggagtgggttgccatttccttctccaatgcatgaaagtgaaaagtgaaagtgaagtcactcagtcgtgtcctaccctcagcgaccccatggactgctagccttccaggctcctctgtccatgggattttccaggcaagagtactggagtggggtgccattgccttctccgttgacttctctactgtcagacaaactgcctctcacataataaataggtagatagactaactagatcataaactgatggcaaagttcccttttacataggcaaagtccctatgcagagggacaggatcttatatctgacctccacttgaaaactgtgaatagaaaatgagaaatatatgccaattcttttttaatactaatattaattcaaatttcaaaattcttaatgcactagttctgattttgctcatttaatgtagtcaggttcaaaaatttagtgggtgcttaatgaagatcattttatgtggatgaggctaaacctattaaaattataaaagataataggagaagtcctatagtgtagaaaaaagaaaaccacatgcatttagcaattgtggggagagaagatcattaaataaaaactggtgtctaagattattataaatattgctaaaatctatagatgtgcaaatttgaaccaatatcatcaaatatataataaaataattgactttatgttagcactttgataacaagatacagcttgttttctcaggtccaagtgattgagttggtcaaatagattagaagtaaaataattacatctggtagtttgaggttttattttctacttatctaatcacagtaattttacagcttaatcaaaggattaattttaaataggaatgttcaaagaagtaaggaaagaaatcaaggtaaagaaaaattattaagacattctgaaaaattattggcctgta

SEQ ID NO: 63383 - DNA, 2050 bp, Bovine  19866880593598
  misc_feature (1)..(1): n is a, c, g, or t
nagtctggcaggttacagtccttagggttgcacagagtcagacacaggtgggcaactgagcactcacacatacttttattcaaatgtctgaatccataccatatttttgtacatttcttccctgtagttaccacttattaggttaattatgtattgacacagttagtgataagagctgtagtccatatcgtaataggaggacagggtattattggagagtgattttcaaaatatttttgctaaaagctgctacttatggttgccaagtgagagattgtacccaacttaagctattcctcagggaatgcagggtgatctttaatattacaagcaagaaagctgactctgaacaactgttatagcagcttaatggttcccagtgggagatagttacaggatttatttcttacatgctgatttgggaaaagtcatgcttgtacccatgtcatgtataaagaacttattcagaataagccgttttctgatacagatatgtaaattgaatgctatacataaagttaattaaagggaaaagtataaaaaatgttcattggttgaaatcttagtattttaatcataagggaaataaaaatttacatgacaaatcaaacactaggattaaattgttaaagaagccagataaatttatggtatatcagaaaataaaataaaacggaaaattaaggaaggaaggaagggagcaagaaaggaaagaaagaaggaaagagaggaagaaaggaaggaagctacaatatttgaaaatgatatggattttaaacctgtggtagattgcagtagtcacagttgccatttattcacatctttatctatccactccttcagtagcctccatacactctgattcttggctatgtgacaaagtgtgtccaatggtcagtagcaaagataacacaagtacaatgtacttgaatttatgtgcttgtccccctgctgctcttggtagagaggaggggccccgccaattcttccatgtgaaattatataaatatataattttggtgatggggaagacatatgccatctcagctgagtcatctagaagcagccattcacagcacaccacagaattataaacagctctgaccaccatcagctaggtgtaatacagactacaggaaccaagagccgctactttaccctggaagaaactttttaccaacattcatgacctagataagtggttgttgctttaagccacttgcataattaagccacaaagatttgttatgcagcaaatgttaatgtgattttccaatttttggtgaatatgattggattttatatgaattattaaaatatgttcagtaacatacatttctgttgagaaagtataattttaatcatatctatgtagttgataagttgactaataaaatatttaacttcacattttatattagaatatagttgattaacaatgttgtgatagtttcaggtgtgcaacagagtgattcaattatgcatattgatgaaagtgaaagaggagagtgaaaaagttggcttaaagctcaacattcagaaaactaaaatcatgatatctgatcccatcacttcatgggaaatagatggggaaacagtggaaacagtgtcagagtttattttgggggctccaaaatcactgcaaatggtgattgcagccatgaaattaaaagatgcttactccttggaagaaaagttgtgaccaacctagatagcatattgaaaaacagagacattactttgccaacaaaggtccgtctagtcaaggctgcggtttttccagtggtcatgtatggatgtgagagttggactatgaagaaagctgagtgctgaagaattgatgcttttgaactgtggtgttggagaaggcttcttgagagtcccttggactgcaaggagatccaaccagtccattctaaaggagatcagtcctggggtgttcattggaaggattgatgctaaatctgaaactccagtactttggccacctcatgcgaagtgttgattcattggaaaagactctgatgctgggagggattgggggcaagag

SEQ ID NO: 63384 - DNA, 1019 bp, Bovine  19866880631452
  misc_feature (1)..(1): n is a, c, g, or t
ntatcagaaagggttgggaacagctgctgtatgatggatgccccattctttttaaaagtactgtataagatacaatcatttagtattattgctagtaaaatctgataatatacggttgaagtgattgtagcttcttacaacattcctaaaatatcaattattaattggctaccaatatatttaatctaatgagtgtgtgctttctacaaaatgagtatgatcccctttattcagggtcatgttgaactttctgttggcttcgtattgaaagggaatacaatttgaaaagggagcttttaaaactacacctgttttaaaatcatgttgaatgagtacattgtttttatgttaaatgtgctcattgcaattaacatacttaattactacatacctaggagagctcttcctagaaacattttccttagtgttgaggtcaaattaattaagtacttgaattttctctgtaaataagctgtcattttttttgttgtcttccatgtaattattataaatcattcagttattttatgttcccattgtgcactgaaaattgccactctggctttcaaacatagaggacctgaaaaaagccatttatttctctttcttgcttccctaactggcatagtagaaatggaattcatgttgaccactcaccttttctaaaacataaggaagcttaacacgtgaatgatgaattttataattaagaacgcagtagacacaacaaaaatattttgtattcagtagctgaagatcaaggattagtgactaaaacatctgatagtcaggctgtcaagagtatgtatctcaaggggaaacagggaatgcagagtttatagagggtcatgtcctttggttcaaaacaaaattaaagaggacagttgtctgtcttaaatgcagtagttgtgactagtgaaattttatctcctgatggcttttacttgatttgtgaaaataaccatgcttttagagcgtggactacatcatcaatgaaaaaatgatttttacaaaaattg

SEQ ID NO: 63385 - DNA, 1235 bp, Bovine  19866880914264
  misc_feature (1)..(1): n is a, c, g, or t
ntttgtagttataccatgtggaaacaatctgaggagagcctttggctttaaaacagagcaatgttcaggaaataccagaaatttgctgaaaaaattatgcttaactatgaacaagattaaatgaattttggtcattttttatttgttacaagttgtactacatcttaaattattctttgagaatagcttgattttatatttagataatgaattatttgctattaaggcatcaattaataaatttgcagtggtgtttatgaattgtcctacaaatatcaaaacagatatactgataatcctatgagtttttctgtaatattcttatctataatactaggtgattgaaatagcaacattgagttcttaataactatttgtctgcttaatatgtggttttcataaaaatgtcaatatagatttaaattctcttgctgaggcaggcaaggcattttaatatgtaactaaaacataagcttattcttggcattccaactcgactggtgggtgatctctgggtagatccccatctggtactctctgtgggccaatcatttataatatttaatgtacttagattatataaggaaatgtaatgttttcattcccagacttactttatttttaatggacaaatcaacaaacactcaaacatcacttaatacatctacaaacagtttaatatggaaaactgagctttcatcaaacatatataaaatgttggaaaatgggattctgatgttatatttactgtctactgttctttcacagtaatactgcacatttagaggattagatcagcacacacttgttatctcagaatttctgtgggtcaggagctaggacaacacttagcaatgtcctcatgtctgaggtctaattaaacttcaatacaggtattggtgggagttgagtctcatctgaggctcagcttggaaaggatctaattctaaggtcacatagttgttgttcagttgctcagtcatgtgtccaactctttgtgaccccatggactgcagcatactaggcttccctgtccttcgttgtctcctggagtttactcagactcatgtctatcgagtcaatgatgccatcaaactatctccccctctgtcacctgcttctccttctgccctcaatttttctcacatggttggttagtcgcattcaatttttttgagggatcttttgaggtcagtagtcagtttcttgcaatagaccaattaacccagagtctg

SEQ ID NO: 63386 - DNA, 882 bp, Bovine  19866880996537
  misc_feature (1)..(1): n is a, c, g, or t
natgatttctttatattgaacaatgctatatttataaaaatataattgatgcatatggacccataaaatgaatatcatttaaaatatgcaaaagaaattttctagaaattacatcttttattttggtctatatcttgccagtcagccttctttttcctgacatatttttctgtgctaacaagcagtcccagcatttcagtgacttatatataggttttattgttgcctctgagtaggttataactctgttatgtagctacaaacccgaaactagactgaataaatagtccctaaattaatcttgtgatgtggttcttctgaggagagggacagacaaagggcagagacatgtgatggcccttaaagaatgtgtgggtgaagcacatataatttttacacataccccattgatcacaaaaagtcacatatcaatggtatggaatgttagactcctcccataggaagcactgtatactatatgacagtgggcagggatatgtaagcatctgaggaaatgagaatttgaaacaattttttttaccaataattaaaaagcagactttcataaatctctgtaaaagttaagcaaaaatggctttattgtcaggtataagtcattgaatattttacatttgttcttcaaactcaaaagaaactattcaagataatgtatatgaaccaaaggtcttgcaattgacttcacaggaaagcttacttaaagcttcgagttttcttttagttcttgaggtcaaaaattgaatgacctgagagatatagattcctcgtagggctctgcaacacatgctatatggattttataaacacagaagatgtaagagaagtgcttgtcccccttttctattaatcaaaaacatagagctc

SEQ ID NO: 63387 - DNA, 1412 bp, Bovine  19866881255170
  misc_feature (1)..(1): n is a, c, g, or t
nactttgcataacatcatacaaaattggaatgcacactttatatttatagaggttttgaaatatatttgaaaatgtaagaacttgagtatttggaataatcagctgactgatagtgatcatgcactgttcatccaaatattcactctcttcatcagtgtgtcacatttataggaatgaataaggttacacagtgcttgctttgcccgaaaaccacttattttgtcagcagtgattgtgtttaagctgacagtgggctgttcctattattgttaaaattactatttataagctctgaaagcaagtatttctaccaaaggtatatgggaaaccagttttacaaaaaatataaatgcatatttatccatagatcatacattttaaaaaccaaaaccagcagtataatttggctatgaaaaatttttcctttgctatagagaagattggagaaggcaatggcaccccactccagtactcttgcctggaaaatcccatgggcggaggagcctggaaggctgcagtccatggggtcgctgagggtcgaacacgactgagcgacttcactttcacttttcattttcatgcattggagaaggaaatggcaacccactccagtgttcttgcctggagaatcccagtgacgggagccttgtgggctgccatctatgaggtcacacagagtcagacacgactgatgcgacttatcagcagcagcagcagcagcatagagaagacagactttgagtatataaatgcaaacatgtaaactgtattgaatatatattatatgctaggatctgaattctgagtgaggccctaaggataaaagatggaaaaaataatatctgtcttcaataatagggttaattattgacttaagctctgataattattttttaatgttataatgaagttccctgaacaaatgagtgactcagaataaaacagtaattaacattttattttatgtaactaggtgcatataacctaaatttttaattctttggcatacgtagaaaatgtcccttatgaaatgtgtgtgtttatagtgaaaatagtttcccataggtctaaaacataattaaacataaataatttggagacagccaccttctgtactttttgctcagtgtttctcatctagaaggctttgataaacatcaaagtactaatgctgaaaaagtagaggcttttagattccaaggtagacaatttgctttacaaactttcttcaggattaaagcacatacaagtcattgaaaactggaaagtataagacaaatccaaaaattgtaatatatatatttttaagctttcatatgtgtgctgtgttattttaaggaacagaaattatgaactagcattctgtctttggccttgacatggagatatattgatataacacatatatatg

SEQ ID NO: 63388 - DNA, 1002 bp, Bovine  19866881404128
  misc_feature (1)..(1): n is a, c, g, or t
naatcaaatggggaaaattttagatccttttgtgaaaaagagttacttgaatataaaataaagtactggttgcaaagagttttaacaagtgcccaggaaaaataaataatgaagtaatattatctattacttttgcatgccattagatacagcattgtgttaaaactgtagttacttaataaatagggctttcctggtaactcagttggtaaagaatctgcctgcaatggaggagaccagggttccatccctgggtcaggaagatcttctggagaaggaaatgacaaccactcccatatctttgcctggaaaatcccctgggacagaggagcctggtgggctaaagtccatgggggtcacaagaattgtacacaacttagtgactacaccaccatttgtgggtgaatcaaactgggaaaattttagcgtcctcttgtgaaaaagagttacttgaatataaaatgaaggactgattgcaaagtgttttacctagtgcctaggaccaataaatgatgaagggatattatctattacttttgcatgtcattagacagaacactgtgctagaaacagagtgattatttaataaatgcctattgaatggggaaaacaaaaccagcactgactgttacattctttgtatctaattaggcagtggctcaaaatcactgatgagtaaagcaaataaatgtaataccaggctaagttgatgacaatgccaatatggcagtggtactcaacaattaaacccttaagagtaacaagctctgtaacttcttgaaaactgtgggatcacattgacttcaaattctacacagccaatatccataatgtttttattttcccttccttctgaggaagtaaccactttagtgaaatttgaagtaaccaccaaagtaaccaccgaggtgaaatttggtcagtcatgttttatttgaagggagggttagattagttacaaatacatattagaaactgcgtggcaatgactaaacatatttt

SEQ ID NO: 63389 - DNA, 1576 bp, Bovine  19866881469322
  misc_feature (1)..(1): n is a, c, g, or t
nacagggaggcctggcgtggtgcaattcatggggtcgcaaagagtcggacacgactgagcgactgaattgaactgaactgaactgaaagtcgtggtataattaattacttttttataaagctttgatataagggaaaaattatattttatttaactatagtaagctttcattccccagcctccaaacgatatagttttaaagaaattttaggtataaaattttgttcagtagtactcattcaggtggctaggtataattggtgttattaattttggttcacaactccttggaacaagctggatagtacatttaaaaccataactaaatattgcacagtgactataagcttcatatatttaggtgattattatatcataaaattgtcctcatttttaattaactgatttgaatgggtttggttgggtttaatctgttttatcagtcaataaacctaatagtctcttgagatagctgcatcttgatttaatttactttctcctgtttagttgaaaatgcaaacaaaacagttctatcagttcaaaaaataatgcttttctattgaaatgccaacattaaggagtcaatctaagatgactattgattaataatttagtgtttatacacaattaagtggcattcaaagtccaagctgattttatacctacatacattcaaagacctcaagaaaattgaatattctgtttgtctatataccatgcagcatcttagtattcaaaatgtcccaaaactttgtaaaatcacattaaataagatcaattcctaggcaaaatggatttttaaaaatccacaagcatgagattcagtatagtctattttgcaaacagtccaatcatggtcaaatacatataataagtataaaactatgtaggtgtattatgaaatttcttatgcatataaaaatatgcaaagaaatttagtgtgtaatgtgtactcaccacctatctttaggaataaaattttacttattaaattgaagtctcccaagtgcatattccattttctcattcactcccatcccatcagactgtttctagagcactgttttaaatatattaaagcgtgcaaaatggacttataatttgcctatccttagcagtatgactttataattcaatataatattccaacaattcatgtgtatttcacaaatgtagtcagttttgcacattttgactactgcacagttttaatgtatgtattctggtatttatttattcctcccttggtgttttaatttttcttcctgcaaatgagtctactataaagcttcttatgcatgtctgtctgtacttgtacaaacaaatttctaggatatctggaagttgaattttgtggatatggaatgcacatttttaagagcacatatactgaaatggaatttaaagaaattatccctattgtctacatctttgttaatacttagaactccagtggttgttttgctaggatgatagttaaattgtactttttatgaatctttttaattcccaagtttctgatttatcccttccctctcacattttcccttggtaatcatatgttgttttcaatatc

SEQ ID NO: 63390 - DNA, 1198 bp, Bovine  19866880363129
  misc_feature (1)..(1): n is a, c, g, or t
ngaaaatgttttgccctttacctgtgcgcaaatacctcttagcacgcttcccagtctccagggtgaatgccctgcccagatctgtgctcgtgaccactgctctggggctcagccggaattggccccccagctgccctcgtgggcttgcagtgtgtgccggccctagacccctcctctagcggcctcacgagcaggcctagtggaaagggacagtggggagcagggagcacccactctgaggctgcccccgccgaccacggctcagaaccacacacacctggtcattcaggcccacgttcaccatcatcatttctccaaacatctcgatccagctggtgccacagggattgtgagagttgacacctcttcggaaccaaacctgggaaatcagaaataaacacacccccctagagtgccactcaaatggaagggttttttttctttctttaaagtctcaggaagaataaatgagtaatttggtcctttggttcaggccacagatgagcacagcacaccattcagaaaggatgcccttgggcctccctggtggctcagcggtgaagaatccccctgccaacgcacaggacacagatgtgatccctgatccaggagggcctacctgccgcagagcaactaggcccgagtgccacaaccactgagcctgtctctagagccgcaccgcgccgggctctgcaaccagggaagccccttcagtgagaggcctgcgcactgcggctggggggcaaccctcactccctgcaactggaggaaagccccaacaaccgagacccaacacagaaaaaataaatgattcttttaaaaaagaaagaaaagatgccctgggatgagagatagtggaagcaagaagaaaagagattgtgaaagcaactcaaaataagcttatttcactggacttgcctccgataaggtaaaaatgagcacttctagacaggagggggaggcagtcagttagctgcgagtttgcttctgatatttggaatgctgtggcctggtgagggacagtcattctgtgcttgctacaggggtgcaggcaaggcggggggaggggtccccaaagagctcagagatcatctgcgacaacagcggaaaaacgcacagggtgcgactgatgccggctatgttctaaagagtacaattttattttttactttttaactactggcagtgctggggtctg

SEQ ID NO: 63391 - DNA, 1699 bp, Bovine  19866880445128
  misc_feature (1)..(1): n is a, c, g, or t
naaacccaagctgcaatgacctcccttgcccaatgctgcccaagcaggggccgtaggctggaggccgggggctacccaagcccccaccccagcacaaggggtctgatgtgatggtaactccaaccttttaaaacaaacataacatagtaaaatgaaaatgtgccaagctgccaaaaacaaaatggaaggtttaccaccagccggctgaagccccagggaggcagaaggggagcaaaccgctcttatgcagccaagaagaaacggcagaggctttcagaggaggaaaggcgcacaccgggccgtgggttcaggcacctgagatgtttggcatcagctgttctcatgtttccccacttgaatcacaataaagtcaaatgaaattcgcaatctctgcactgagctaacctctgcacagaaccttcttgtgaaagattgaggttatttttctgatatgactgttctctctgtggcaaataactgtaatgccaaggcatggttccaaattagtcattcgctacaatttaaaaatacttcactccaatattttgccccgacacagatttcactgcatttcctcagggttcttacagtgtcttcatatgaggagtcacagaaaaatagagatttgaatcgaaaaaccacctcagatagagtagtctgttttctaccaggaatgcttgtccagcttctcctttctataatatccctttccccatgtctgagtaatacataaaaatttccgagtgaagcaacactagaagcctgcaaacacacatgattttaagagtgagtgagtgagagagaaaaagcaagtctgtcacattcatctctccgaatgacattttctaaggggaaacctcagccctgggctggtccgagcacagcccgggtgaacctgctgccttcacggatgctttctgcgagtgtacaatttttgtttgggatcaaaccaacttagatcacccgcggttcctttaaataagttaaaaccagcagtcgttcacatccaagagctttagtcatcttgacattcaaaaacaggtttattatataaaagaacactgatccagatcatcttaaaaatttctagcataattccccaaggctgtgaatttcaagaagcaacaacaccagcctatagatcatacttcagtaagccagatttctctctaaaggatctcatcttcacccatcacaacttgttattttgagaaacaaagacttttttttttaacatctgtaagtttcaggctctccatgtttaagcggctcccatgctgagttccttctttgacaacagcgcctaccattagtcaactctatgatgacccaccaaatctacaaagaaatctacgctgtcaagggcctgacctgtagcagacatggctaccctgtgatagcaactccttaggtaaatatcatcactatccctttttaaaaagttgagtgagtactaagaagctcggagaggtcaagtgacgggccaaggtcttaaaagctattaaagtggcagaggaaggtctcatacccagaccaactccaaaggccaagttctggctgcaggacccactcctcctgtgattggtactcccaaccaggctgaattttactcccaaccgggctgaaaagttggatcctttttatagtgcctgcctgtgggacttttttgaggacttgtctgtttaaccatttcagaacc

SEQ ID NO: 63392 - DNA, 1157 bp, Bovine  19866880490153
  misc_feature (1)..(1): n is a, c, g, or t
nttctgaattacagttttgtccagatatatgcccaggggtgagactgctggatcatatggtaggctctatttttagttttctgaggaatctccatactgttttccatagtgacggcactaattcacattccccaccatctgctgccttttcttacttgtgctgagtttttcttggaaagatgagtaatttcgattgaaacctggacatattgggtcttgtgctatgagactccggatcttatttaaattgtgtattttacaaccagaaatctcaaagtggttttaaacacctgattttcaacagaccacatttaaaaaacatatgctatggtttacttactagtatggttctccatttttcaagaaagtgtcttgttcctttgggcttgcgcttgcttttaactccttcacgattactctcgctacactagtgcctgtgtagatctctccaaggagcacctaaagccaaagatgagaaacgcaacagttcttcacaacggttttcattgtaaccatgctatcttcccattaaaacgtgctttaagtgtcatatggggaagtaggggaaggaggaaaaacaaataattggaggaggatgaagagcttctaaaattcccatctcttttccgttcttatgccaacaattagaaaaggctctgataaagaaacagaaggccttcttggggaaactcacacacccagaagcgctgacgctcacactcctacatggtttcaggggccaatggaggtcaattgatgccacagtgtgtagagagatgtgcaatgtcacgcacagtaagacttaagcagctttgcattctaacagtgtaacaggagggaaaaaatgaaggtgagcagactttacctttccaaaccagccattcccaatttcctgtatgtagttcagactgtggcgggcaacttgggacttcaaaccttctgtaggaaaaagaacatttaagaagtaaagattagtatttaacaaaaagacataataagtatattacctataaagtacaaatgctaatataaatttaacgtttatgataataaagacagaaataaatacttaagggcttctctgatggctcagtggtaaagaagctgcctgccaatgcaggagacacaggttcaatccccgatctgggaagatccca

SEQ ID NO: 63393 - DNA, 1678 bp, Bovine  19866880571834
  misc_feature (1)..(1): n is a, c, g, or t
ngggagtgggtgggaatcctggtttgcttaagagaggactggggctgggggctggggagggaggcggggtggggggacgaggtttgggtgttgtgggcgcaggagctggtgcctgtgtggctgagacaccggggtttggggagggaggctccctcctgtctgctttgattttcctgaagcatggagtgaccatttcccacgtcttcacattttacatcattttagaatttttaatataaactgatggattattgaagatcattccattattcattgggtgagacacgcttaccttttgagagcaagcatcattttctatcaatcctttgaagtgcctggggcttcctggcaccagccacatgcccccacctccaggagccgggagaggagcccttggcctgtggattctgcatgcagtgtggacaggtgccccgtgtcccaggcctggaatccaatcgattcctggggcgatggaggcttacagctgttggggtttcagacagccagctctgtctctcaacagcctcacctacttgcttaaaattccagaatttaatcatcacgctcagcataaaaataagaggggtaggtggcgggaggggaaaatactgatggaaatgtgtgggaccacaggccccagcttgaggtgggaagtgtgtttattcccccggctgagcagagtggattctggcattgaagctgatggctctgtgcagctggtcacccaagcgccagccagcccactgcttcatccacgtgggtgcagcgggggatgtgggaccgtcctgccaaggttgcaaagccagtccttcgagagatgatgcaaccctcccagcagggcctgtgaacaaggccatgaatccctgcggggtgacatctgtcctggttctccctggtccatgcaacggtttctctgaggcagttttgactatgtacacacacattttgcttggagcaccagcccttcacccccaggaaatctggggcgtccttgcgttggttcattgtttcatgccgcctctcactaaaggcgttactgatctcctgtcatgcgtgggtcaccctgcttcatgtcaaataaaacaactgattcccaaatactgtttccaccaagtgatccaggcaattgactagagggtttagcgtctccgtggactagaagtccttgtgcagactaacacatttggatgggtttagccctggctgcaataagctttaaatgtggcttcctgtgaacaatagagcaaatcattcatcaattctgcacacctccagggccacttctcaggggtgttgctgggtcttcaaaaatgtttccactcctgaggcaaaaagactggctgttccaggaccctggttttgatcagtgttgcaagcgtcttcttcctcgatgccaggcagtgtctgagaccagcattgctctgtgtttctgaattgccaccctgccaagaaataaatccaccaggttctacgacttagccttcagagctctcatctcccactctttccctggcttgtactcggaggcattccaattgagaggcttgtctgcctggaagtcaaggaagccggtccggctctgaattaccggtgtggggttttcacttttatttataggacgtgttgtctgggatagccaagtgcggatcttccaggggatcaggaggaaacattccca

SEQ ID NO: 63394 - DNA, 1782 bp, Bovine  19866880595143
  misc_feature (1)..(1): n is a, c, g, or t
nttgaagcaaaccatctgttcccagcaaccacaataatcagtcaagatcttagcaagcaaaagcttctttcattgtcgagactagtggaccttttgtttaaaaaattctttttttcagaagttagctgttaagtcagtttgccaaggaatactcctaagactaatgactttttgtccccaagtctttggtgctcatatttagtgttttgtgagtcagcgtggctgactgccttcatgctctgctctttcatgagaatctactgagtgaccagcatcagagctggtcattgaaagatactggggagactggcctccactgcacccccagccccacctaacaatgttggggtgctggtcgggcttaggacaaagctcacttcagctcttcttcatccaggtacccactctggtcgttgtctatgaaacgaaaaacatccttcacctgactggctgacatcttagcaaggcccgatgtctggaagaatttttggggttcaaaggtatctggatctgaaaaacagagaataggttattctgatgctcgttggactgcattctgtctctggaccaaagtgatgtcaacttaggatgttaaaactactttacataatatcattgagctacagggatgctctgtttaaaaaaactttttttaaaggccaagtagggctgtgactgggtctggattctgaggcagccaagaccatatgccttcatactctcatctcctttccccctccccagatttccctctccacttgactctgtccatctcctcttctctggcctcctctcgtctgtgcctcctgatgccctttattcaggctgggtatccaggatggcagccccactggtctaactgatgagagaaacacaatcataggattcaaacaggctacggggatccactgattccttttttttttcttcatgtttagtaagtttctttcaccatacagaaagggattctatgctcagatctcctatttctatcacgtagttatctagttaataagttcttcctctgattcccatgcactttcagccagtttgcattttaatttttgtaacttttcaggagctaccgatttgtgcgagaaagccgccgccgcctcgcttcccatttaccttggcactcctgcagggctgctgcaatgtcgtcagcactgaggacatctgtgatgctcattttccacctgttctcacaaaataatcgagatgtggtaaatgcctagcagaaacatgcacatctcgggggagcacaccccccaaggcccacagaaactgcacatttgttgagcaattttaaagtgtaataagcgtatgaccagctaagacataatatccaaataaaaaccaaatactgaaaagattccagcccccttcgtctcagtgtcctctcttgaatatatgccaaagatgaaattaaaaaatacaaactgaagaaagatttgatgctgctttcttgtaaaaaaaaatatatattcacatcatcaaccacttatacagacatctacaagccattcagaagtagaccatgttacaaatgcaatggcattttaatacactagccagagaaatgcaacattgcaagtttcacttacagaaggacagagcttgggctgcttgcagactgtctacagaagggatgcccttctgtcccgaaggatgggaatcagagacatcaaaaacccatttaccagagatcaaagatccacccatgtgtcaactccacgggaaaagaacccgagcaccgcatgcaccaacctaaaatccatgtag

SEQ ID NO: 63395 - DNA, 1965 bp, Bovine  19866880680249
  misc_feature (1)..(1): n is a, c, g, or t
nagaatgaagagatgagaatcaacagaaacgtttttcagccctgaagatgtacttttctctatgggtagggtctgcttgagtgccagtaaagtaaattaaaaaaatacccacactgagacagaccactgtgtagtttcagaacacaggaataaagagaagggttccagaaataagccccttcccctgccccatctcatcaaaaaaaaaaaaaaaataagtcatatacaaatgacagctgacttctcaggagcaaaactggatattaaagacagtggagggcttccctggtgactcagtggtaaggggtcctcctgccagtgcaggagacgcaggttggctccctggatccaggaggctcccacttgcctcagagcaactaagctgatgtgccgcagctgctgagcctgtgctcccgagcccaggagccttggctactggcacgccctagagcctgtgcttgctgcagctagagaaaagcctatgcagcagcaaagacccagcacagctgaaaataaataaaattattttaaaaataaagacagtaatatataaggagcaatatcttttaaatcctatgggaaaatcactttcaacttgaaatactctgcccagcgaaataccaatcaaacatcaaggtaaatataatttcagacacttggggactcacatctacctcctatgtcatttctcaggtcattcttagagaatgatctccagcaaatagggataaatgaagaaagaggaagatgtggaatccagctaatgagactctcgtcacacgggagaccaaaaagggacatgtgagggcgacagcgtggcgggagacggccaggccaggctgagcgaggacagagagtgcttggggatgttctgggagaaaaaaaatgaagattaaccaacaacttcggcttgaaagatgtcataggcttctgttagatctcatggagtatgaggaagatgcatggaaaaatctaaggaggcattggaatgagacttgttaatctcaggagaaacgaaaaggtgtatcaagaaaggaagcaccattcttggtacattccttacattgtagtgaccagtatttacaaagtcataataaatactgactattgattttccaggaaactgctgttatgtagggaatactggaaacaaggaaagtagagttgtttactgtagcagaaggccagtggttattgtccaaagtcgagaagtcaagaatattaatcaaaactgtggcagtaaatacagaagagcactttcaatggggctgttacaggggagtgaggccaggggtgcagaagggttgaggcaggaattattttccattttttgtctaataaaataaaagctgataaataaacttttaataatattaaataaaagttataatgttctttaacaaagaacagttataataaaagttattatgttctttctcccctgctaacatgtaatggagaacctctttatcccgaaaaatacatgtgtcatgtttctgcccctttgaaagttgtgtggtttttttattctttgttgcttgggcctttacaaacaaggtacacattttggttgaggtgggcggtaaagagatttgactggtctacctggaaagattaatattgtgaagcttattgtttgtaggtgggacaaatacattcagtcaccaaatatattcagagcctcataggaatgatttcttatctgtaacatcagatttaggatagcgttttaaatttagactagtgttctaaatagttgcctgtcttatacttgtcatagcgcttctctctctgtttatgaccttctattgatgttgaacttacacttttaaaaatgaaatccgtgacatctgcagagataagagcatcatgaagcccagaatgggaaaccacgtctccacctccactgctgtgagcacaggccctggtgcacactccacaaatatgtaatgaatgaactgatgg

SEQ ID NO: 63396 - DNA, 870 bp, Bovine  19866880725813
  misc_feature (1)..(1): n is a, c, g, or t
ncaggaaggctcgggtactcagtaggttctcagtgcttgtggaaaactgactttagatcactggggttagagtagattcagctgccagtgtcttctgatagaacagtaatctccttgaattcatcacaccatcagtggaatgtgtggttaacgtcaatttgtctcttgtcagattcctcaattgaaaagcaagtggccctgttaaaggccctttatggtaaacatttctataaatctttattttactattgtgaatgcacatgtgtgaaaatgaagaaagccttttgtggactcaaatacagattcttgataatgcctgttgaattgaagagatgtgtttgctctctctctcctgagatcagaggtgatggaccttgaatgcatgtctcataagaaaacaagagacgtggtatggtcaggcagttattagcagacctcagaagtctcacagacctcagtttgaatctgtggcccatgtaaaccacttaaaactattccttttgctaaaacattgcttttattattaataatttggttagcatttatggttttgctatattcctcaggatagtacatgaatgagaaatgttgcattagtttaaaaatctatttgttttataattctctttaaaaatgtagctccttttaaacaaatctattgtttgctaattttatctttctttctataggacatggccagctttctcacaaaagtaagttccaaattattttgacatttatcaaatgcaaatataaattatattgaattccattttatataatatctaatttttctgttgtaatgtaggatttgatatttttaattaacacgatttaagagtggaggatactcaattacatccagaacat

SEQ ID NO: 63397 - DNA, 2140 bp, Bovine  19866880768576
  misc_feature (1)..(1): n is a, c, g, or t
natggggctgtcagggaaggtcaacattaagacagcctccagggcttccttggtggctcagtggtaaagaatccacctgccaataaagttcagcagacacgagttcaatccctagtctgggaagatcccacatgctgtggagcaactaagcctgtgtctgactactattgagcctgtgctctagggcccgggagctgcgactactgagtccaggcatcgcaactactgaagcccgtgtgtcctcgagcccgtgctccgcagcaagggaagccactgcagtgacaaaccagcgcgccacgactagagagcagccccactcaccgcagctagagcaaagcccacacggcaacgaagacccagcacggccaaagataaatcaataaatgaaatgaaaaaaaatgacaccatccataacataaacgggacgactaaggagcccatcatgcaagcatcaaggacatgaacactccagacagtgagaagcacctgtgcaaaggtcctgaggcaggagtgggctcgccatcattggtgctgacacacggagacaggtgtgggggaaaacccggccccgggaaaccaggaggctgggttctgagaccatcccttgacgagctgttctaagatcatcccttgctgagttgccactgagcaggccgctacccagccaagccccacacagcccggacaggaaatctggactctgcccacatgcctaggtcactgagcatcagaactccccagagtcccatgctgggcaggcattttggttggttgacagagtgggagctgccgggtcctttgaggcccgggcacatttctgcatgtcataatctgcagggactcctgtccatgagctcttccccataatgtacagagaccctgtgggttaggggttctttccctgtcccccttccatggtcagctcatggcagcccagcctgcctctccatcccctcccaccgtcaccaccataagggaaactgccctccatgagctgtcatttctacattttaggagcacattcggatgagacctcccgtctcaatcagatatcctgcttaatggagcatcacatccgtaccttccacacatctccctttctcaaagaattataaagcaatcaagtgcatttggcacgaaaacctcagtgaccataatttaatctggctccgacagacacagagtctcgccaggaacttgtgttgcctgggggtcataattacgagtatcagttactatctgtgccgtcaatgtgcagatctgctgactaacagacattcctggcggagaaaatgcggcatcgactgtctcttacgatctatcctctgtgccttgagaagtggcacatcagatgaagactgtcagtcttctagttcccaccaacacctgtcttaatgaggatgtacggcaccctatttacctgccctcattccctccgaagcttgcattctcagtgtatgatgtctgttttcagaacctccaaaatgccggtgtcctcggctcagggaagaccttcagcctcacgtcaggaagctgagtgctgcttacagatcggcaggctcctgcggtcccttctgcccttgccaatcgacgcacgggtaccaatttccaccaccaggccccagcaattagaccctgttcaactgctatcttagatgaatacagcaaagtctttcaaaagcccaaattaatcacagagaaaaggggcgtcatgcaatccaggatgatattaatgtcaggaagaggcagtaaattttatttttattaatccacatagatggatgttctcattatacctatcacactggcaaatgataaaaagcaagggtaaaaacactggttttccatacgggagatcttatcaactgtattgaggatgtgatcattatacttaggcgttatatagagctgttttcttaacagccaaaagcactttcatttaatattaataataataaaaaacaatgtttggctgaaagtagccgggaccacgtatacatgtcatacattcacaagcagcagcacctccaaccacaccgttctctaagtgacggacatctcccagcccagaggctcagcctcccagcacaaacttcgagttaccatagtcccagcccctctcatcttcccgcatggcctg

SEQ ID NO: 63398 - DNA, 1178 bp, Bovine  19866880831805
  misc_feature (1)..(1): n is a, c, g, or t
naaaaaaaagatttggaaataaatttaagagactagtatggaacatttaaaaaatagatatttggagagtatctatttatttcttgttttaaaagatgagggcattaacacccaaaacatcctcccatctgccttacccccacctcctaatttttatagttatattattactttaacattattcgagtttataacattcacaattatttttgcttctctttcattagttgccttcttttcatcctatatctaaacagatttacattcaccacaattcttttaatttagctttgccattgtcaaatttattttcaatcatcttttatttgactggatgttgctgtcaagcaatttttttcttcctcaagaagaaatcaaacatattgcattcactgagttctttcatgccagtaaatgcctctcagtggttcccatgcttgaatggcatcttgaatagttgtaatatttttattttgttttgttttatttcattctattctattttattctatgctgctccccaggggcatgtggaacttccttgactaggaattgaaattgcaccccctgcagtggaaatgcaggtttgtaaccactggaccatgagggaagtccagttaaaatattttaaaattaaatttcatctttctcaacactttatggacacttcttcattgtcttgtagaactgagtgttgtggagaattctgagatgggataatatttcctcctgcttagatgtgatttgctgttttgcttaagaatctggaattctttctttatcctttacatttaatagttcacttaggatatgtcttattgttgatcatttcacatttaattttcttaatgtgtcatgaactttttgttttgcagattattctctgttcattttggggaaattctattgtattatgtctttgtgaatatacctttaaaatggaaattccacttcaagaatattatgatcttttttttggatcataatatattttattatgtatataatattgtaatatgtatatttcatatctgcaatattcttccaaacttctttcttcactcttttacttcacattcacttagattatcttaccttttcctctttctgtcagtaattgacttttgtgtcagtaattcatcttgctgaatctaaactgcttattatttccataaaca

SEQ ID NO: 63399 - DNA, 892 bp, Bovine  19866880833893
  misc_feature (1)..(1): n is a, c, g, or t
ncagcgctgggccctgacattttcagtaatttgttttcagaacaactccagaccttctgtaacatttccctctgtctacacggagcctctgctctgactctgaatttccacgggtctgtgagagcaataaacaatgagagaatgcaaccttttactaaaaggggaagtattagccccggggatcttgaaattcagcacaaagtgaaaatttccattaggcaaatgcatacaacgataaataatttagcaaagaccttgagtagtaatttatgtgtttcgttaaaaatgtccccaacctattgacattgaccaggaagtacaagaaagcttgaagatcaatggaaaccctgctgagccctaaaggcagactttgccatgtaagctggtttgtaacgtcccctgagtaccccacgactataaaacttttaggatgcgttggctatgatgtcaggcagtacctggggcccaaattcatggtggaaagagctttgctattttaatactctccataggatgcacttaccaattaaaagcttgcattctaggccttctctgttgtattaatatttagaggtatttgaagtccctcgtgggtttcccaggtggtgctagtggtaaagaactcgcctgccaatgcaggagatgtaagagacctgagttccacccctgggttgggaagatcccttggagcagaaaatggcaacctgccccagtatccttgcctggaaaattccagggacagaggagcctggcgggctacatgccacggggctgcagagagtcagacacgactgagcccacacacacacacacagtccctgctggtccagtggctaaaactccccactcccaagggagggggctcgagtgccatcccggtcagggaactaga

SEQ ID NO: 63400 - DNA, 3095 bp, Bovine  19866881047772
  misc_feature (1)..(1): n is a, c, g, or t
nccctactccgacagatggtgggtaacttcacgtcaccttctctcagaaggcgaagaaagtctgtctccacaagtcttagttatatattccctgattttcaacagtaaatgttatgaaaagcatttatatattattcatgactgatcttagaattaacgtctagtttttaaaatgtaatactgtttaaaaaaaaaaagtgtagaaccagcaggaatttctgtcttatacatgtgataagaaacttgttaagtctgagttaattctaagaatcagtttgagggcatttgctatcgtggaattgtttttgaacaaggctgtatgtgtgacactcagcgtgggacgagacaggtagcacagacatgattgggtttgaattggcacctgaggcagtttgcataatgtgtattgacatttgcaaaaacaaatttacttcttaagagtctccagacccgttcttacctcagtttccaggtagagtcgggctcccctgtgtcgaggcccctgtccgtgccaccctgtgctcagcgggcgttgcccctgcatctggttgcccttatgtgtgggcactgctcagcccctcacccgacttgctagaactaactcacccagaataactggatgtttctgccgtaaatttaataccatgacatcgtcgtcctgtcttcccttccactcacggccgcagtttaaggcgttgcccgtattcagccaaccctttgaagaccatctcctggctgccacctactctgggcttctgtttctgctcttgctctccaccctcagctcctttggtggcctgagggaagcatgtgctgcagaaggtcgtggtgttcctttctgtcgggggaatcgttagagagtagtcaccacggcctgtgtctgtgtgagtccttgcaaaatagagtgagtaagtctcatacgttagacacgtgcatccttgactaagcaggagaccgatggcagttgtgttcagaggagagcattttagggctgcttgtaaattcagtggctgagcgcgtggaaaacaccagaagaacaaacgacaaggccagaagaattgcagtgatgctgcacagggtcctaaggatgcagaaatcagtggccagattttctctctccatttccactttcccccagagctcaccatgaaccagactcctgctggtggccagcaaagtgattcaagtgttgggacttcttgggtgttgagctggcctagggggtccttgtgaggtcttttcttgttttaaaacaatttgtcatctgtccactaatctcctgtctcgctcaggtatgaagtcttgcagttctgctggctgtcaccagataagcggccagcagcggaggacgtgcaccggctgctcacctacctgcggatgcaaagccagagggacccggaagtggactttgagcagcagtggaacgcactcaagcccaccgcaaacagcagagacgctgcaagtaacgccgccttccccatcctcgaccacttcaccagggaccggctcggcagagagatggaggaggtcctcactgtgaccgagaccagccaaggcctgagcttcgagtacgtctgggaggcggccaagcacgaccatttcgacgagcgtagccggggccccccggatgaagccttgtcctacaccagcattttcttccccacggaagcgtttgagagctcgctctcagaccccggtcctggcaagcaggatgacaatggccaggatgtccccctgcgggcccccgggggtggtgcccgttttcgatgcccacaacctttctgttggaagcgactactacatccagttagaggaaaaaagccgtagcaacttggagctagattacccgcccgctctgctcacaacagagatggataatcctgagaggcttggggatggcgcatcccagtgtctgacgctcaggagcctggagcttgaggagtccagtacagaggaggatttcttccagaacagtgcagaccccaaagacgccagcagacccgaggaggcgcacagcaccaagggccccgagagccctttcaacagtttatttaatgaccttgacaagtcagaggctttgcccagtcaccaaaaaatatttgacttgatggaactaaatggagtccaagctgactttaagcctcccaccctgagttcaagtttggatgaccccaaagagtccgtaatcgcacgccacttggagagggaaaagccccgtaagctttttgactgtgagcctctttactccacagacagactcatacaccaagatggttttgatcagctggacagtgaagagttgtcagaaaactttttatttcttcaagagaagaacttactgaaagactctttgtccagcaaagagcatgtaaatgatctgcagacagaactcagaaatgctggctttcctgaacccatgttagaaactcccagtagaaagtctgtagaggctgagtctaagtttgctgaaaataaaccctactcttcgctgcaggagagcatcagcgtgcacggcaaggagtcgggtgcagcgcccaagggtggcactggggcagcggcctccccttgctccccacagccgcaggtacctcctacctcgctcgaaacccaggggccgcctcatgatgtccccccgggggcggccctgaagcagggcggagccaggcccacgcatccagagggcggtgtctgtgaagatagcacctgccgagaggcaaacccagactccacgcccgccccaccggacacccccgcccccactggcaacgggtccccggccctgactcagcacggggagggggccgtgagcctggcccagagcgaccccagcctggtccaggacaccgctgccagcaaggtgagtatagggaacggcctcccagaatcgaggcagaacttaaaaaaccagctgcctttggaagaccacggccctcgaggcccgcgggagagagcccgggaggccgccgaggtcctggggcagctgggtcgtagagatgctgctgcagaggagggcggcttggtgtccaccctctcctcagactcggccagtcaggacagcctcctggaggacagcttgtcggcgcccggccccgcct

SEQ ID NO: 63401 - DNA, 1109 bp, Bovine  19866881251160
  misc_feature (1)..(1): n is a, c, g, or t
naaaataaggaagactactcaatcaacaatttttattgtggtgaaatatacataacataaactttaccattttaactattttaagtgtacagttctatggttttaagtgcatccacgctgttttacaaccatcaaccaccatccatctccagaatgttttcatcttcccaaactgaatctctgttcccccttaaacacgactccccctttccccctctcctggtggttacccttctgtctctgcctccacgattctgactaccattaaacacgactccccctttccccctctcctggtggttacccttctattttctgcctccacgattctgactaccattaaacacgactccccctttcccctctcctggtggttacccttctgtttctgcctccacgattctgactaccattaaacacgactccccctttcccctctcctggtgattacccttctgtctctgcctccacgattctgactacttccaagtggcaccagtggtaaagaatctacctgccaatgcaatagattcaactgctgggtcaggaagattccctgtagaagggaaaggtaaaccactccagtactcttgcctgtaaaaccccatggacagaggagcctggcaggttagagtcgcaaagagtcggacacaactgagcactgattgaggcgcctcagagtagtgaaatcacagtctttgtccttctgtgtgaatcaacattttgatccccagattgcacgtagtgggattcacgtcagaatcctggttacattcctgattcagacatcatttactgggtctctgtttatctttaggttctatcagaaaaacagcatgaatatctaaagcgtctcggtttaacccatatgctgttttcatttaaatgagcagatttttaaaaatgtctttctatggacaagttgtaaaccctgccacagaaagaaagaactcagccagtttctatggcaacttaatgtcagcaacctaatttcttaagacctattttcagaaactgtgttgttttttttttaagactgggccaagtggatgctgtctggaaatcttgttttcaggttctttttgctgtttttatatatctattcatca

SEQ ID NO: 63402 - DNA, 853 bp, Bovine  19866881274416
  misc_feature (1)..(1): n is a, c, g, or t
natctgcccggcccgccagcccccgccttcaggggtccagcggattcttaccgagacacacctccgccgtggggtagggctgggctttggcctccccgggcctgcccaggagggtccctgagtccggaagtggcccgaggtggtctaaggccagcgggcacttggagctgaggtcgaggttggcgtgaggagccgtccgccctgggaccgggcgggcgacaggcaggacggagcagccctgagcatccctccttcgcctcagggcttctgctggatgcacgtgggcaccgaccagcccttcacctccgtctccatcggcacctgctaccaggtgtggggccgtggcgagggacggctccgccttctaccgcagctccgtgtccccctccaggcccaacggtgagagccctcgcctcaggcggtctccctgcgcccgccgccgccgccgccgccgccgccatgttgggtcgagcgccaggggcggctacggctacttccgcttccagaggaagccagtggacggggctccgtttaatcaacgagcgtttacccggcatggggccaggctgggctacccccagagtccacaccccctctgctgggatgacccaggggtggtcaccccgtgacgggttgtccttcaccaccctcggcctcccgcccctcaggggacctgcctgggcgcccccccggcccatccacagtgtcgacctcgactgctctccaggagcaaaggtcatgcaggcttgttcttggctggacatctggacagtgtccggcacaggcattgctgggtgggtggtgactggcttatccgtgccctccacctggagcagtgggttcgcacagcagc

SEQ ID NO: 63403 - DNA, 924 bp, Bovine  19866881310956
  misc_feature (1)..(1): n is a, c, g, or t
ncgactgagagacttactttacttttactttctgcattggagaaggaaatggcaacccactccagtgttcttgcctggagaatactagggacggcggagcctggtgggctgccatctatggggtcgcacagagtcggacttagcagcagcagcagcagcaaatcacttataatgcttgcatatctttgaaaaaggagttaaaacaaacatttttaataatgcagattattttagcgtgcttgaagttgtaactttattctttacttgcagttaagagactactactagactattactcaggtaatgtaaggtatttaaaataaattcagacaaattagccagtttagaattcttctgtggtaactctaaaaataccaggaaatgagccataagtctggtatcaatgcagaacaaggtacaaatacatttagattttaacctgttagcagtcagagtgatttaccaaaaaaaaccaaaactgatcatctccattctttaagtaattaggaatatggcgttgcctttttctatgaaaaaggattttaaaacataaattatttatcagggaactcaatacacttaccaccctgatttcccaagaaagcctttttccacagcagttccatgtcatgtcatcctgggtgttgattcgccttgttctcatgttcacttcactctttctgttttcagtgacttagccctgagaaactgctttcttacctcggacttaaatgtgaaagtgggtgattatggaataggattcagcaggtacaaggtaagccagaggtttaaagggttctctctctgatctaatttaatgctcatgaaagtggtcatatcacaaaatgccatgcctgtttggaaagggagggtaaataattattgctgctttttaataaaatatacacatcatatataaatatt

SEQ ID NO: 63404 - DNA, 1251 bp, Bovine  19866881359273
  misc_feature (1)..(1): n is a, c, g, or t
nccccccaggatcctgcagggccctgccaatgacatttctcttatttgttcttgaaaacaaacccttcagaaacagccctgggagcctgggggcacttcctgggctgacatttattttgatcctgttttctcctccccagttgtaaattccccttttcttccacagggactgaggccgagcagggaggggcgtggccacaccccccccagttacctgccttctcacctggcccagcaccttctcctgacgaaatccttcatggttttgtacttgtggtacgagctgcaagaggaagaagctgaagtcagcaccattctgtggaattttctagaaagcaacgctgcacactcattccttctcccggggcctcagtgtgagctaagcaggggcagcaggtaacaggacaccatcctcctgcttcaggggcctccagccccacccaggcctccctcgggagggggtctccctggggtcagggtctccctggggctgggacctcactgaggccacgacgtggcagctacctggaggtgggttggtggtttctagctaaggggcctctgagccctccccatcccaggcctcatatcactcttctgggagccgtcaagttcagggcttgaggtcaaagggaaggctcagatcaggataaacctcctccccgctggacttcatctgctcagaagcctcagctcaggctctggctcggtctttctcggctccgtcctccatctgaacgcgactcgtgtatcgtgaagggcctgcgccactgggcagggtggaggggcttcgcccgacttcgccaggcctgacactcggggccccagcccccctgagggcccctgcccacacagagagagagagatgctcacgcagggaagtcactggcatactgccacccctctgggtccgtgccgccagggacgctgaaatccacgaaccagtcagaaacctggaggaacaggcaggtcggtgtgggcagaccccctactgcaacctctgccccacccgcagcccggagctcacccaggtccactgcagggacgggggcttcgtgctggccttggtgcactcctgcaggcccgtggcgtcactccacatgtaccggtcggtgggcagacccctgcacgggacaccaggggtgaggtgatgccagagagaggggaacacagcaccgctaccgcccgccgcccaggtgcctgcatctacctgtggggaggggtggggcgggcagaaacagaagtagctcc

SEQ ID NO: 63405 - DNA, 1112 bp, Bovine  19866881498816
  misc_feature (1)..(1): n is a, c, g, or t
ntcactatatgcgcggcatggggtgaaagaggtgctttcaggggaacacgccgaaccatgttttcatttaattacttacgaattgattttaatgtacattaagaaaacagcaaacccatgaattcatacccactacatattacttagatcatttcctctctaaataagtttattaaagggattgatttgaagaaccaatattgataggctaagaagacaggtgttataggtatgtggcaaagtgaaggctaactgagctctgtgaaacctgcttcagtaattccagagaaagtgtaagctgcaaagtctcacgaaacagcatgtcctctttggaagacccattctttttcctgcagtctttaaatcctcatcctaaaagggctcgcaggtggttcagtggtaaagaatccaccagccaataaaagagacgcagattctgatccctgggtcaggaggttcccctggagaaggaaatggcaaccctctccagtattctagcctgggaaattccatggacagaggagcctggcaggttacagtcctcgggcttgcaaaagagttggatgaggctgaccacatacaaaacattagagcaactccagttattttgtatttgtattctgtgatttatttcaaatactgttctcagcatcttacaatagcttgctttctttaagatatgtgactttacatattttctgcaattgaacgtgcgatttttataacatttcaggactaggattctttttccttgaggaacacagtttcaattttatagtgaaagtcggctggaattcaagactgcatataggaaattagagacaaattttcaatatctttttcatttataaatgagttgcattgttattaaaaagcaacgctattcaattgcattcctttctttattttacactccacctcattccatatagattagaggcaactctagcaagaacacgtgataaagttaaaatttaaaaaactaaccctgggaattaaaagaaagaagccaaggggagggaaagtaaaaaacaaatatgcaaacttcacaggcccaagtgggtaataaagtcgagtttcacatttggcttttgagatccctggcagctgga

SEQ ID NO: 63406 - DNA, 3201 bp, Bovine  19866880366536
  misc_feature (1)..(1): n is a, c, g, or t
naaattgcatgagaaagagtttcaggacccctccctgagagcagatgaggtctggaaagtgagggatggtctatttatcacagatgattctgtgagacgtcccccctccctgatcaagcctgcctaagctcctctagttcaagcaccaccaccttcctcccatttgtgagccagacatcctggattgtgaagtcaagtgggtcttaagaagcatcactatgaacaaagctagtggcggctgctgctgctgctaagtagcttcagtcgtgtctgactctgtgcgaccccatagatggaagcccaccaggctcccctgtccctgggattctccaggcaagaacactggagtgggttgccatttccttctccaacgcatgaaagtgaaaagtgaaagggaagtcactcagttgtgtccgactcttagcgaccccatggactacagcctaccaggcttctccgtccatgggattttccaggcaagagtactggcatggggtgccattgctttctccaaaagctagtggaggtgatggaattccagttgagatacttcaaattctaaaagatgatgctgtgaaagagctgcactcaatatgacaacaaatttggaaaactcagcagtggccacaggactggaaaaggtcagttttcattccaatcccaaagaaaggcagtgccaaagaatgttcaaactactgcacaattgtactcgtcccacacgctcacaaagtaatgctcaaaattctccaagccaggcttcagcaatatgtgaacttgaacttccagatgttcaagctggttttagaaaaggcagaggagccagagatcaattgccaacatctgctggatcatataaaaagcaagagagttccagaaaaacatctatttctgctttattggctatgccaaagcctttgactgtgtggatcacaataaactgcggaaaattctgaaagagataagaataccagaccacctgacctgcctcttgagaaacctgtatgcaggtcaggaagcaacagttagaactggacatggagcaacagactggctccaaataggaaaaggagtacgtcaaggctgtatattgtcaccctgcttatttaacttatacacagagtacatcatgagaaatgctaggctggatgaaacagaagctggaatcaagattgctgggagaaacatcaataacctcagatatgcagatgacaccacccttatggcagaaagcgaagaagaactaaagagcctcttgatgaaagtaaaagaggagagtgaaaaagttggcttaaagctcaacattcagataactaagattatggcatccggtcccatcatgtcatgacaaatagatgggaaaatagtagaaacaatgacagactttatttttctggactccaaaattactgcagatggtgattgcagccatgaaattagaagatgcttactccttggaagaaaagctatgaccaacacagacagtatattgaaaagcagagacattactttgccaacaaaagtctgtctagtcaaggctatggtttttccagtagtcatgtagggatgtgagagttggaccataaagaaaaatgatctctttagaattgatgcttttgaactgtggtgttggaaaagactcttgagagtcccttggactgcaaggaaatctaaccagtccatcctaaaggagatcagtccttgggtgttcattggaaggactgaagctaaagctgaaactccaatactttggccacctgatgtgaagaactgacttatttgaaaagaccctgatgctgggaaagactgaaggcaggaggagaagaggatgagagagtataagatggttggatggcatcactgactcagtggacatgagtttgagtaaactctgggagttggtgatggacagggaaccctggcgtgcttcagtctatggggttgcaaaggagtaggacacgactgagcgagtaaactgaactggacggaatcagatcagatcagatcagatcagtcgctcagtcgtgtccgactcactgaacggaatagggaagaacaaatctgactccatattagatctgtttcttttacctttagttttgttttgttgttggttttctctctctctctctctctctctttttttttgtattttacctttgcattctattgtttttacttagaatcaagaatgtttcctacagtctgacctttaaggttacaactcctttccattcatatagagataaaaagttgcagaacagagaataacatttgttttgctgaaggttacaggaacattgtgacctgacctatacagacagcttcaataacaaagggttccaacaggaagtttgcaacaaccaactaccctctcccttagcttgctttttaaaatgctttcctgagacgctttggagagtttggagtttggggccaggagccaccccttattcttgcatggccctgcaatcaccctctctctgctccagactccgacattttggtattgtttggcctcagtgggcatcaggcacacaaatttgcttttggtaataagttctgccatggcactcagtctcagacactcaacaaatccctgaactgcattctgctttggcattactgtatgtctggggaccctgtttacttcctttagaacaggctctatgaacacaggttgaacacattaagctgactcttcagatgctgaatttacttttatttagggatagctgcaagttccccatgtgtaaaataatctgaagatttaccttgaaagatttttgcaagaaagttttgctcactgtagttgaagaagaatggactactactctgcccaataagagttcacatacagagctcaaatcaagatgaatacaactctttaaagcaagaaaaatttactcttttagttggcccatagagtaccttactttacttccatctattagaaacatgttataaaaggttggattcctaggaaaagaccctttaggaaaattgtcttaaaaattgttaaatccatgatatctattgtatgcccgatataccctaaccttgtgcagtgtacaacctatacaactgtatgtgataatgcttaattttatgccagaaaggattactgttctcgtgggactctggactcacttcctggatgcaaataaaatttagaatgcaaatttcaccatgagcatgtctata

SEQ ID NO: 63407 - DNA, 935 bp, Bovine  19866880367599
  misc_feature (1)..(1): n is a, c, g, or t
nctccatccagctttgagatgactgtgtctccagtggacatcttgaccataacctcatgagggacctcaagctacaagctctcagctgagcagctctccaatttctgatcacagaaaccatgagagagaataactgtctgctgttgcttcaagtctcataagttgtagggcaatttgttatgtgaaggtagataactgatatggctgttttgatgtggggagagagagaaagcacagatgcactggctaatggagagagagaaaggagaagtactagaggcagaggctgaggattaccaaagggcaaccgcaccatgttgctcgtgggcacagtcctggaggcattttctggaagagaagcaacagaatcgagtgtgccaagtgctttgaagtgcctggagaccctgcagggaatggcactgggtaaccaggaggtcgtgcttttctctttatcatctctgccattaactggagcggagctctttgtgggaaacatgcaaattgcttaaaatggggttgaattccctccatctctctttaactggaaatataattgcaactctttgcacattgctctgatttttttttttttttaaatcctgtcacgctttgttggctcactgcttttcatcttactgtttattaaaatagcctgagtcctctttgatgctgaaagcccaagtatgtgattgggagctattgccaaattacagttcatttttatttgatactaagattctagactattcatttttaagtgtgttttttttttttttttttcaactttggagttggggagtgggagtagggaagggagaaaagtaggaaacagtgaatggtcaatgggaactctgtcctaacctcaccaatctggcagttattgtcaaagcattcccagaacatttccagtgctctcctctcctgtagacttagtc

SEQ ID NO: 63408 - DNA, 1792 bp, Bovine  19866880445999
  misc_feature (1)..(1): n is a, c, g, or t
ntttcggcaaaagcccatccagaagccattgcctctcaactcttcctagctctgcttaactctctcctctgctctggttataaagcaggtaccacgggtgtcgcctcattcttgtctcatgtacaccacgttgtgcattcttatccatggaggattaaggatcactgaaagcagtgactaatccatggctgggactagttagccgcctgcctggtatgtggctgtggctgacatagagaactgagcctgagagctggtgctttcctcctgctttaatgagagcagtgctgagaatagacaacagtgtgggtgatgcatagttaatcaagactttgggtgaacactatattcccaattaaatatgatttaattctgcttatagtggcagaaaaagattcttacagttcttttgtctgattacatcacttgctacattaagttcattaggaatattaggcaatgaataaaggccaaaggaaatgaaccatttttaatgaatgaagaatagtatggaggccatttactagccaagatgaatagtagcaataaactggagattcatttctttgacactctgtttaaatgcattcctgttgcctcttccattcagaagcatagattgagcaggccataaaatttacaatgttatttggaacaatttttttttttttttaggaaatgctatagctgaaatagctgaagaatcttaaatgatagactgtggataacatcttgagagctaggtcttcttatctagttgggatgaggggaatatttcatacatttttctgtttcatttagataactaggtagtttcactcctaactggaaggtgctcattccaagccatctacctttcagaaacacgtgcaaagcctttgccccagtcttgacttggagccggactcctgcagccaaaggctttttcagagatttgtgaccgtgaaagggaaaatctttccaaagtttaaaattctgcaaaatttccaaagagatagccactgcacttttggagggattttaatcgaaccaagaaataaaagcaaagccatcatatcttttcatcactgcctaacccttttaaaaatatgtattaaaatttatatcatttggatattcatgcctatggccttcaaaactttttctttaatccactaccttctccaacccctaggagaaaccacagtgcagatagcaattaagagacagctggtttcttccacaaaatgggctttaaaaaaaaaaaaaaaagtgccttttcaaaccctctgcttgtagggagttgtgctccttgtcatttctgccttctccataggatacccactccctaggacctcagtattaaaggctgtaccagaatttgttgttgatagctttcagctatcaaaagttaatttgtttatactttatatgttaaaaaaaaaaaaaaaaaaaaagatatgaaaggcacctgagtctctagcagaactcaagagactgaggccaagtgaaaaagatggtctctgtcacactcaccaattctgcctgggaattctgtctcaaacttgtcctttctccatatcatcccagtacaggcccaagatatccttacctgtcccagtaaaggcccaagatatacttttgcaagaaccatccctacccatgtactactgcaggcagcctcttatgttccaggatctcactaccagagttgattcctaacaaatgcaggggtgtcaatcctaagctaaagtctcagaattgagtactttccctttgaaggaaggatggagtacatgatccttccatcatt

SEQ ID NO: 63409 - DNA, 1255 bp, Bovine  19866880475064
  misc_feature (1)..(1): n is a, c, g, or t
ncccaaatctgtataacattccaaatgaatgattccctgaccaagttctatgtgaaagaatccaagacatcagagccaccatcttccctcaaccacaaagctttttaattttttttcttattttacgtattctaaaagattggtttgtaacaattttaagacacaagatgctttgatggtgaagcctgtaatgtagcagcagaaatgcatttcaggttccctatgtgaagaacaaggctgcatgttttctgtaaaatgtcatgacagtttctttctagagcctgaagacttggaggttgttaaaggtatgggagcagccaaattttctatggatcagtagttttacaaactaaaaataggcggtgatttgacctatcctaatgcaacactcaactaaagaggctgtttggatccccataatcaagtatctcaaaaagtcaagtcttttcaagtaggtgccttcaagtatttctgttacacagagcttaaaatttttttttgcaaatttacattcaaattggtatatttttcatgtgcccattttataaatgtgacaccagaagacccatttccccatcagaagacctgtaacatctttatctcacatccatttggggggaaaaccttagatgtccaccctccctccactgcccattgtggagggtgaatccacaggtaaagtccaaagttgagaaagtgaaactcatttcgtgggggcagtcaggaattaaggtggctcagaggttaagaatccacctgacaatgcaggaggcatgggtttgaatcctaggtcaagaagatcccctggagaaggaaatggcaagccactccagtattcttgcctgtgaaatcccagggacagaggagcctggtgggctacagtccatggggttacaaaagagtcaggcatgacttagagactgaaaaataaccataggagttaaggacaggacactttcttgaggaggatgtggaaacgtagtcaggaagagtgcagacgctgtgtttcaggctgccaagtcgagacacgaagctttgggaagcaagattggattggagagttcctgttggaggcaagtgggaagagaaagatctgacaggtggggaaatctggctgcctctgctaagtgttctactggtatggttctaatttgcaagttagacccttgctgtttctctgcccttgaattttgtcttgagggtcattttccccttttactaactatacaggctctgtcttatttcttcgtatggt

SEQ ID NO: 63410 - DNA, 2362 bp, Bovine  19866880558372
  misc_feature (1)..(1): n is a, c, g, or t
natgctagagaagatagatgcataggattcattgaggactgagttgcgtcgtacacagtaactcactgtccggaaactggctggctgggttagagtaagcatgggtttcacactgaatcctctcatacatccggtatctgggaacatctgctgacattcagattgatgcatcacatattcattgaaattcctccttgaagacttgcttttggcctctccctgccctgcacaccaggtagacacacccaggcacgaaatgtgatgtgtattcatgtgaccccatggactgtagcccacctggccactctgtccaagggattttccaggcaagaatactggagtgggttccatttcttcctccagggcatcttccttatccagctatcaaatctgtgtctcctgcgtctcctgtgttggcaggcaggttctttatcactgcatgtgatgaactgccctcttttctatctgccctctcctatagcaaaaagacagccattaacattcacaagattcttcatatattaaaaagttctttcatcatgtgtatcatctcagaatttcttccctgtggtgatgctctgaggtaggtctcattattattctcactttaaagatgaattaaatgactttctggcaataacataaccaatacaagatagttttatgtctaacgattaaggttctgactccaaattatcatatatttgtatatatatttgcatttatgtattcatacatacacatatattttacatgctttttgaaatataaccacctgtctcagaattaagaggtataaaatatggataagaaggaaacagaagcatagaactaagagaaggctgcaatgaggagtaaaatggactcatactggtatatctgaaacctcagaactttccagagtatataaatgatctgtctttcaacatgatatgtccatattaacaaaaaaggaactcccgggtcatagtatagtttcaatttgagtgaggtcatgcttggcaaaaaagctcaataaaacgtttgttgaaaggacccttcttgagcaaactagacattggagacagatggacattttctactctgagcccaggaggaacaacaaatggtgttattaattcagaggtcagcttcctgcagttactgttgttcaacttgtatcaacagactaaccacaactgtgcaagaatctgccctgtgtctgacttcagcaaaattctgaagtttctgttttttttttttaagtttatgcttaataaagaagtgtgctgatacagttctaagcttccagtgatggacttggccttcctccacacctggatgatcctgctttagtaaagctgttcaagtaagaggctgatcgagcactttcaagggatggccagagtgagtcactcccctacgtggaagtttactggataacttgaataggcatccagcttctaaccagaaaggagggtttcttgtaaatggggtaacagatgtaatatgagcaaagtcccaaggagtttcccaaagaaacttgaatgctttctgggaaagaaaggccattttttggtcacattctcttagcttctaatgcctctgtattttgatgtgtcacaagtgactcagcttctagggagatgaaaccagcttagaggagccactaaaacatccatgagcaaatagacttgggtgcaagactgaaaacgcagagtatgtgagagaacggggctggatagatagagcctgtgcatatagtcttggggagaacgtcccccgacacagtggatgaaaattgtattcacactgtatggctgagggccgtgccatttaatggatttctgaaaacactgcagctcatcccttgcaaaggaagcccgttaataaaacgagggtggcgggtaaccagccacagatagcacggccgctgccagcttgctgtgattagaaagcttgctgcacttaatgcattcccagccacagtgaaacagcttcatttaataaagcggtagtactgctgacacaaatgtattaaaaagtgggcacaagcagagtctaaagctctcaggaacattccacctgctaggggaaagggtggcagaaaggtgcagtcttcaaaggacttgtatttcatgagcgaaacccagttctggcattctcctggacactaaagacaatggcagaggtatgccatttcagctaacaccagtgagcatcataaatgtaaaatactgcttacagtatacatgcatacatatatacatatatatacacatgctatctatatacaaagtaaatacaccacatactatattatagtatacacacatacacatatacactttagctaaataaatctgtgctttcctaaaaaagt

SEQ ID NO: 63411 - DNA, 1955 bp, Bovine  19866880567445
  misc_feature (1)..(1): n is a, c, g, or t
ntgatattacattggatgagaaactcactcggacttcctgtgatttacttttctggtaacattccttcctgatgcttggtttaatgcttgccaaggtaataggaatttgaaaaagtcaaacaactttgagattctgaagtaaaaggaaccatataaatagaaaatacattttcagtcgtctcctgatgttgaagtccatttcataataatagtcatcattgtgtcaaacagtttttcaagaggtaggatgcagaagtggctttgagtttcttagtaaattaagtacaagggaaaaattagtatttttgccttcatctaaaattataggattgatttttacctgggtagttataattagatctcaatgattggtgattgattttctggtgctgttatcctgtctacatgaatagttgctgtagtgatttatccaataaaagactgaagtaagaaacctggtattttaacgacttgaaactgttaagacagtctctaatgatacaacagcaaaaagtaaaatgactgctaatcagtggcactatcagcctctatttaaaacgtggcagtttgaggtagttaattttatctagtgaaactatctactgggggatactggaaagagcttagaaaaatgtaatgactgctcagaagtaaatcatgttataatgtcaatgctgactactggaaaactttcaagaatgggagagaggagaatgaaaaattattcctacagaatttccttaaaagaaaagagaacgtaccatatcttattttctgaaactttcttttatagataaagatgctttccaaatatggaaattcacaccattcatgacctagtctttaaaatcaatagctatttctcttttattttcttttaaatcagacaattcctctaatattaatttcagattcctctcatcttaaatgttctggttgtgtttttgcttctttcttctcccatttcacttgagaatttgcttgattagtaattctatttttccttcatgttcagtttcttcttctgcacttgttcagtcccctcagcctgtaggaaaatgtattctataaccaaaaaagaaaatgaaataaaattgactaccataattaaccatattctcatatttccccctttttttttttttttgcttagtgttaaggagtgattccaatctacttgctgcttactggctattacctctttcagcttgtcatctgctcctgtctgtcctctatgtcctcatatgtccactatgtctgaggatctcgggggaccctgcattcatggaacctttgcactcttattctctagttcttgactgcttcaactttggagggaggaaggtgttgaatagtattaactatactttccctttcattgtattacttctcatttgcaagatttaaatctgtgcctgagaagtaggacagtctggtcacaaccacgttgagctgaaatgtcatcatgacatacatactctatgtgagctgtcacttgtatttctgcctaatttttcatacctcccatctactttctcatgttttcttctttttttcctccttctatttaaatgtattttcttttcttgatctagtttcggttttctcactgatctggtgttcagtggatggaaatgttggaatgtgaaagtgagaaatgatgtgacgcctatattacaggtggatgagggtggcaagggaatgtaatccgacatggtgaagggactgagtgggagagaattgtcactccccagggagccagtgctccagtgttcactccctagagtgacttcaactgtgtgctggtctcagggggtgcactcatattccagaatatctagtccaaagaaggaggtgaagcagaaggattccaggtggcagcagtcatttcaggacaccagctcctgaaatggggtcatggagaaaaagtttctgggtatctgatagtaatagca

SEQ ID NO: 63412 - DNA, 1581 bp, Bovine  19866880592286
  misc_feature (1)..(1): n is a, c, g, or t
ntagttcttcatacattttaaaataagcttctactgctaacatgctctcaaaccattcagtcaatgattatctctcccaactgacaatgcagttggggttgttgtttgttgttggttagttgctaagttgtgtcccattctatgaccccgtggactctagcccacgaggctcctctgtccatgagatttcccaggacagaatattggactgagttgccatttctttctccaatgcagctacattggcgagtggtagtgtcaaatctttctttgagaaatatttcataagcttcctaagtgtccttgctagagttaacttatctgatataactatttatttatgttttgtctgtgctgggtcttcactgctgtgcatgagctttctctagttgcaatgagtagggatcactctctagctgcggacaaggtctcctaattgcagtggtttctctttttacaggctctaaggcacgtgggtttcagtagtcgcagttctcaggccctaaagtgcaggctcagtagatgaggcacacgggcttagttgacctgtggcaggtgatatcttcctggggatcaaacccctgtcccctgccttgtcaggtgaattcttaaccactggaccaccaaggaaatcctgacataacttttgactctcttacattggattcaaacagtttatgcccattcaatgccagttaatcagtggtactcagaatgaaatattcaggtgtctaaacagatcttttgtggtaaacagtgtctgagaggatacaatgctggggataagtggctgactcggtgtgggagtaaaggatggaataaaagatcatctttatccaattgtgatttgtgaatttgaacagccagattcataaacacttggaccttaagtaaaatagcactaatcttggaaccggaagacctgactctggcattttctatacgtaaccagtgaaccatccctttcctcatttatgcaacaaagaaaatcatgctggccctgcaaactacatctttcacccttactgtgacattataaagaaagtcaaatgaaataatgtctagggaagttctctgcaagctataaaaatgaacatgcacaggattaatattaagggcaataagcagtcagaaactgagtaggccttcagaatacacagaagaatcaatctgttttttagtgtgggtttagggttctgaccaaggtgtttattctccaaatatctttttcaccttcacctatgctacctaaaattccatgcttttgaaatgtcaaatcttctgggctaacaaactggatatttgaaagtatgtctgtttgaacggagagggggagaagtcctgggaggacctttctaagtgagaaaaagaagtctactaacataatctaagaaaattaacaaatctggacttgtttatggtgtttccttggagaaggcaatggcaccccactccagtactcttgcctggaaaaccccatggatggaggggcctggtaggctgcagtccatggggtcgctaagtcggacacgactgagcaacttcactttcacttttcacttccatgcattggagaaggaa

SEQ ID NO: 63413 - DNA, 948 bp, Bovine  19866880592356
  misc_feature (1)..(1): n is a, c, g, or t
ntgaaacagcctccccagatgattaaaacactcctgtacaatgtacatttacaaattgaaaattaatgaggaaacatgtttaaaaattgactatagctacccaagggtttaaaaacactttaaaatgcatgaagaaatcacttggctatgcagccctccttaagtgacaaataagtgacattacttctcagaattactcctgctgaattaactttccaatgtattggttattatggttgcataccaatattatattttgaaaaatactacaaatcatatccccccctactcctgttttctggggtaattcattttgcatctttccaacttaaggtaaatgacccagaacaaagcaaagatatccctcatggatgacgggtgtaacaacaagcacaattgtattctgccagtggggatgttctattctccattaaaagtttctctagtattcctgcccacaaacacaaaatagattctgcagcactttctggccaacacagggttccctgcaggctgccttcagtcagggcattccatctagcagctttggggatgggagtctttatcagggagataaaaagaggaaggaaaagacataattctcatcctccaagattcaacagaatagcagaagtggaggcagggctttgagtgggtaattgaccttttttttttttttttggaataattgctttaggatgttgtggtattttctgctgcacgactaagtgaatcagctatatgtaccatgtatcgcctcccttttgttccgtcctcccccaccctcaacttcagtcatctatgtcagcacagagcccagagccgagctccctgtgctacacagcagcctcccactagttatctatttcacacatggcagtgtatatattcctaatttcccaattcgtcacaccctgccctccgctagcccatgtttacattctttct

SEQ ID NO: 63414 - DNA, 1086 bp, Bovine  19866880611162
  misc_feature (1)..(1): n is a, c, g, or t
ncaaatgcatgaagctcacttaaattcaatatagagagcactggactcggagtcagggtggacaggtggataatctcagtttgtctcccagctaccaatgtaactgtgagccaatcactttattcctctgggccttggtagtttaagctgtaaaattataaatgttatggaggatgggctgcagagtttaaatgatctctgaagtcctttttagctctcaaattctgtgaatctataagcattccaaactcatgtagcacttataacatgaatattcaatctaaattctcaacattgcttctacagaatacagcaaaacagtatctaatgtcttgattaatcagccaaaactatcttccttacgaatgaagggaaagatgtttttccccgtctcatactgcagaggagtcagttatttaaacctgctctctctgacactgttcttgttgtagcaaacgccatagaaagttcccggggagggggaataaactaggaggctgggattaatatatatgcactgctgctgctgctaagtcgcttcagtcgtatacgcactcttatgtatcaaatagataaccaacaaggacctaccacatagcacagggaaccataccatgtaatgctatgtgtatgtaataacctataagagaaaaaaatctgaaaaagtatatatatataggagaaggcaatggcaccgcactccagtacttttgcctggaaaatcccatggacggaggagcctggtaggctgcagtccatggggtggctagagtcggacacgactgagcaacttcactttcatttttcactttcatgcactggagaaggaaatggcaacccacttcagtgttcttgcctggagaatcccagggacggggaagcctggtgggctgccgtttatgggatcgcacagagtcggacacgaccgaagcaacttagcagcagcatcatagaatggctatgccgcacacctgaaatttacatggtcttgtaaatcaattatgtgtgtgctgcgtgctaagttgtttcagtcatatccagctctttatgacccatgaactgtagcctgccaggctcctctgtcca

SEQ ID NO: 63415 - DNA, 1033 bp, Bovine  19866880689828
  misc_feature (1)..(1): n is a, c, g, or t
naatccttatgaggaaaagcagcttcaagtctggaaataaatgatttcaaaatgttttcttacaatgaatctaaaaataattggccccatcatgaacagatgtgagaaaaagaattgaatgccttaaaattccttttttctgtaaatgttttggaacatctataattcatgctttgagaagccagctacctaaacataatagcagtttttaaaaagatccagtgaaccataacagctggagacctgagagatgatatcctatcacaaactagaaccctattctcaacatgcactgcagatgttttttctgtctgaattacatatatgtcacccaaccctggtggctcagacagtaaagaatctgcctgcaatgcaggggacctgggttcaatccctgggtcaggaagatcccctggagaagggaatggctacccactccagtattcttgcctagagaattccatggatagaggagcctggcaggggcgttcacagggtcacaacggctgagcgactaacactttcattatttcttcagccattcccaaccccacaatagtaaaggtgctgttgaaaaccacaaagcatctctacgtattatgtgaaccgtctttgttccccactgcctcccccagaggagaatagcatatgggggacccaactgcatctgctagttctttggattgctaggatggagaagggctaagagccaagaccccatagctagactgcctggacagggacctccaggcatccccacttagtgtcaccctgggttcattacctggtttcatgtcctcatctgtaaacagcctattctatctcatagagctgaatgaggattacatgcagtccatttatagaaagaacttcgaacagtgcctgatacaatgtaaagactccatacatgtcagctataatttagtttacattttcatggacagtgattttacaaacttgggctgatgacagcccacctttagccacagtttttacgtaaggaactgggtcacaaaaaggacagctgaggagt

SEQ ID NO: 63416 - DNA, 2258 bp, Bovine  19866880744998
  misc_feature (1)..(1): n is a, c, g, or t
ngctgatctcctttagaatggactggttggatctccttgcagtccaagggactctcaagagtcctttccaacaccacagttcaaaagaaagatcagaacaaatcccagcattagttacatcctctttgacttgttggctgaatttctggatttaatagctgtcattccctccaaaagcttttattcagtacttaccatgtgccataaatgctgctaaggacaggctagacgtggtccctgtgagactgtttaagggatcgaattccatttggaagaggaagtgagtttcccattgaccctttcaactgtccctctttgaccgtccttcaccttttcctttactcctcattggtttcaaataggaaaaaaactgcctcatgcttagtcactcagtcatgtctgactttttgcaacccactagactgtagcctaccaggctccactgtccatggaattctccaccaagaatactgaagtaggtagctatttgcttctccaggggatcttcctgatctggggatccaacccaggtcttctgcattgcaggtggattctttaccatctgagccaccaggtaaacaactaatacagtatattctcagcttcagacacatttccttgattcatcttcgagctgagactgggaccgtaaagacaatttgaagaatcttagaaatatttaaaatgttctttgagaactaaaaatgccttacaaatactccttttggggggaggaatgtattatattttgccattcagtatacagtatggggcctagatgatactctgattagagtatctcaactgcaaacaataccttatttgttttcttgacaacactcagagttaagagtgtggttaaatataaccaaacatagccatctttctcaggggtaggcataaagccctggtacaagggaaacataatcaattatcaagtcaggatcccttcaagaaaagcagaactgttcagagcattgttgtttagtcgctgagttgtgtctgactcttctgcgaccccatggatggatcctgggttgggaagatcccctgtagaaggaactggcaacccactcgagtatacttgcctaggaaattccatggacaagggagcctggtgggctacaaatacaaaaattgagctttgaaaataataagtagcctgccacagtactagtaagtacaagagacaggattcaaacatagattttctggttccatatttcagaccaacatctcccccactggatagtggtgcttttttgcattgtgttcttagaaaaattacttgacttttctggaccttggacttcctcattagtcaaatggcaatgttgagttcttatcatttgtaagattccttatggctccggggattggaaaaggtcattttccctttccaccccaccccctgctcctttggcatttacttgtcctctggccagctcttgatcattaaaaatgaagatgacactcaaagtaatgtctggccaagaggacaccatccgaatgttttccttctgacctctaaatcagtctgcacatctcgcctgtagaacaaaatccaagaacgaggcagagggagggactggggactttaattatatttttaaacaatggctttccattaaaattgtatttttctacacctttggaaaattacattgtagatgagataaatgcagcctcgcatttgaattaaggttatctttagactggtaatctcatttgctgtttagcaattttaattcaagtcaaggcagtgtaattagcaccctcagccaattgccattcctcactgctttgtagctgtatttactgctgttaggacaagactactcgtgtggaaagtataagtcaacatactaaattattgaaggtggcatacatcgacagatactccctgtgcatcctgatgcttcagattccgaggccttacatcatcaggcccagggaggaccagtgccttggctggccgtagcggaatgtcactattttttatacagagagaaataaactggagattttgttctatagcaaatatgccaagtttagcagtgctttaaagtatttttttttattttaattggaggctaattactttacaatattgtagtgcattttgccatatattgacatgaatcagccatgggtgtacatgtgttcatgtacaaaaataaagtatttttaattggagctgtttagcataatttaaaaatcatactttatgacagatttctttttcacactaaggtatg

SEQ ID NO: 63417 - DNA, 1103 bp, Bovine  19866880755056
  misc_feature (1)..(1): n is a, c, g, or t
ngtcttcccaacccagggatcgaagccagctctcctgccttacagattctttactggctgagtcaccaaggaaagtgacctctatggtgtctttcaattctattcagtccttcagtatctgtttttctctgactgtgtctctgctaaatgtattctagtaagtgtgaaagaaagtgaaagtgaagttgctcggtcatgtccacctctttgcgatcccatggactgtagcccacgaggctcctccatccatgggattttcccagcaagagtactagagtgggttgccatttccttctccagaggatcttccccactcagggatcaaacctgggtcttctgcatcgcaagcagatacttttaccatctgagccacgagagaagctgtttgtaagatttttcttaaaccacttcatctgtcttgactcttgactcatatattattggcatgcattattcattttataagccctgataacacctaccacatgcttctgcctacattgattctcagtacaaagactgctgaaatttgcattgaagatggctagaagttaagagttgagaagacttagaaaaataagaaggaaagaatggagcaaaagtttttaacacaaagaaggcactgtaatagagaggccaatgcagtagctggtacctggtaactatactgaatctattctatgacttcacagtggaacagttttccggagctgagctagtgatagcttggccccagtgtttcccaaaatggggagccgaggtggtagacagcatccttttactataaatagccaagtgtttcatcatgtgttgaaactatttctttgtattttaacatgtgatttcccatttatagaagtaatagagttttcttactaaatttagaaaaatattcattaaattatagggtgggtaatctatggatttaacacaaatcatgaagatactatttaaactactaggttttaagaaatcccttagtttttcaaaggaagagactgacttggcagagatcacaccatgagcaactggcagaaatgggctaaatcccagatgcactacagagggtctgaggaccgggtgctatacccctgtctgtgact

SEQ ID NO: 63418 - DNA, 1183 bp, Bovine  19866880873749
  misc_feature (1)..(1): n is a, c, g, or t
ngtaagaatactggcatgggtaggcattcccttctccaggagatcatcctgacccagggatcaaacccacatctgctgcattgctggcaggttctttaccactgagcccaccagggaagcctgtacctgtttatattatagcttaaaacctgtaggtgaatatctacaggtggttaaaaaacagttaagaaaattaatgagttaagcttctgtttacactattgagatgacaggtaatctttggttatttgaataaaattttcatgcattaatatagctaacatttttattaatattaattatagagattaatcataatatattgttattggtacatcagtttaatatatatgctctgtatttatatatgtgtgtatatgcatatatattatttaacttccaattcctgatatgaagagtgacttatattcaaattcaaacataattcaaactaagtttatcttttctggtacctactaatgactttaatgaagaaaatctgtattttattttgctttttgcattttagttccttgagaacagggagctttatcaatttgtattccttgtgataatcagaggacttagttgcagactcttggtaaatgtctgttgaactcagttatctgaagagatagttgactattcttgacaatagctttctaatgtatgcatgttctcctggttttataggctgtatatttaattcagcatgcctacttctttttctccactccaggaggactataagcatatttacagacagacagatctgttgcctctttgcagaaaagtatatatcacttagaactttcttagagaaatgttagcattgtaaatttgactttcatgccttaggaaaacaaatctaacagcatataatacattcatgtgaggttttggtttgtgaatcttgatgtaacaattttgaaaggtaaacttaaaggttccatttgggcaaagcctagaagttgtttatattaacaacgcaagttaaaaattataggcacgtgttaaacagagaaagtaagccagaaagagaaaaacaaatatcatatttatggggcttccctagtggctcagatggtaaagaatctgcttgcaatgcaggaaacccgggttcaatccctgggtcaggaagatccactggagaaggggatggcggcccactccagtattcttg

SEQ ID NO: 63419 - DNA, 3027 bp, Bovine  19866880916331
  misc_feature (1)..(1): n is a, c, g, or t
natatacatagtactaatttttgtgtaaattttatcttcttatcatactatttagaaatttgcttggtttttaaaatacattttaatttgggagatgattttaatttataaaaggtttcaaaaatagattcccatttatactttgtccagtttcctctaatatttacatcatatataacctgtacatttaccaaaacaaagaagttagcattagtacagtactcttaagtaagtgctgcactttatttggatttcccccagttcttccactaatgtctttctcctgatccaggatccaatgtggggcctcacattgcatttagtgcttgttttgctttatctaacagtgttctggacatcttctcatctctgtacatatagttctgccatgttgttttcaaagagtgcatacttttagtcaatttagttcacacagtataatttacttaaccctccactgagtgttgatattttttcatatgaatctgaaatagcattaacatgtgtgaggactttccatgtattccatgtttcaccttcaccacaacctgtaactttgggatgtcaaaccaaggctttttcatctgtcctacagtggttccatgtataatatatgccactttgttatttttgatgtatttttctttgacaattgatctcttcaaactttagttgtgctaattttcattccatagaagtttttactttttgaatgatcaagtttgtagatgttttcatttgtgatgtctttcattgctttaaagctgagggaattattggaataaccctgttttaatagctaagatggggacttcccaggtaactcagtggtaaagaatttagctgccagtgcaggggacatcagagacatgggttcattccctgagtctggaagatctcctagaggaagaaatggcaacctgctccagtactcttgcctggaaaattccatggacaggtgagcctgatgggctacagttcatggagtcccaaagagtcagacacaactgagtgactgaacacgcacacacgtatttggaattctatgccttacttgtggttttccagttgttgagtaaaactagcagtgatcctgaactgaccagtaaattagttttgagacagtggtgaaaaaacgaatcccctggctttatgagcacaggattataaattggggttctgtcccccaaaatttattttattccataaatccatgaattaacaaaaagtgataatttttttttttttggtctgtcttcttttttttccatttggcctggtaatagggtctgtgtatggtcattaacaccatatttggatagataagattccttgtgtccctcaatttactacaatttgtacagtctttcaggaatcacttcatgacaggtactgtcaaaatgatgagatagatgaaaaccacaaagaggaaagaaaacatacccacattagctgtgactatgtgtctaatgtccactgtcaagttgagagtaggcaagggcttaaaatcagcccaattccccatctagacaaacataaccaggcaagagcctgagagagccacctctgagttcagcttattgtcattcagcttccattcttatgcagtttcttccctgttcagtatcagtttataaaagcatgttgcatgcccactgaccccagataactaactaaatcccagtttgtagtcatagaacgaagtcccagttcgtatatgtacaaatgcctgctgaagatggatacaaggaattcaaaataaatcaaccattaaatccaaatctcttagtggaataaaactaggaaagagcagttcagttcacatactgtccgcccattcatcaacccttgtggtacattatttattctctttgctggatgtgtgttttgggaggacatttatgcagagttggttaagggtttagagtcttggaccccagaaaactgcttatacctttgtgatatatactgagaattctatgctagtcagatctcccatttggatgaggtggcaatatccagcaacttataagtcccctgataaatagttctgcaattctttttcatacatttcccacagaaatctttaaaatcatgttcacaatgagacttaaaattacttctttctcaaaaaagaggatataatccaaaaggtttataaactgcatttgatagaaacttttggcctgaaaattaaaataagttcattttaatgattggcaatcaaaaaatataaacctcattaaattctaagacgatctgatgtattaagttttgagggaaagtatacataaaccactttgtagatgcagagctaactagtgtattctagttctttcttttttagtccatcatcctgaacatattagcctccgtttcctggtaatcaaaataatggcgtggtgattgtgaagggaccgtgttgtataaagctgttctgccatttaaatgaatatttcacttcttgtttctgaaaatcaatgttgttggttggctttgaatgtgttttgaatattttaatagaactgaattctctggaggaaaaaataaaagtatatctgtggcaggaccacaattccacttcttggttgtaaaccttcttagtagcatgagttcaaaatgtattcccattgaaataaattttattttaatgtcctaacatgctgattgtggaaagactgtaggaattcaacctaagggctcagcctggcagggggagaaatgtagcctgtgttttatgttaaaaactaaaaaggataatctgttttggaagaggtgcgtgtgtgctcagtcactcagtcatgtccgactctttgtgacaccatggactgcagcctgccagacttctccgtccgtgggatttcccaggtaagaatactggagtgtgctgtcatttcctcctctaagcagtcttcccacccaggcgtcgaacccgagtctcctgcattgacaggcggattctttaccactgacctacctgggaagacatattagtactaactgagtatagcatataagaggggacca

SEQ ID NO: 63420 - DNA, 1058 bp, Bovine  19866880929743
  misc_feature (1)..(1): n is a, c, g, or t
nagaatcccatgaacagaggaacctggcagctcatacagtccttggggttgcaaagagtcagacatgactgagcacctgagcactagtacgacaaccattttaaagtgtgcaattcagtattgccttttaatcctgagttaagcttctctcctaaagtgacaattggctagtcttttacaaagctattaactggttctattgagctgacattacaataatattcctgggtaaaacatttacatttaaataagggtattgataccttaactcaaagaactaactccattcttccctgactccctgtcatttataggatgagggtgaaatttattagtgatacacagaaaatcttcttagactggcccctgctcattcaaccttccttagctttctctcttatgtcatgagccccagatgtgctcaaatatttgcacttcccctggtgagccacgttctttcatgcttttctgtgtatttctttttcctgtttggtggatgcctgtgtatctttccttgagatgaagtccaaacattaagatgcctgtgaaaccttctccattttccccaggcagagttgagaggtggtactcttcattcattttctgcctctctctctcccattctctaggcaactttacataaccttcaccatgctgatttgtaaccttcagttcctttgttgttcctaataagactgtgaatgttttcagcataaggattgtttacatctccactgttcaatgatcttgaaatagagtagatgctcaaaagcagttactaaatgcaggaaaaaaaaaaaaaaaaaaactaatgctatttaaggatctctggcagactggttaaaaactttttttggtggaatgtacctttgggcaccgttcatgtggatatctactctaaagctatagctgatgagcaatatttgtcttgaaatcattgtaggagtaagaagccagaatgctgatacctctggaaatttttgaaactccctagagaatgatgcaaactattaattagatacatatcatgacaatatgtattttataggattaataaa

SEQ ID NO: 63421 - DNA, 2672 bp, Bovine  19866880951339
  misc_feature (1)..(1): n is a, c, g, or t
nccttgtgtttcccaatactggttatataattgcccattatttccccgattgtgttttttttttttggtgggggggaaatctaacatccaatgagttctctttgttagatattttcctggaattctgagggtaacagttgcttttctcaaaatgaaaacaattcatccattgtgctagttgcttagcctgcattttggagaaagaacttttgctcagataccattcataaatggctgcctcagaattctgaatagtttctcacgatcaaaaagtactaacgacattttgtgcaagtgattttcttgccctgtaaagtccaagtatcaatccacaaagagagcactgaagctactttttcttcagcctatcttggtgaacttcagttcagtatgaaatgcttgttttcatcagaagttttcctagaaggaagaagttaattgaggttttcattttcacatgattgcttgtcagtttttaggcacaattccttagattattaagataacaataacttattttccacagtagctttcaaaggagtcaactcttggttgttcaaagaaatttactgttttgcagaactttaatggactctcagctgttacagtggtgtacttgaagctgtacttgtgattgcttttcattctggagtaacatggtgggtggtcaggatttcaaaagagctgatctctcctgggcattgaatggaatttggtacatgggtagagattatgaagatcagagtatttaataaagaaaatataattgctttacaacagggtttctcaacctcctcctgaggaacattttaggctcataattctttgttgtgggcactgtcctgttcgctgtagcatgtttagctgcatacttgacatcccatcagatgtcaatggtaccatgcacccaaattgtgacaaccaaaaatggtactgaaacttccaaagattcactagggcacaaaattcttcctagttgaagtcacttctctttaatatatatatctcataaaatttaaattatgtgtactcaatgccctgtacctcattggttaatttgtaagaaacattatttgatatgaagaagtgacaagataagagaagaaatagatgacattctatttctttattgaagttatctctgaaattgcaattactcaaaactcaccagtttctcttataagtaatttggtgaaaactcctggtccccaaatgattcccctgtgatctttaatggtccctaaaatctcattatttaaagaatgtcttaatattctgaaaggtcttccaggaggggatacttaactgttattcaaatagaagtatttaattaggatggtctcactgatttctttttaacccaggcaaagctgaaactaaggctctgaggaaggaggacaggggcaggtgttggagaagaaggaaggtcgataataaattgggagatatgtgcacaatgaagagaaaggtagatgctaaactccacccttattaccagtaacgttctggactagttattacatgagactgactacaggacagacatctcacatgctcagtgcttattggctaaatgcttattaattgagagttaaattggggttggaatttcttcaattgacctgatctcctttggtacctcctggtctacctttgcagtatgactttctaataattcctttaaaagaaaagaaatatgtcaaacgtttctgcatttaacaactttccttggagccctgacatacctcaaacttgcttcctcagagctttaacttttaccatttgctcaaccaggagtgtcttcccatttctctgcctagtcatctctttctttatcatctcttgctttatttctaaatgaaaagatcagaagaatgcaagatacattacaagcagttaaggggaaatatgtgttgtgaatctagtgccacattgtaagtcacattcaaggtgagctcagtacacaaaggcaggaagaacgccaccattcctaggtcaccatcactggccttgaacagactcaactccccaaggtttgtagatactggttacagaaaccccaagacctagctgctcaaagtgtcgcccctggaccaacagcatctgtttttcttgggatcttgttgacaatgcagaatctcaggctccacgcctgacctcagtctgcattttaacagtattcccgagtcccatgactttcaagtttgtggagttctagcataagagacatcgttttcgtcactagaagtccaaagcactatccgttgtgccacagagccacctagagaaatcgttttctagtgtgtgtctccatgagatgctttctggaaaaataggagtatggcctcaaatgcatattgggaatctacttatagccactttttagagatccacaaggctcatggccactgagaaaggcactttggaaatcccaaattataatatcaagccttgggggctgatgagacgctacaatcccagacattttgcaattcagatttggttagaaaacaattgaagggactgacatgacggaagtaatgtttggggtgattagtttgaatggaccttattacttttaatgctaaaatatggataaattttcaaatgtcatagcagtcagtttgctcagtgctattaacttccaaattacctgtcaaaggcagtccaga

SEQ ID NO: 63422 - DNA, 1768 bp, Bovine  19866880956304
  misc_feature (1)..(1): n is a, c, g, or t
ntttaaggcccaatattgagaataaaagaaccaagatccctggagttgaaattcaggaacctatcacctataggaccatcccattcctgctggccttactgagaattgccaaagaattgtccctcacacaaaccacccctccacctccctgctcggcataactgtgactgggggaaaaggaaggatcatttttggaaattgtaattttcattaaagtggttctttgcttcattcatcccatcttgtggaagatggaagaatatgtatccctactctgaaagcaagagaacaacccagaaatactgggagactgcaacaagtatagatttatactttattccatatatatatgtggaatatatatatatacatacatacacacatatacatacacacatatacacatacatatacatgcaggaaaccctggttctattccttggtcaggaaaatcccctggagaagggatagactacccacttcagtattcatgggcttccctggtgcttcagacagcaaagaatccagctgcaatggtggaagacctgggttcgatccctgggttgggatgccatgggaaggaagccatgccctggaggagggcatggcaacccactccagtattcttgtctgaagaatccccatggacagaggagccctgtcgggctacagtccatggggggttgcaaagagttggacacgactgagtgactaagcccaatcacatatatataaaacatacttagccagtggactagctgaccagcacttgtaccagcagaatgaggaaactggaattggagacggaagacatgatggggagttgcaaataaagaagtgcagatcttctttctcttccctcgatttcctcattctggtgaagcaggaacatcagacctgcttcaagggttaagatgcgtgctcccaaccagaggctacaggcaaagggattactgcaatcaaggagctgttcaaagaagcacccctcatcagcagcatgtgtggcatccatcttctgtctgtgttggctctatagacagtgagtccacacagactgagattcagccaggtcaagagaggagactgttctgtttctacttcaatttctgcagtccaccagcaccagtattaaaaagagacatgttttgttgaaagctagaccaagatgcccttttccctttccccttaagcctcaactgccatggggagagatgactctctctgaagcaaatagaagattgaaactcaaagtttttactttagagtgaatgaaggagactgaaaaagtatcaactctgatgaattttgttacaagagttattgcaaagcaggatagggggattcatcatatcagattctgggcagctttaggcaaaactgaaaaccatcatatttacatgtcacatcagaatagcttggtggctcagctggtaaaaaacacatctgctaatgcaggagaagcaagagatgcaggtttgatccctaagttgggaagatccactggagaaagaaatggcaccattccagtattctttcctagaaaatcccagggacagaggaacatgacaggcctgcagtccatggggtagcagagttggacatgtctgagcatgcatgcatgcacttacatctctaaaaaataactttcatatcacatgttttcaagctccctttaggtcataaccacactcagtctcaaaatacatttccttgctcagtttattcctggaacctggctcccagcattgtggaaacccacaccttgata

SEQ ID NO: 63423 - DNA, 2426 bp, Bovine  19866880966343
  misc_feature (1)..(1): n is a, c, g, or t
ntttatttatgtttctatcaaggtaatagataaaacggtgcaccagacggtcatatatgttgagaaaaaaatgagaaagagcagattccttcatggcagtgaacaatattcaaataacatgcagatacccatgtgatgtggttggcttctgttggcattgagctatttttagtatataaatttaaaaatttattggactatgcttggtctttgttgctgtacacaggctttctctagttgcagtcagcaagggctactctctagttgtgttgtgtgtcttctcattctggtgacttctcatggagcacaggctctagggcacacaggtttcagtagttgtggcacatgggctgagttgccccgggaggcatgtgggattgtcccagattagggattgaacccatgtcccctggaatggcaggcagattcataaccactggatcaccaaggaagtcctggcattgagcttttgattcttgccctaagttttaagatattcatgaggctagagtgccaactaagaagaccttatggagagaatggagttgggtatttcatattcaaagcattcttttccatcagaagaccccctccacctccaccatactctattccatccccaaaataacacaataagagttgggaatttcctagtttgaacactaagagagaaagtttgggattgcctactgacttttgcctgtttgtacctacaatttttgaaacaaaagttgaactatttccttccagtgttcattctaaatgaggtaaatggaaagtccttatattatctaaacaatgaatggaaaaccgaagggctctcccaagtagttttttttttactaaactttcctaaaaatctatgaattctaggttacaagggtaaatatcaatagaagacaggctggttagatggctacttggaagtatcgacaggaaattaaatttgcaaaacagaagtaaaagccatggtagaatttttgtatgcagggacaaaaggaaggaaattgatattgagatttttgtagcattcttctctggtgatatcgaattgaagagcacacagtgtcatttatcaaaaggtcaaacctaagatgacttagcggaatgttctaagaccaaaaatcatgtgagagacccaaatctcaaagatacagaggcctaggcaaatgagatatctccaagataggtatctcagcatgtttatttatttatttgcaatttttagagatgatgcccacagagttttactatgtaaagtcattctggaatatcagcacccttttctaagtaaatatgataaatgtttactgaaataaattattgattttattcacaagttctgtaatattaataataaatacacttggggtatgaatgggatagccaacagtataagaaataaattatgtctctgcattctgaactaacaagaatgggtgcatgtaagaattttggggggaaatttccttttgttttttgatggtaatatctttgaccacctgatacaaagaaaccactcattggaaaagactctgatgctgggaaagattgaagtcaggaggagaagaggatgacagaggatgagatggttgaatggcatcactgactcaatggacatgaatttgagtaagctctgggagatggcgaaggacagggaatcctggtgtgctgcagtccatggagttgcatatcagttggacattactgagtgactgaacaataaaaatatgttgataaatattctggcagctgcagatttaataaagaagtgaagaggtagtatagaaagagggcagttcaaaagacactttaaatttattttaaaaaatgaataatagccgtacatgtatttgggtatttattttaggaaagaaaaggactggaaacagctacaaatttgagatgaaatgatggaatgtatagacctcttatgggggagacaagaagtcctctgtcctaccaccaaacacctctgaaaccttataaagggaaggtgggaggtgaggtgtctttgagattatttcaggctcagccattctctgcagtgatcactttgttcagatatgtatttgcagagctgccttgatgaaagtgaaaaaggagagtgaaaaagttggcttaaagctcaacattcagaaaacgaagatgatggcattcagtcccctcacttcatggcaaatagatggggaaacagtggaaacattggctgactttattttgggggggttcaaaaatcactgcagatggtgactgcagccatgatattaaaagatgcatactccttggaagggaaattatgaccaacctagacagcatattaaaatgcagagacgttactttgtcaacaaaggttcatctagtcaaagctatggtttttccagtggtcatgtatggatgtgagagtggactataaagaaagctaa

SEQ ID NO: 63424 - DNA, 1828 bp, Bovine  19866880968915
  misc_feature (1)..(1): n is a, c, g, or t
naatttctctctggtgccctccccacccttacccttatacctctttaccttgggcatttttttgtttttcggtgcccttgttctgcttgaccacatagataaggtttaaaataactcattaactttaacatgctaccagcccaaagagtttcgaaggttttctaaaagaagggcattctggccaagttgatgagcgttgggggctaggagaggactcaagatacttgctgatttattcttcactcattcatttaacaaatgtctgtcaagggctggtcatgggcctggcactatgctatgtactgagtgtagagatgaaagctctagttgtggcctcagtgggctagaagtcaagtaaggagcagacgtgcaaatagcagagcacagtgagagcacagctatacgacaatgtaagagatgggcacggagggctgcagccgaatcttgaagggcaaatatggaagggacaaagacaatctgagtagaggaaccagtgcatggaaggtaaagaggaaggagaacacagggggcactcaaggaactggattcaactggatgggctatagggccaacgctggagagataatttgggtggagggattggcgagagctgaaatctgagggcctagaggactctgccagcctcgtgaaggactttggacttcattgtaatgaagagtcattagaaagtttgctgtatgtggtagcagtgtgaaagactgagtaaaagattctttggcctagatgagactatggaaagagaaaaccagcttagagactagtacagtcagctaagtagaagctgaagagtgtttgaaccagggcaatggcagtggtgtgggagtggagggtatagatacgggagatttgggggtggggggcacaggggagacttggagtctggctaaggtgaaaggaggagaaggacgtatcatttgatttagcctcctgcctttcgataagcaagatatcgcataattttacaggtgagaaactgaggtttcgctgtaagtgatttccctaaagccatatctattaagtagggcttccctggtggttcagatggtaaagaatctgcctgcaatgcaggacccctgggttcaattcctgggtcgggaagatcccctggggtagatttccagcccactccagtagtcttctctggagaatcccatgggtgataggtctttggggctctgggtcacagctgtgtacagaagagagagagaatcagtggtgtttctgtagttaactgtagggagcaggactagacagaagctaggggttggaattccaagttcctctgaacagtttgtctggaggaacaagcaaagtcagagaagcacaaaagaaacaaaaagtacttgaattttctcattttcattaaggatgctcctgaaaagtcattcttgggagctctgtcggagtcacgagccctgccagaatgttctatttccttgcatgtataattcaatgtcatattgttagagcaagggacctgctccttctcacttcctatgttagactaggtttctttaccaaaatcttcactgtgtttttttattgtgggtaaaaggcaatatgtttatgaatttttaatattcctgtcaagatcttacaagaagatattactttgcaaggtatatagggatgctagcagttgggtggaaagtggatcataatctcaaaatagtaaatgctagctcagtggctttcccacagagaagtaatgtatctcagtaagacaagagagcatttgtagaagagggtttatttgcagctttccacttgttcccttctcctgcaccaacccaatctcctgggctct

SEQ ID NO: 63425 - DNA, 1162 bp, Bovine  19866881081626
  misc_feature (1)..(1): n is a, c, g, or t
nttgctaacgtcaaactgatgattacctattgcatcgattcactgaaaccaaccagcctacttgattattcaagccaaaatgagactttttttcctcttcagaaaatctctttgtcctaaagaaactcttatttcctgatgggccattcatttttgtttgtgactgactgatcacagtctttgtcacccattgtgctaatgacagttgggcatctcttgcctcctagaactagctcagagatttctaagctaaggtccttgtcatccacacagtgggtgcacatcctgagtaagccctgctgaatcaaaggctgctattcacttctgtcctctcttccatgtgctgatctaactacatgatgtttctaattgggtccaaacacaggacatttcatagactaactatagtactactgcaggatcagacatttaccatccccacatcattctgtacctttttatcctctaaggcctcccacgctgccccacgcccccaacctcaccgcccccaccccaccccctccatttcctgaaaatgtagttgttacaagtagatcatctgggcgtgggtcatgcactgttacaaaagcagttaaaaaaagatagtgacactgctctccctgctagaaattagccaggtgcaccattatgtaaggagctcaagctagagagcacagtaattaaaataacaatgaaatgatagcttatgcaacactccacaaatatgatattttcatttgtagtattgtacaaaccaagcatatcaggcagagatgttctgtgatttgcagaaggccaagggaaagtgaatgaggacactggaatagagttcttctgcctccctctcttgctatgccagtcaaaggcctgttatgcacaagagggtgttgtggcacatgaacatgtatggctgatgtctgtctcctaggatgctacaagtcaatgacatttacagcatgtggtcttgaaaaggaaaggggaggtagaaaaattgcccactggcagtagtgttgaatacagagtttccattttgtaggttcccttgtgattttttaaaagttcattcagaaatggtcagataggatggacaaaatctgatcaccaagctcataggggatgattattaaatgaggttcatattttatttaaatacttacaataa

SEQ ID NO: 63426 - DNA, 683 bp, Bovine  19866881152537
  misc_feature (1)..(1): n is a, c, g, or t
nttttcatttttccgaggtgctcttaaaggtatatacctagacttacctgtttaatcaggttatttgtagttgactgatgaaatggttggttcagaagaggaaccactgacatttggtttaattgccttggaacaggtatgtcccaggtgcttccatgatgggcatcttggataaagctaataaataaattgagtatgcagtgtaaatcaaatgccagctccagattttttccacatggcccaacatgtctaatgaaagcatctactctctgggacatgtggagatccaaaaggtatgcctggggtttacagaaaatgctgagggaaatcattcacagctctgatttagtttaaatgttcaatctgctttaagagctactctaaggcagtatttatctcttaaatgaaaacagcagactctcaaaaggcaaactttgtaccacaggtcaaaagacttcaattagaatttcggttgtaccacattgtgtgaccttgaacaagtcacataccttctctgcctcagtttgttaataatgggaataatcagcactgttaattttaccctcttcatgtggtttttgagtagtgagataatacaggtggcatttctgagaacaatatagtactgcataagtctaaggaatgatttattaacatgtaacagcaccacgtgggcttccctg

SEQ ID NO: 63427 - DNA, 732 bp, Bovine  19866881173355
  misc_feature (1)..(1): n is a, c, g, or t
nacaacaaattgtctaagtactcagcgtgtctgtttcagaggatcactctccatttgtgtcttagcctctttttcacccagtctgctgagcagaggctcatccttcagttggttagtaagttcttgtcaagatggatggacttttagacttattctgaagtgctgcctctctccatctgctttggaaacagctcacaaattcttcttcttgtttcagatgtgatcatcgatctcctgccagaggaaattaagaactgttctttgtttgttgggtagaagaggttctggagttctgacccctaatttgtttctcattctttgtgctttgcctgtagcatctgactcagtatttgcagtcttctttcatttcttgaaactcgtggtcttaaatttgtttgatcccacgaccattccatttgggcagatttatcaacaaacaaacaaatacaaccactctgtagcctagctcttgtctgccatcttccaagcactgttatatccctggagggtgtgtctgacctgccacaggttggatacttgatgacgtgcccaggggatgtgccatgtctcttggtggggagggggttgtaattgactggctctcttcccacttccagtggtgggggaatatgtttctagaacataggctattgttccctagaaatgaagagaagttactaaatctgtatcacagccagtttatgcagtgaaacaacaaggtttctttcagta

SEQ ID NO: 63428 - DNA, 1068 bp, Bovine  19866881187243
  misc_feature (1)..(1): n is a, c, g, or t
nttcattttttttttaatgtgtcagccctgtggcagatacaaagataaaatggcatggtagattctttgacatgctcacatataaaaatgaataaaagaaacaatataagttcaaaactgatgtaatatggaaaaattcagaaacctaccaagtaaatatttaccatggttaaacagaatggaagggactctcaaacaagaaaatgtgacttgaattgaaagagtttggtgattccatgtagtggaggagtaggggagatggcacaagagaaaacatattaagatgattccccaggcatgactggaggtgaggacgtcttggaggcagtctggctggtgggaacagaaatactcccagggaagtattaatgggataaaatacagatgctgggaaaagtgcatgtagagatgaagtggaagaagtattttagaaccaaccagtgatatctttgactatgtttgtttactgaagagcatatttaaaataatttgtagtatataatgaatttgttaaatttatgcagattaactgcaaccaaggatagctgtggactttatttttataagcatataattgttgttcattcgtgtctttaactctttgcaacctcatggactgcagtatgccaggctcctctgtcctccactatctcccagagtttgctcaaattcacgtccattgagtggatcggtgatactatctaaccatctcatcctctgcatatgatagtggacttttaaaaaatctgtcttttctaaatataaaaggctatacattctaaatcctgataattgtggcagagtttattgcttatgaatgtgtgtatacatgcactggtaggctctgatgaatgataaaatgcaaaatcaccagtggtgggtaatattaatgttaagttctgtgtttactatgactgtagttaatcaatatcttatttctgcaaacacgtttcacagactggctctgacacagtaggtaatctatactctaggaaaagctatagctcttctgacagtgctctgcattttctagttacttttttaaaggtgtaacaggtttcagagaag

SEQ ID NO: 63429 - DNA, 1283 bp, Bovine  19866881192066
  misc_feature (1)..(1): n is a, c, g, or t
nactagacattgagtatactagtagtaagtgtattattctgttcccagttctgtgtctacagatgtgaacacccagaaggacagagaccaggtctcattaatactttcatcaatatggtgagcataaacgtttgttgaaaggattcacaaatgaaaatgcttactgttttgatcttagtggctcactagattatcctccaataatttcttcttagcctcctgcactgtggccatatcaatttccccagaggagatatgacactccttcataaacattctattgtgttccaaagggcatccattatcttctcagttaggttaaccctttttggatgtctgtgttccagtgttatacaaagactctgtatgatttaaagtattatcaacggatgcacatcaaaatccagacttcaaaggagaacataacatcctcattaagtacaaagaatatttgtcaggccatgctgtgtttcttgaaaagcaattaacgtattgcacattattcctgtgagaggcaaaatgtatctttctcatcttaatttgcgtacttaaaagtagacagaaaaagatagatgagtttacactcaaggtgtatgcatttccctcgtggccaatgaaccaatttccttttcatatttgcagaatattgatacaattattctttcatcagacatgaaatctgagtgtataaccggtttgtggaaatcacctagtaatttattaggttgataacagcaattaagtcataattgcttctgagaaatataaattgactttctgtgttaagtggataatttaacattccaaatcacagacatagagtgtaactaatttgagggataagatgtttgtttttcctattattaaacttagaaaaatttaaaccattgacaatccagtaactaattatttggttgctggattattgggttcatgtcacttcttgattcttttctcaggttgcttgccatttttactatttaaggatatatggaggagaggattttagacagaaacataacatgtggataagccctagtttttttttaaattatttaaaaacattgttcttgtaagtgattaaagtgaaagttgctcagtcatatccagatctttgcgatccagtgggctgtagcctgctaggctcctctgtctgtggaattctcaatctgttaattggcaaatatttatcaactacttatgtgcaaagcattcagctgggtgtagtagaagatacaaaaatgtgggggaaaaacgtcctaattggtggtctcttcctaacc

SEQ ID NO: 63430 - DNA, 1136 bp, Bovine  19866881305079
  misc_feature (1)..(1): n is a, c, g, or t
ntttcacagttctcctcttttccttctgacctctggcaccagaccttcccatggctaacccatcatcagagagggcagcacaactgcccgcctgcccactgagcaatctgtgctctgggcagaagctctgagggaggctgatgctgatcaaatgcccaaggctggccctgagccacacgtcagctcaccacactgtcttaggggctgcagatggagacaggggagatggaggatgctatgcgctgcccagacaagctaataagcagggcccagggcccagggtgcttgccctcagtcagcctcagtggattctcctcatctgctccttaatttaaccaggcagaatcaaaggacccaatctctgagttaaatagggcttaaaagaaccccacacatttgaacatctccagtggtaagggatttgtgaataatgatattaagtagatgattattaccaagtgccgggcacacactgtctcctttaatctgccaaacaacacttctggttgggctgtcgtttccctgttctgcacatgtgggaggtgtgaagtggtttgggagatgctaagtcatatcctgacagtctgaccccagagctcagtgaggagaactctgcaccatgttgcctcttagggccttccagaacagctcatgttccctttaaaggaaacctctttcttacactgacacaatctatcttcttataacagccccctcagccctgactttgcttgtatttgatcatttctaccattgataaagacagcccatccaatcaattgtaatatttttaagataaaggacaattagaccagaaaacagtaaaccatgcgactgtgcctttgttctgatacattctttgttgccagtttgaagcagctcaatatgttttcctctcttccactttgccctttcatttttctccagcagcacattaacagaagccagaacttttgacaattgtgcagctaatttctaaatgattgaaataatttattattattccagtcaaggaaagtttctataggagccaggacagctgctaacagtgcccatagaatgagtattatttcattacacaaaagcctgacattcagtggaaatcaccctccaggaaagtacgggggtggggaata

SEQ ID NO: 63431 - DNA, 1924 bp, Bovine  19866881327073
  misc_feature (1)..(1): n is a, c, g, or t
ngtcgtcactaattggagataaagacatagaacagagatgtcctcgtgctgggaccttgaatcaagctctgctgagactcttatgtagacaagctgtcttggcagggatcttgtgggtctctgctggagatgtttatctttgccctgatattcctgtaaggagcagctgaagattaatgatgggcatctcaggtggcccagtggtaaagaatccacatgccaacacaggagatgcaagagactcaagttcgatccgtaatcgggaagatcccctggagaaggaaatggcaacccactccagtattctggcctagaaaattccatggacagatgtgcctggtgggctacagtccatgggaccacagagagtcggacatagccgaacacatgtatgtgcacatacacacacacaaatacacacaaaaagattaaccctgctctgggttgagatttaatacacaaagaaaaaatactagatttccttcttgtgttgcctactttgttaaggaagactatgaatttgcttcactgaaatatgatctactttaattaaagccagtggcattgagtaaattagaaggtaattgcattttctgtgaatttcacacagcttacattttagcaaaaggaaccaagtttcagttaatgcctgtgtgctgctacctgcaatcaaggccttaataaactaaacaaatcatgtctttatgcaagttaaggaagcataaatacaaagccaattcatatattttctaattgctgccatttgcgaaggcagagtttggaaaagtttacttaaaaggaaagctttctttcaagacaaactatctcaggaaggctgggtttcctccatttcaataatgaattgtcctagaaagtttcttccctgacacatgactatttccatttattttgaatgagataatacaatttcaagacagtggtaaaaggaaattcctaaatttgggatttggtcagtaaaataatatcagttttgaaataaggtattttaaaataaggaacaacaaaaaaacaactcttgtataatatgtaactattaagagagagggaaaggaacctgtcttattgggacctgtcttaacttctgtgtgtatcctgcttttccatttatgagctggataacaacctcgctgtatatcacctttcctcaaaaaaatgagaacagataaaaagcatagcaaccctgtagggttactgctagtattagacactataaaaataggcatgcctgccaagttgcttcagttgtgtccaaccctttgcagtcctatggactgtagcctgctggactcttctgtccatgggattctccaggcaagaatactggagtgggttgctgtgcccttctctaggggatcttccccgacccagggattgaacaacctgtgtctctcgcatctcctgtattggcaggcaggttctttaccaccagtgccacatgggaagtccataaaaacaggcaaataatggtaaatacaatcattttttgtttgttttcagagtcagaaacaagataacagacatgcactgatacagcacatgaattgtggggttatacctgaattccatgacgtatgaggttatgaactgaagtctcatttgaaatctcaccttcaacttacttcttgggaaagtgagactaactacctacgtgaagaagtagatacttctttgcttactcgatcccctcagcagagccctcagactcactggtttctaaggctccagatggtaccctcacctccagtaaattggcctggaaaagctacctgtgacttcacagggggtttgggccaggaagctttctacaaatcactctctttcatcttgctctcatgtgttcaattaacttaataattttttatagtctttaaggaagaaaacagggtcttaaaaatctttcaaa

SEQ ID NO: 63432 - DNA, 1080 bp, Bovine  19866881366030
  misc_feature (1)..(1): n is a, c, g, or t
natccatctgcaggcactgttgctcatgagagctgtctgaacatgaaaaaaccccctaaaagttctaaggagattagacataatatctctaggatgaaaaaaaaaatgagagtgaacttccttccctggcttcctccctggtctctataacccatctaagagctatttcactctcacttcaaactaatctaggactttttaataaattgcttgaaaaattacttatacctccgatgcacaaagttcttgtaataatggacacaggaaataagagatggttctggtgactattaagtgggtggttttatttttattttcccctgttcacacctctacgttattgaataaagaagtgaagaaatcatgaacgtaaaaggaacataagataaagcaacagctgaagggaccattagagagatgatgaactgaacagcacatttgttggagggcatttagtaaacagtggtatgaaaaaatattggaaaagaggtcagagatggaggcataaaccatcaggtgagcatcacttcccaggtggctcagtggtaaagaatctgcctgccaagcaagagactcaagtttgatccctgaatctctcaggaaggttccctggagaaggaaatggcaacccactccagtcttcctgccgggaaaataccatggacagaggagcctggcaggctacagtccatggggttgcaaagagtcggacacaatatagcgactaaacaaccacaaaagcattgctttgcagggcctgagagaatctggaacaggagccatagaatctggaataattaatgcaccagctaagtgggaaggaaaaatggaatggtgatttcaggagagaggtcaaacactcctcccagaaacaagctataaaagatcaaagaaaactagggtgaagaaggtaggatggaaatgttataaaagggtgaaattgtgactccaggacaagaaattagactgaatacagaatacatgttgttgaggataaaatccaaagaatgtatgtactttagttcctggacgcctgccacttgtgttttttcaactaggaaaattgctctcaagattagt

SEQ ID NO: 63433 - DNA, 1218 bp, Bovine  19866881409615
  misc_feature (1)..(1): n is a, c, g, or t
ncaggaacgcttccaagagctttgtggagggacttgttactgtcctggacctgagcaatctcttcttcttgatttgttctgactctttttaatctgagttctattgttctaagttaggctacttcttactcatccaaatagatttgattctatccacagttgatccataatcctgagatattctgccttaaccacacagtcttcattaatggtattactattgttcttcatatctttctcatttatttactcactcattctgaaaatatttatataatactttatcagacttgtgctcagcacctttaacagtttgaactaaatcatttctgttgtaggaaactgttctgtgcgtggtagaatgtgtagcaacatcccatgcttacccactagttgtccataacacccctgcctccctctgtgacactcaaaaatgtctctagtcactgttgagtccctgggggacagaatcacccgtggttgaaaactactacattttgtccatcactttgttaggtactatggatcctggagtaaacaaaatctcaaaatagtacaaatgaatggattataaaaagttgatgtaagaaagtctccttggttactgagcatcgtgtgctacctgagatgaatacttgtgtagaatcttctgcatgctgagaggctatgacaggtccagcaggctatagatagtagcacaaggtcctttctaagttcagttctccctagaagatccttctagtccaccctgaaaacacttctttctctgaaatcattcatccattcatctaaaaagtatttattgattgtccacttggtcccaagcatgttattatggctgtcttttttttcttactttgattcattctatctgtagcctccatcactagctactagccactgttggatgagagtaaaagctattcatttatagtaccatgctgctccctggagcaattctctttcactgccatgtgcccactccatatgggattcacaagaggtctagaaattcatgatccaattaaacaagagcttaattagtgcctactctttgtgaggcacacaaaggaaaataacgggatgcattttctcttgaccagaagccattttgaaagttggtacatcttgtttcagaagcactaggagcattttcccagcagttgcaagtctacaagagagtatactgttcatggcggttgccacaaagactcactc

SEQ ID NO: 63434 - DNA, 616 bp, Bovine  19866881574004
  misc_feature (1)..(1): n is a, c, g, or t
ntaaaaaatatgcaatgcaaacaagcataataaaaataaaactcccaaagcaatgagcatattttagggggaaggttattaaagtacgcaaaagaaggttctactaaatattaagaaggtatatttttttaaagaccacagaaaacaaaacaatttcagtggatgtattttataaccatattaagagaacaatcatttgagtatatttattccaatgcaaacagaagaaagagaaagtgactgaaaaggaccagattttcatagaaagttaaaccttaaaaaggcataagggtagattggaatcagatgctctaagtatttcaactatgtagattctgcattcatcagtcactcaacaaactcagacacaaacaacctggttctgtgccttgaaattttgtttaataaaacactaacagaaataataaattctatgtttaataagtctcattagcttgctaaaactccattcattctgtgttcaaaatcctgtgatataactaagagctcaggctgggccctctggtttttcactgttccaggtaatatgattacatcggacctttagtcctctccacctatcaatgccaatcttcttgaactgctccatgacatc

SEQ ID NO: 63435 - DNA, 1714 bp, Bovine  19866881688747
  misc_feature (1)..(1): n is a, c, g, or t
nggactccctccaaatctactgaatcagaaattctgtacgatgaggcccaatccatctgcattttagtaagtcctccaggtcattctgatgcttgctaaagtttgagaattaccaagttagggggatgtcctcaaattacctagaatatgaatgttctagatctgtaaagtaagaaaagcaagttgtaagccaataaataacatttacagtaaacaaaacttgtgtatgtgtgtgcagaataaaagacgtggtagattatttgccaaactcttaaaataaataaaacttataatggtggcatgaagatagatggataaagggtattgggggcaggggagagagatagagaaagatagagggaggaagggggagaggtatggagagaaagagagagacagagaggaatatagacacagtatatataggacaagcttactaactgctttctcatactctggttttacctaacgccaaatttgcattccttttgaatcctttattcttttgtgagtcttagcagtttatttttcttctagaagcctcatgctaagatctcaaaagcactgcctatgagtgtgtgcataaaaatgaacaagatataggtgtacttaatatgtgttataattctccaaagaccatggaaaggtctgctcactaagtggctgtcaatcaagattaaggataatatgtgctggtttctgcatttccaaagaaaggcaggccatgggttgacagcagtttgccaggaggacccatttcacaaagatttttcttttcttctttgggcaaagtataaagaagttaactgagcttaaattagcctccttaatggagtcagacctgacttatccataaagtcttaaccaagttaagtcgtgaagaagtaatttgcattcaaagctttgatgttatagttcccagggaggtttgagcatttccaaagttaagtttgggcagagaaaatccctgtgagtcttggagcggcacataggatcacccaatcctccagcacactgacactatatggatgtcccaagtctctgcctgctcaaccagctctcacacattgactctgggtgttcattcaggcctgcaaagatttaagtacccttctgtaggaattgagaggtgtctcttatgggaatcagaacaaggtgacaaagggaagtcagcagagcatacctaaagcagattctgttcctgtaaaaaagaaggtgattgttaaaagcgctgaaaagcaggaggagggcttccctggtggctcagtggtaaagagtcctcctaccactgcaggagacactggctagatccctgatctgcaaagatccccttagttgcctttgagcaactaagcctatgctctagagcccaggatccacaactactgagcccacatgctgcaactactgaagcccgcacaccctagagaccctgctcaacaagagaagccactgcaatgagaagcccgttcactgcaaccagaaaagtagcccctgctctccacaactaaagaaaagccagtgcagcaatgaagacccagcacaaccaaaaataaataaaaaaaagtatatgttaaaaaaggaaaggggagaggaaagaggaagcgagatcaactagtaggtctgtgtggggtgtcctggcagagatggggtacatactagattaggggctctagcacttagcgaggaagtgaggggaagctcccacttatca

SEQ ID NO: 63436 - DNA, 1046 bp, Bovine  19866881863707
  misc_feature (1)..(1): n is a, c, g, or t
nagatgtggtaatccatacttccctgtatactcttcgctttggtgaggaaaggtggtaagtagatatgtctggacctcgtgccttgtgatgctgaactgcttgcttcaattacacagacaaaaacactgtgtgttgctctagattattcattgaaaattaatccacagctacaatttcttaaacaattgcacaattaaagtttttttgcataatgatagcagagactcaggtggcataaaggaatgactttgtggtatcatcagtattaaagtgtggcaggtaattttttattttatttttatgaataattaaagttctatatttttacaaaatatttgagttaacttttttcaaacttcttgaatcacctaagtgaatccctggggacagtgtgtaaaccacaaatgtaatacacatatgaaaagtgcatgtggccatatatacttactgtaagtgccttatagtagattgtcatagcttttgctatagaatgtcatttaatgtaaagggagttccagatggaacctatttgtgaagggttgaggtctgacatgagacctcaaaattgtcatttccaaccagcttccaaccataccccaccaaggcttcagcatacagaagaacataaggaacatgtagagtgatatccagggcctggggagctctgaaaagagtgggctttacactgctttttaatagtgcaaaagaaatatatgttcattaaaaaacaaaaaaagatggaagacaaaaatgtattcacaagctcaccctctaaagataatcatcattgataattttgtacgtgtctttccaatgtttttaaacttatatgagtgatatatttatacatacagagacatacatatgttttgcctggagttttaaaagtggactctttgtaaatggtgatttgtaatctattttctttacctaatatattaggactacattaccataacaataaacattctcaaaccttatgttgactgactgcatagtattttatcatataaatatgcaatatttcatttagaagcaattcatt

SEQ ID NO: 63437 - DNA, 864 bp, Bovine  19866882213124
  misc_feature (1)..(1): n is a, c, g, or t
nccccattaataatgaaggaggtgaagatggtgcaaggacttaccttgcttagatcagggcagaggttgaaatcacttgtagctgggtgactcttgaaatgtttctcagtctctgttccggttcttagcccggaaacttaaagccttgcagccacttcactgtcatacaaggttcaacagaggaatgagagcattcacttgaaaaaggctttatgagctgtaaaattctatggaactctgagagacacttacagctgtgggactctggcacccagatccgcagctttgtgtcacgttcctgcttcccttttaccccaggaacagatgggaaactcgcgtccttctgacttattttgacctcatggagtagaaaggaggcttctgtgagcttatagacacctctctgggagaagaagggtggtgtggaccagactgtttagaaagcacagttgttatttatgtttccttatctctccctcagtcaccctgctgtgattttaaggagggttggggaggcagagctgaacccctgtggtgaagagtaatgagtttccctaactctatctgtgaaccagctctttggaaagctaacctcctcccgaggcactcactgctaattaagaggagggtggcagtgttggtagatggctactgaagcagctcttttttttcattccttgtacatcagcttctctttttcttcttaactctcctatgagtagtcatgcatgggaggagctggggagtctgtggacccagatttctggaaggggcactggagctgatgaattcagttggctgcagtggctgcctgggtgtgagtcccagccctcactgctgtctgactgtgcatctctgcacata

SEQ ID NO: 63438 - DNA, 3573 bp, Bovine  19866880342488
  misc_feature (1)..(1): n is a, c, g, or t
nttggactgtgaagaaagctgagcgccaaagaattgatgcttttgaactgtggtgggggagaagactcttgagagtcccttggactgcaaggagatccaaccagtccattctgaaggagatcagccctgggaattctttgtaaggaatgatgctaaagctgaaacttcagtattttggccacctcatgcgaagagttgactcattggaaaagactctgaagctgggatggattaggggcaggaggagaagaggacgacagaggatgagatgactggatggcatcactgactcaatggacatgagtctgggtgaactccgggagttggtgatggacagagaggcctagcgtgctgcgattcatggggtcgcaaagagtcggacatgactgagcgactgaactgaaatgaactgaacttatgcctaaggaagtgtgtatatatatacacttctatatacagggttagatccctgggtcaggaagatcccctggaaatggcaacccactccaggattcttgcctagagaattccatggacagaggagtctggtgggctatgggccaaaaggttgcaaagagtcagacacgagtgagcaaatataaatagaatatacatatatatatatattcatgtatatttttctactctcttgttttaaaaaattatgaaagtacacttcacacactcttctgtatctagattttctcacgtgatacaatatacctgggagatcatcctcatcaattgtatatattagtttggcatctctctaaaattgtttccccctatttctcataatttatctttttctgtgagaccaattaatgcatttcatctaagtctttagaccattcttttctaaattgtctttcatattcatggacgttcttttccccatcttatctccaaataagtttgggaaatgtcaggttaaaggataatcagtaaggttttgcatttttgtttgtttgcttgttatatgacttctctgaacttcagtgggctttatttattttagtatttatttatttatttgactgccccgggtcttagttgcagaatgcaagatcttttttagttgcggcttgtggaatctagttccctgaccagggatcaaacccagactctctgcaatgagagctcggagtcctagccactagaccaccagggaagtccctcaatgggctttaatgtccggactgactctcaccgagagcatgttgtgcagcttttcccagctgtactggattttgaaactctttccccaagcatttcagggaactgaagggagctgacaaaaagacattgaaaatgctgcctcagtctctctctcccttggggagtaatggataaaggctgactagttcctgctattcaactcccctcctttcgtacttgatgccgacaagtacttttctgctaataattttcctccacacaggttagagtccaatcagttgggttaccactttcttagtcagtccttggtcactttgattagatttgagtgtttccaaatcagcaaggcattcacaggttatttctcagagtgagtaaatgtctatgtttatatcttccatgctgattcttaccagcttcttgctgtagagggtcttcagctccaaacttggagcaccttactccactccctaatgactaactacagaccaaagggctttgggttccacctcccctgtgctctctaccctacagcctccccagcccctattcccagatttgatcgtgaaggctattttattgggcaccagtctcctttctccagcataacttaaaactctttcaagtcagaaactgtcttcttcttctttgcatgtcctataccaacaccccccgggacagtgccaggcacactagagttgattaatatttaattgctttttttattataataactttatgggagagggttgttgtcatagcttctctatctacacagagaacaaaaaagatgtattgctcaatgacaactctgacctggcgtgaagcaggcacttggcaaatgccaagggacacagattgcctatctagttgaatagtcatggaactaatgattgtaaaggctgggtatttttttcagggttcatagagtctgactcccctcactttacttaaaaggaagctgccaaagagggtcatatcttaccccagttcacacagagctgagactcgagtccgggtctgctgtcctgccctggatatctgtcactggcaacgttgccttgtttgtaaaatggggttgatgatgctccccttgtaggactactgggaggtccactcagctgacagggtacacgcagagatgctgcagaaaactcttgagagtcccttggtttgcaaggagatcaaaccagtcaatcctaaaggaaacctaccctgcatattctttggaagggctgatgctgaagctgaagctccaatactttggccacctgatatgaagagctgacttattgggaaagattctgaagctggggaagattgaagtcaaaaggagaagggggcagtagaagatgagatggttggatggcatcactgactcaattgacatgagtttgagtaaactctgggagttggtgaagtatagggaagcctggcatgctgcagtccatggggtcacaaagagtcagacgtgacttagggattgatcaataacaagagttcttagtgcagaacctggagctgctatcgctcaatgtatggtggtcattattgttaagcagatgtccttccacccaataccgtgtaagctggaaagaggaaggctgatttctctgcatttctaatggctatcagtctcttacacttaataatgccccgcatttgatgcccatttgatgcacatttgatgatgacaaccaagcaatctgattgctgatgaaacttccatctcaaaacccccggtgaaactgaccatgttctcttcttaaggaccagagggttgactctgaaggaaaacaattcctgcatgactttataagataagactctaaacttctttctgcctcaatttcccctgttggctaactgagctgggtctgaggaagaaaatgcagcaagccgtgattgatggattcattagggcttggaagaggtctctagtcctcagatccaagcactgttatttaaagaacactgatggaagagaggagttgggtattcaaatcaccctcggaggactgacaagggagccagtcatcgtagggctttagagagctaattccttacttcagtatttaagatcttcgaaaaagctacattcatcttccatgaaggaaaaaaatgttcttgcttcttcctgctacctagagattatttagtgctctgatattgacaccgcttctgtagaaagatttaaagataaaaatgcaatgtattcaagtgctgatcatttttcattgtcacttagtgacagtacagcctggagtcaattgctgcagatttatcttttgtgatatcgattgtgtgaatgtgtgcctaagctgtttgcaagtacctgctccatcagcggcggggcaggggcggggcctgcaagtggtggggaacagaggtatg

SEQ ID NO: 63439 - DNA, 677 bp, Bovine  19866880355111
  misc_feature (1)..(1): n is a, c, g, or t
ntgcagcccaccaggctcctctgtccatgggattctccaggcacgagtactggagtggggtgccactgccttctccggaggatcttcccgacccagggatcgaacctgcgtctcccacattgtaggcagacgcttttccgtctaacctacatacacatacatacatgcactcacacacacactgccccacgtacatgcgccatccaacacgcacaccctgctgccgacgctctaatcaatctgtccttttcaatggtagtctttatttttataatcaatgctgaggtgtgtcccaaataatgtgttcccagtaacagttaaagcacaggagcttgtgaattatttacttatatcagagcagattcaaggttgtccccaacacatctgccactcatttgcatttcagtaagccttcttgagtgggaaagaaagtcacagcattatagctagctaggacatggatttctggaaggattagcccaaatgccacctacactttgttctaaaacctgacgatgctggggaaaagagagggccttggcgtagtcagagactggcccctgctagctgagagtctgctttcctttctcatcgcaccactacaatgcttctccaagacctgtggcgcctcctgccatacccctgagccagactcagactgcggagaatgcaagtaa

SEQ ID NO: 63440 - DNA, 5802 bp, Bovine  19866880356148
  misc_feature (1)..(1): n is a, c, g, or t
nctcacttcctgtgtgacactttcccacgtcaccctgcttgtgaccttcttctcctgattcgtagttaagtgctgttcatgtgacatcacaagaatgtcttagtgtttcctgagttggtgataagtatgatcaggcctattctacagtgtaagaaacattttattcctccaggttccttgggcttgaacccaaggactctttgtggtgttaggtttaagagaaaggaataactttattttaaaattgtgtaacgcctcctgtgtacacacattccaattctttttttttttttttaaagaaattttacctttccttgtcctctttggattgcctccatttctttctggcagcgttctcagtttgctgcttttcctgaggattcagtgtgtggttagggtaacgtggggttctgggaaccagccttgttggcagttggtggagcagaagtttagaatcagctgctgaatgcttgaattgctgtgtttctttctcaggctttctgatcataaggtcctgtccaagtctccacgttctttgatggtattttcctggttgagcctacctggttctctgtggagcattggaccagatcttgccaacttgccatgagaagtgcaggagcagtgaaccattggcgtgagtggccttccagcccctcacacaggggctctacccctgggactctagaatcaccttttggctgctcttctggccctgaagaagagcacgtgcgcacagaatctcgtctcaggaatattgaactttttccttgatttttcccacagtctgcagagcctgatttagggccgcatcaggattaagtaagattaccagcatcttctctccgtctctcctgtgtatcttgtatgaatgtgtcctaataactattgatatcaagttcatccctcaagaaaccaagccgacctttagtaccctgctgaggttgcagttttatgatgtgttttccttgcaagtaaaatcaattgagataaatcttggtagctttttctgcacgatgagctggtgaggccctgctgccatggtgggtccccctctacagggcgcgctcccgtgtcccacgcaaggttttgtttcactaaaattgactgttgatctgctcctcttaaaggtcatgcttaatcacatttcagggagaccgaagaagataccaaattgcccaggtaccagagttgactctgctctccttcggtgctgtttgcttttagcagcacatctctaattaactaggcagttacaccagtgcttaaagggcagaaacccattgtgcatgttttacccggaaaattagtcacagtgagttgtgctgtggtttcggaatggtctgtttttctcctggacattgtaacgccggtggacgagaccccagcatgctgccaatccctgctccccacccccgtaaccagggtgttggttgaaggacagagctcggtcacacagtggcctggcttatctgtgtggttgatgggccaggctgacgggcccggcgggttctgctgttagcctttcatgctaagcctgatatggtagaacagatggaggggaaggggcctccttgacggtttgggaaggtggggacctttaagttaggaggaatcaaaagaacagtttagttattagtggcatctgtgtgacagcttgacattctgtaattgtccatggagaccaggctgctttggaatggtgttcttgcaaatgtgtcctattaaaatttttttcctaataaggaggactggtctgatttgagtagttgtgagttatttcacattacttattaaccatcagcagtaggaatgtttttccttgccaagtgtttgactggagggctagaaacaagagtaattgagattcctgcattcaagaaacatgtttttcattctcgagagaaaatttttgattggaaaatctgtaacatgatttagtatcttgagagataatgttgagagtgcaagatagggaacattttggaggaggcaggaagtagttactgttttcaaagtaatatgcacttattatcccagactgaaaaacagaagccgaaagaagaaaaagtcatctgtaatccctctacttagtttagcaccgttaacactgtaatattcttttcttttcgtcttttttttctaggtgaatgcgtttgtgtttagctttattgtgttcattctttatatataatcaaggctaccctcacccccacttcccgtatgtctcaagaatttttaatgatagtgttacattatcagtgatcatgttataatgatattgtaacattatgtcccatagttctttaggcactctgtctgccacatctaattctttgaatctattcatcaccctccattgtataatcataagggatttgatttagggcataccctgaatggtctagttgttttcgctactttcttcatttaaagcccagattttgcaataaggagttcatgatctgagccacagtcagctccaggtcttgtttttgctgactgtatagattgtctccatcttccactacaaagagtgtaatcaatctgatttcagtattgaccatctggtggtgtccatgtgtagagtcgtctcttgtgttgttggaagaaggtgtttgttatcaccagtgtgttttcttggtaaaactctgttagcctctgccctgcttcattttgtactccaagatcaaacttgcctcttactccaggtatctcttgacctgttctgcgttccagtcgtctatgatgaaaagaacatctattttttggtgttagttctagaaggtcttggaggttttcatcaaaccattcaacttcagcttctttggcattggtggttggggcatagacttggattactgtgatgttgaatggtttgcctcggaaatgaacccagatcgttctgtcatttttgaggtctgtcattttcaagtactggatttcagactcttgttgattatgagggctactccttttcttctaaggcattcttgcccacagtagtagatgcagtgatctgaggaggctgtacaaatagctgagaaaagagatgcgaaaggcaaaggagaaagggaaagatacaccaacttaaggcagagttccagagaacagcagggagcgataagaaagtcttcttaagtgaacagtgcaaagaaatagaggaaaacaatagaatgggaaagactagagatctcttcaagaaaattagagataccaaggggacatttcatgcaaagatgggctcaataaagaacagaagcggtatggacctaacagaagcagaagatattaagaagaggtggcaagaatacacaggagaaccatacaaaaaaggtcttaatcacccagataaccatgatggtgtggtcacttacctagagctagacctcctgtattgtgaagccaattgtaccctaggaagcattactacaaacaaagctagtggagctgatggaatgccaaagtatttaaaatcgtaaaaggtaatgctgtaaaagtgctgtactgaatatgtcagcaaattttgaaaactcagcagtggccgcaagactgaaaaagtcagttttctttcttttaaatatttatttatttggatgccttgggtcttggtggtggcaggcaggatctttgatctttgttgtggcatgtgaaatctttagttgtagcgttcaagctcttagttacagcgtgtgggatatagttccctggcccggaattgaattttggcccccttcattgggagcacagagtcttagccacaggaccaccaggaagacccctgggaaagttcagttttcattccagtcccgagaaaggcaatgccaaaggttgctcaaactaccgtacagttccactgatttcacatgctagcaaggtaatgctcaaaatccttcaagctaggcttcaatagtatgggaaccgagaacttccaggtgtacaagctggatttagaaaaggtagaggaactagagatcagattgccaacatccattggatcatagaaaaagcaagagagttccagaaaaacatctgcttctgaagcctttgactgtgtggatcacaacaaactgtggaaattcttcaagagatgggaataccaggccacctgacctacctcctgagaaacacctgtatgcaggtcaagaagcaacagttagaagcagacacagagcaacggactggttccacatcaggaaagggttacgtcaaggctgtatgttgtcaccctgcttgtttaacttatatacagagtacattatgtgaagtgctgggccggatgaatcacaaactagaatcaagattgctgggaggaatatcaacaacttcagatatgtacatgataacactctaatggcagaaagcgaagaggaaccaaagagcctattgatacgggtggaagaggagagtgaaaaagctggtttaaaactcaacattcaaaaaacctaagatcatggcatccggtcccatcacttcatggcaaatagatggggaaaaagtggaaacagtaacagattttattttcttgggctccaaaattactgcagacaatgactgcggccatgaaattaaaagatgcttgctccttgtaagaaaagctatgatcaccctagccagcatattaaaaaagagagatattactttaccaacaaaggtccatctagtcaaaaggtatggtttttccaatagtcatgtatgtatgtgagagctggactataaagaaagctgagcactgaagaattggtgcttttgaactgtggtgctggagaagactcttgagagtcccttggattgcaaagagatccaaccagtccatcctaaaggaaatcagtcctgcatattcattggaaggactgatgttgaggctgacactccaatactttggccacctaatacgaagagctgactcattggaaaagcccctgatgctgggaatgattgaaggcaggaggagaaggggacaacagaggatgagatcgttggatgacaccactggctcaatggacatgagtttgagcaagctcttggagttgctgatggacagggaagcctggtgtgctgcagtttttggggtcgcgtagagtcagacatgactgggcgactgaactgactgacagagtttctttggaggatgatggaaaagttttaaacctgtggtgatgattgtaaaacttactgaattatgcactttaaatgtgtgaattctatatcttatgaattatatctcagtgaagctgtttacaaaaatgctggtagaaagatggacaaagaatacaaataaggcaatcacagaagaaatacaaatggccactaagcatatggaagatgcttattcatttttactcataattaaaaggactgtaaagtaaaacaatgcattaaatttgttcctaagattgataaaaaataacaacattgtttgtggttagtgtcttatagaaatattgttacctttttgctaagaatatagccatagacttagaattatcctactgaaagaacatctagaaatcacttagtctattccctttattgactcagaaagagtaaggaattcattcagtttataagttaattaatgggatatactggtctatactccacggtttcctgacttttctattagagtcatgcttttctactaaattgagcacagttaaaagctgggacttccatgtgccagaattctggagggaaagatcaggactcctaggaacttttccttctataatggtgcccaaactaagatgatcagatgttcattttacttttcatgtttcagagcgtgtgtgtgctaagtca

SEQ ID NO: 63441 - DNA, 2911 bp, Bovine  19866880370068
  misc_feature (1)..(1): n is a, c, g, or t
natccttttaaaatttaatctggtagatggcttttctttcccctgcttaaaatgttaatcattttcaatagaacaaaccttatattaaaaaaaaaaatgtgaggagggcaggtcctttaaaccattgttatgacaaaacagatgtttaacagcccaggtagtctggcaaggagctgagtttagtgctgctgagtcagaggtctctagttctattttttaaaagcagctagagtcttctggggagaaggcaatggcaccctactctagtactgttgcccggaaaatcccatagatggaggagcctggtgggctgcagtccatggggtcggtaagagtcagacacgactgagtgacttcactttcactttccactttcatgcattggagaaggaaatggcaacccactccagagttcttgcctggagaatcccagggacagagaagcctgataggctgcagtccatgggatcgcacagagtcgcacacgactgaagcgacttggcggcggcagcagcagcagagtcttctgggggaaacttgggaagcagaaagttcagttagttaagttgcgctgatgacctttgtagaccaggcaccctgacacaggatagtgcatttctgtgatgagttcatcttctagtagtgagcacatagttctccagcttaaattctcattcttcttgaattaggagaatatgaaagtatagttcttgacatgtcattcagatgcccccagtgtattatgagttttctgcaactcatgggttagaaatccagcggttgccaagtgcaagatcagtgccgaggtgtcttgtgtgaaagcgtgcatttcttgggttgagccagaaaactgggtgttcaccatcttcccaaggggttcctggggacttgagacaatattttagacaggaaagagacagcctttaaaaagagcaggctggaagagcagcacggatacttgggatttcagaaccaaggaaagagttgacagatttcctcttgtgtctggagaccattgtcactgatgcagatgcagcgctgttgcgggacatctggttagagggcttgtgcttctgtgaaagcaagtggctgtagtgggtggaggtctggagacttgggcgtgggcagggctgcctgattgcaaagcctggctttccctgcacacagtggtgctgaggtctcacaaacgcaagcgtgtgttaacagtcgacctgcgtttgaacccgtggttggttgtgtacaccgtgcagcaccccagctactcggggggtagagagcacatctctgagtgtgaacgtgcaccctctgaagtgtctctgctcttctgctttttaagcagaaagggctttgtgttcgtcagaaattgtcctgaagcaggttattaagagctttaaaagagcgtttggttgccaaaggtttaaacactctacttctctgttccccttgtccctctcactgctatctagacctctgctgatgggcgtggatattccctgtcacctggggagcatgcgctctgtccccagagtcagcccctgttcccccgtcacggaggtgggccgagccctacttggggccagggctttgtaagcttcctgcctggcctttggcaagaaagctctttgttgctgtgtttattttcctcctgtcttggtagaatgcttgatttagcagacagttgtagtgatcacggtttagagagtctagaaggtgttagcttatagaagaggtgtgatggacactgctgggccaggagctttccccatgctgctcacacaacatgaatttaaggcagggtctgttgcctgttcccacatgtcatgcccaccttttggttcaccactcacctagtctgggaatgcaagaagtagcacatcagaacacctaacgagcacgtgtgtcctgacagtccctcccagcagaagtggtcataccggacattgcattggaaacgcaccgtggttccagttggcgtactttatgtatctgcacaaagcacttcatgtgtaccgtgtggcctttcttgatgtagctgtcacagcagtgttgttgatgggcggttaatctgcaggtgaaaaataatagctgtttattttgtccttgccatggcattataagaaagtgccctgtcttctttcagtcttaattctttcaacatgaaaatattctacttaaaatcttgttttgtttctttgtatatgatttgccttgaaattactgtggacagtttatttagttctgttttcatgtattatcaggagcagatttgataagtacatgtgaataacctcctgtaaatgagttttataacaaaattgtactaaactattttctaaagtcagttgtgcagatttatagttttctttgctgtagttttctttctatgccctgaattcctagccaggatttggcaaacaatagccctgttgtctctgttaagatctgaatattgaggaaatggcagaattaaaagcagaaacaagaaagctgacgcatgttaggagttattgaatggagattcaagggacttccaaggtaactcgcttagtctgccattggattgatgttttcatccagtctgcacccacggtgctcctagcttctcacctcttcttggaatcttatccacaaggtagtgagtgaggtacgtgtggccaactgtggtgtcagttacccgttgagatttggtccagaaacacacgcttacctccaggctgagcttgggagagcagagcagatgaacaaggacccacagaaggatctgcgggagccccaatggcggggctggaggcagatggccaggccgggggtaagcgctggtggttacaaaggagagcacgttctccaaaagcagtggcttcaggaaggacagttggacatgctagctccaccaggatggggccccgccagc

SEQ ID NO: 63442 - DNA, 1188 bp, Bovine  19866880370069
  misc_feature (1)..(1): n is a, c, g, or t
naaatgcactatcctgtgtcagggtgcctggtctacaaaggtcatcagcgcaacttaactaactgaactttctgcttcccaagtttcccccagaagactctgctgctgccgccgccgccaagtcgcttcagtcgtgtgcgactctgtgcgatcccatggactgcagcctatcaggcttctctgtccctgggattctccaggcaagaactctggagtgggttgccatttccttctccaatgcattaaagtggaaagtgaaagtgaagtcactcagtcgtgtctgactcttaccgaccccatggactgcagcccaccaggctcctccatccatgggattttccgggcaacagtactagagtagggtgccattgccttctccccagaagactctagctgcttttaaaaaatagaactagagacctctgactcagcagcactaaactcagctccttgccagactacctgggctgttaaacatctgttttgtcataacaatggtttaaaggacctgccctcctcacatttttttttttaatataaggtttgttctattgaaaatgattaacattttaagcaggggaaagaaaacccatctaccagattaaattttaaaaggattttgttatttgctatacaaatatacattccaacttctacaacctctccaggctgacctccttttctacaagaacaagagatcaacgctgcaagcctcctacttcaaagacataattactgatacacaaatgtcctctgaaagcttctgcaactgacaaaaaggaccaagaggcccatgtgttataatacattttgttttccaacaacaaactcctataagaaaaaaagcagtcttatctggacaagcctgtcagtcatcagaggtctgcagcaattgtagtggctgacagcctctgctgttcggccgtactataaaacccatctcttctttgagcagctgtcctcctccaggacactctcatcccagtacttaggtacctaataaaatctaaaggaagaaggaaataaagaaaaaaatttaaattacttaaaatgtatgtaaatagttatatttttgtatagtgtatgtcatggatgtttgaagaaaggtgcccaatttttggtggaatcatatttgttttagttttcgaaaaaatgcagtttaaaatttgtcagaaacagatttagatt

SEQ ID NO: 63443 - DNA, 3373 bp, Bovine  19866880446375
  misc_feature (1)..(1): n is a, c, g, or t
nctggatgtctgatagtccagcctggagggaggggtgcctccttcttaccatcagagtcctggggaccctcacaattcataccttccctcacccaggctcacagccctgactctgacactctccttaattcccagctttgcagttggcaccccatgtcccccatcagaagcagctccaaaaatggaggccaggttcctcgatgtgtgtgtgtgtgtgtgtgcacgcgcgcgtgtgtctgtctggcctcccacccagatagatcaccgcctgcaggcagacatggcacccaccacgactatttttggtccggtctgcccatcacagactcaacaacaaaaaaaagtgcggagtctcaggaggctggcccaacttacgtctggagcccggactcccagtgacccgtgtcctccacccagagagattcctgggccaggaggccagcctgaaatcctcggatctcccagcgggccccttcccccaccccacccaggcaaatgcctcccatggagaaaggagggggacagaaagaaaagacatgtggtgtcagcctctggtcccgtggaggagctgggcgcgggctctttcctgcagctaggagagggctgagccccatcccccacaataagctgaggccagagagtcagggaccccttcccgctgacagaggggtttctgggtccatgagcatcagagagaggaagggtcatggcactgccccaagagtaaggagacccccaccttgccagctcctcactgcagagggggtgggacagggtgggggcgcacagtcggggcaccccgccccagatggcggaaccagggaccttggccacatctccctgtcacccttgggggaggacgagtcaagtcctggcactcccggaaggcaggatctggcaggactcccccggggagaccagagggccaccccagcagcccaagcctgccacacacccctggcttggccctgcccctgcactctgcgcccccaaaggccccagcagtccacagtctaaaagcccagctcagaggctgtgcagctcaaggcggcaatctcctctgccctgctgatctgaggagtctgtttgctcagctaaccctgccctgtccatctcctaggggtcagccgctgggggcaggggcagggccgggggctggcatggctgtgggggcggggcctgagctggctccctgggctctttgggcgacactgagcagtgcctagggaggggggtccaggggcttgccacaagcccttgggcgccctggctggaccccagcgacaggaagtccggactgcctggaggtctccaggcatcacgctcccgcgactctgggtccagcatcctctgctctaaaagccaagcccctgccctccccagagctgatacccccacatcgcagagaggggcagggacttggggcaaggagtggggaagggcagggcagctgggcacccacctgtgggctgtagggtgctgggagccctgggggcccaggcagtggatgttgggggggtaggaatagcggggtccctcctaatggccgcagtggccacaggggctttggggacgggctctttccgggacctgctgatgcctggtgagagatgagaaaagcaagaaagggtgcaggtgggggtcagtggcggggtaccagtgcagacaaacagcttactatcccgccgaggggcccagcgtcacctccgaatccagcttcctctggcccctctctgcccattggcatcccacaggggttgagtttggcccaaaagagccatagcagggggtggggtggcacccctggaagcctgagatttggggtctgccgctggctggctgtttgactctggcaagttctctcctgctgaatctgagagcagatggcaatacccacctgggggtgctggctgcaaggacagaatgcgatagtacgaggatcctgcttagctgatgcccggcactgtgcatgtttgatgatgacttaacgatagtcggttggtcaccccctcccaccctccctcaccttccctgttgaattcctgggatgcccagaccctccttcagacagtctggctgctcagggcctgagctgagctggacacatgggggtctgggtcacctcccctagcctccctgcagccgagatcctggttcatctcacccagactccccacgggtgagcagctgccatggtgatagttgtgggctgtgcagagggaggccaaaccccgtgatcagactggggtggcttctgccaccagtcaaggaaggtgacccccattcttggctggcaggagtggaagaagtggggggttcccagcgggagtgggacaaggggatctttccaaagcagcaccagtcaagaagctggagggaagggcttgtgagacaggaaggagggaaggaggggaaagaagcaaatggatcagaggagggggtggacctggggaggggaggacaggaaagtcccgtctttcctctcctgttttttccaggacgtgcagagaggctcgtgcactgacggccccaggcaccttccccagacgggtggccctggcgtgtacttactgccgacggcggagcctgcggcggcacctgcggaaagagggggggtcacagaagagtaaggagggggtggcagggctggggacaggaaaccaggggggctggggcacctcaccatgcagggactgggtcggattctccacttacaccctcactggtgcctgagagggaagggctgctctgagcccattgtgcagatggggaaactgagtcttggagctgtgacttaccccatcaggggacctgctgataagcctctgctgggggcctcacatgcacccttctcatttgactttagactctcaggtcctccagtgcaaggcaaggaggccggaggtcatcctctggcgggtaatggggtgtcggagaacatgagggtcctaggcacagggacagactggtttactggaggctctgatggaagctgccacagggggaagccgctgtgcctgtgcccatctgggaaacacagggatgcctgtggggtagacgggaaggcgatcacagcggctgtcacgtgctgagggctttctgcatgtgggcccatgctgagtgccgccccaccctggccattcagtgctcagggcttcctggtggctcagatggtaaagaatctgcctgcaatccaggagattcgatcgctggaagatcccctggagaagggaatggcaacccactccaggattcttgcctgggaaaatcccatggacagaggagcctagtggggtagcaaaaagtcggacacaactgagcgactaatactttcactttacaatttgggtttccctgtaaagaatccatcctg

SEQ ID NO: 63444 - DNA, 1313 bp, Bovine  19866880484869
  misc_feature (1)..(1): n is a, c, g, or t
nggcattgttggtgatgctgcttttagtcgtgtccacccccagcctcctgggccctctctcacccgccccctctggatcagccacaccagcagggcgtgggcaggaaggactgggcttcaggttttccacttcctctccatcaggagaatgtgcagggatggattagtaatgtctgctgtggacacagcagagaggagggagctctgtgagccactcacttgctacctggggcttatccacctctctgagacatgtctggccatgactggcaaacgctgggtgggactgaggatccctgggtgagaacctgtcctctggggagagggcaacaggtgactagcctaatggatcaagcagtcgcagtggccctgggtggagattctgttctgaattggatagttgcttgagtttatttcaggcccataccctcaaagattcatacccacactcagaggacagggaggaaacatttgaaaatggaaagattccactgggatctctgtaacagaacataacaaaagtgaggggatcctgctgagtttggaggatagaaaactcggagaagtcccaccaagacgctcacccagatgatgcttctccaccaggtttcaggactgtctcccttttgttgggaagacaaggatcatcagctgtctgatgatccacctgttccttctgatgactgcttcaaggatgctggtttcagcattctggctcctccgagggaggacgaagcaatgttggtttctagacatgacgttcactcctgccagcaagaccatccatcatcgtgtgcaaacggcttgcctcctaaaggccacgttatgagacgatgccaataagcgcattcacatttgccgttgctccatcagggcagccatgtaggagcatctgctgaatccggactttcgtccacatccccatctgctcctctatcctgcttcatcgattgtagattgagtccgtcctgggtaaccaatgaccagtgggttgctgggcatttttttttcttttaattttctgtatcaggtttaattaaaccaaggtgtgcccgaccctgtcaaatcatatcaaaacaggtctccctgctgcaggaggaaaaacatcagcataaattattgattaatcttcattcaaactaatctatcaatgacttcctctggctcggtggacctggggagcccttagatatttcaatgcaaacaacatttgaaagcttcatttcaaagaggtctgagatgcattcaatagcagtcgattgcttcagcagccagtgggggctgcccctgagatgctgaagtgcaatcattca

SEQ ID NO: 63445 - DNA, 1547 bp, Bovine  19866880521703
  misc_feature (1)..(1): n is a, c, g, or t
nccctctgatgctcctgctgtattctgctgctgtctcctgacttggtgggtggtggcagtggaggaggaagagagagagaaacctcaaaaacaagatacaaaaaaactgtgggaatttccctggcggtctagagagtcggaccctgaagaaggctgattgtcaaagaattgatgcttctgaattgcggtgctggagaagactcttgagagtccctgggacagcacggagaccaaaccagtcaatcctaaagggaatcaaccctgacagttcattgggagaactgatgctgatgctcccatactttggccacctgatgcaaagagctgactcattggaaaagactgtgatgttgggaaagactgagagcagaaggagaagggggcagcagaggaggagatggttagatggcagtggacgtgaattgaagcaaactcccggagatagtgaaggacagggaagcccggtgtgcttgcagtccagggggccacagagtcggacaggacttagcaactgaataacaacaaccagtgtttaaggcttgagctttcatgccgtggacccatgttagatccctgcttggggaactaagatcccacaaccccatggtgtggccaggaaaaaaaaaaaaagcatcttttctaggtaatgtttttggatggtgtcgtagaatcgccacacctgtttgctgttctgagatttcccacatgggttactttgctgattgctctttgagtcttgtgtgtgtgcctcatggaggccacgcagcccattgcttctggttctttgcaagaaggggacagtttcagcatttgtgtgctgagaattccagctttctgcatcagtgctccttgtggccctggagctatgccctgttagcactgctttttggcagagaaacaatacttttatcagccagtacgaacagatatttctgttctacaaatgagctcagatttatagactcaaggttcaaagaaaggaggtgagagatcaccagccacagccgaatctacagcgaggaaagagatagcatcaggctggttcatcacgaaagccagtgcacaaggcagccgttcaattctggcagttttttcctctgagaggtattgtcaccctcctgcctttaccttgtccagtgtctcccagctgggtggtggtgggactccagagcccacgcatctgagctgcattcacctctgtcatcgatcaggtgttgtgggagcagatgctgagatggagttcggggtgcagtgtatgtattagggagcaacatctgtctgaggaaggaggacagagcaggattgggcaggggaagatggtaaactgtgatgagccctgacagagcctgggccaacccgggagatctctggagcgcacattgcctctcagagccgtcctgcatcggccagaagcctcggccttctcatccttcctggctcagccccggatgcaggtggctccaggagggccaggactgtccctgggtgagctggcagctgggaaccaagcgctgactgcactcccctagccgggcagcatgctcctc

SEQ ID NO: 63446 - DNA, 1665 bp, Bovine  19866880523657
  misc_feature (1)..(1): n is a, c, g, or t
ntgggtgggtggtcggtgaagactgtttagacaaaataagtggtttcatgcctccagggcaaggagaaacttggaactcaggaagcttcagggaagcaaaagctgagaggaggctgggtggggagtgaggccagataaagtggggctcccggttggatctgagagctgcaggggccaaagcaagtaggataaacaagactgagaacagagggtgagacacaaatccagacatcaacagtaggtctaagtgccagcctccccccacgcccacccccggtgctactggggacagagggacccatgcctggctgcaggatgctgctggtggactggaggaatcgtcacgagcccttctctgctgggacagacgtggtcattgcagcctgggaccctaccaggctgcatgtttggagcaccgtgggtgggataagcaacacgatggtttagggttagtgcctgcgatttgtttactttttgcaagttaaacaagccccctagtctgtcattctctgcattttccccacatcatttgagggagcctgttggggcgattctgagggatcccttaggactgaatgccggtttcatgtctgcctccaaaacctttataaactgtcacttaagactttgctctctttgtaggcacccagtgggcataaatctggaggtttaagcgagtctttcagaaactccccttctaaaaggaaagtgtctggtgtttctgaaacctccatctttcctttggcagtagcgtggtcctctggcggcagatcctcccaggatcgcctggcaggatgctcgcgggcctgacttctcctggagagggaatgtgtgcggaggtggagccctggagtctgggtttccagaaagttcctggctggtgacccgtttggccagctgatgctctcctgaggcagctgacagcagttgtacttcatggagcccactgtgtaccaggcagtctctgctggtccttcttaggcatcacctccctaaaatcttggccacaattctaaaaatgtgggattaccatcgttcccattttacagatgggaaagctgagtctcagagtggtttcacaagttgcccacagtcatccagcatgtgggtggaggtgccaggctttgagaggtctgggactctgtagcctgaggttccagccactggactaatcaaaagaacttggtgacatccacagccctcattgttaaatacctgctaagtgccagacttttgagtctatgatctcagctcgatctatgagagataaaaatctaatccatctacatctgtgtgtgcgtgcgtgctaagtcgcttcagtcatgtccaactctttgtggccctatggaccatagcccatcagcctcctctgtccatgggattctctagacaagaatactggaccagggtttccataccctcctccaggagatcttcccaactcggggctaaactcgcctttcttgcatctcctgcatcggcagggtgggggtctttacctctagtgccacctgggaagccccatctatgcctacacctgtctaaaaggtcaacgtcatccacagggtgtgtttttctgttctcaaggagcttatagtgtacttgggcacatttgccacaccagatgcgtgcgcgcacacacacacacacacacacacacacaca

SEQ ID NO: 63447 - DNA, 1066 bp, Bovine  19866880527282
  misc_feature (1)..(1): n is a, c, g, or t
nccacgccgtgcagcttgtgggatcttagttcgcctaccagggatccaacccgagtgcctgcagtgaaagctgtgagttctaactagacctccagggaacttcctgtgaatgggtctgtgtaaatttcagtacctggagccctgatggccgattttgcccataggcaaggtcagccccttgagctgaccagtgcctcccgaggggcgagctgggggctgctgggtccgcaccggaccccgggactccttgcctgactgtccatccgtttacctagctcaccacacttatgtttcctggaaaaggcattgattcgaaatcttcccttatccctagggtttgtgatgagagttagaaccccccgagttttaagatcacatgagttcttggcctatcttttttagcgaacgacaggcaccactgaagaggtttctgtagttagcaagcggaagcgtgttttctttcctttgaaagtcactgcgatgatttctctgtgttacagttcctctctgcatttcgtcctcttcacctgcatagtgaatctgaagacacttctttctgtgggctttagcgcagggccagcgcagagtaagcccgcggtgggtatgggctttctttcagtgctgcacatgcccccttcacccctcaacacttaacttgagccggtggagacgtggctggttaactagagtacccttagcttggtttggatagcaaaagtgcttgccctaaatgcctttaaagtgttccaagaagccacagaggattctagaggccgatgctatccgatctttgtttttcccagtctaaaacagagcagtccgtgctcattttaattgcttggatgagctcagacattgagattttaatgcgttttcacagtagttcagacagcgtcaccacattatcctgctggcagttcatcggaatccttggccaaaacgctgtgcttggggaccttggcttagaaaaccagagtgtggtaatttcctcgcaagatgtcttgtggggaatgctgcctttcccggggagacttcctctgaatcgtgtgtccttctcagtcacgta

SEQ ID NO: 63448 - DNA, 724 bp, Bovine  19866880665703
  misc_feature (1)..(1): n is a, c, g, or t
nctgagagaatgaaggctaccgcgctgctgtggaagaaagtgacagacattctgagagggactcacaggaaggggaggcccccagcctctcccctcacctggctccctcagggtgaacacatgctccatcagcacgtcagggcagagcgtggagggccctggaggaatcacctaacctacttagtattttgggaaaatcatactgggtaaagctgagactcgaaacacaagatgatgtgaatgtggtgtagatatctcagagaagacagaggaattgctctccagtcactcgcctgtgcttggaatgcagccacagggccacctccacgcaggactcagaacaaattgctcccttttcccgcttggtttcatgcccaaccccaaccccaccctcgatcaacctgtgactagaacccatcaatgtgatagcgtttccccaggcgacgacctgccgttgggcagaaagaacaggtcctctgtctgccgtgggacagactgactaagctgagccctgccaggcacacgacacagctctccccgcagagccctggcaagcgccagacgccgctgtcctttggcttcacgtgctcaacgacccttaagatgagagctgtcaactcaggcgtgtggggaggagactcggactcaaaggttgaaggttttgctccatgtggaggcacagctcctgcccagcggggttgaacagtcccgttatgcttctggc

SEQ ID NO: 63449 - DNA, 1482 bp, Bovine  19866880691405
  misc_feature (1)..(1): n is a, c, g, or t
ntcaggacctcctaggacctgttttgctttttttttttttttttttcagagttgtggattccaagccagtggcaccaccggcccagtcagggagcaggagggaagccagggcccgtgtgcatccatgcatgtctgtatttgacagagaggaagatggtacagagcttggcagcagtggttagggaaggacaagtaaaatacacaagagacaaaagagttgtttgctaaaggggtctcccgaccctggtcccgcacctgctacccggaggggcacagtccatgtttgttgaatgagtaaattgttggtactccaagcccttcgcaaaaaagatagctaatgttgggacagcatcatactctgtttcagtggagtttggctgccaaatgtgtgtaatctttcactcacctggaatcagaggtgaagccaccagaacttttctttccctcacttcaccgaggcccctttcccggagctctctgccaagtactgcctggccgcagagcacgcgtccctggatattattattctaggggtgggaatggacgtgagccaactgatccacacctttactccttctctgttgggaccagtgatagaaagctaataaaggtgaagtggtgactcggaaaggagcaaagctagtcgactcagaagaggggtgaaggccacagtgtgaacctatgaccttgacctcattagcctcaggcctctgaagcaccagctggtggtgatggtgtgatgtctgtcttactgctgaagtcctcctcctgctgctcagtgctgctgtcttcccatctcatcccctccttctgcagagcatggcttgttacccaaaggaaggatcgctggctcacccttaatatggggaaatcatttagagcacttaatttgtgttgactctttattggtgcactattgcaattaagttagattaatgaaaggtaaattccagtctatacatgaggaaaaaaaaaatctcttgtaaagatcctaattagtatgtgtgtttacttagtctctcatggtttaattgcatcccatcttgctatttacaaacaggcatcattaaagaataatgagtgtgtgacaagagcattaatgctagcagcagatgaggtgactggcggcccggtggggagagggagctgggtgggtgacgtctgccggtttgtgttatttcccgatgaaggagaacgcaaggcgggaggacggaacagacactgcgcagcagcagctcgtcctttgacggcagagccttgggctgcttttcatccgctgctacagtgtcagctggaaaggtgaacacacactctcaggattgtctcaggacctcagccagcagcgtttaggttggagctttcttttctaccccgcgttgcaggatatctgcacctgaactccgtgagggttccctgggatgctgaaaaggccacccaacgcgggcctttcctcctgcagtccagctcttctcctccagcagc

SEQ ID NO: 63450 - DNA, 872 bp, Bovine  19866880697595
  misc_feature (1)..(1): n is a, c, g, or t
natggagactgatgtaccccatggctctgactccgtctttaactagagactcaagtgacaccacctgaacgcctcccttcccctgacttaaccaggcactgtggtcaccacacatcatgatggaatcggaaagggtgccatccacaccagccaccctgatctgaccccttccttcctcccttacgaatcccctctgcaggtccaccaaaccttcccccacaaagggcgcttggcctctcttcgcctggcaaatggtttgctggattggaatgggtggaacaggaggtgtccccctgaagggatgaacgggggagggcagagtgcaagcttgcaaatagcaccttgcttgctcacccagatgctgacttcctacaagggaggcggggcttatctgcaaggctgggcaactgtggctacggtggtggtttggtggttttcccagaggagaggatccagtgatcaccaggccaagaatttccccaccccaaagaacggcgtcacgtgaccccagcatcctcggggcacactttgctctggcgcgtctccaaggcgagacagagacattcctgatcctacaggctgggaaagccagcctggcatccgggtcccaagggtctggcccagacccccacccccacccacttggcctgagcaaaggccacagcagggggccgacttacgtgggagcagaatctttccggggggtctccgcacgtgatgccggagggctccaccttcaccttgacatagtccttcaggcgcatcaccttgggctggcaggcatagaactcccaggtggggccttcgtccgtggtcacccaggatttgcagatgtcgtagtccccggaggccagggccaggcagtgcaggag

SEQ ID NO: 63451 - DNA, 1336 bp, Bovine  19866880718767
  misc_feature (1)..(1): n is a, c, g, or t
ntcgcaggcttcagtgtgcagactctcccagccttggactcgttgtccttccgcaaggccacctgagacctgaattgtaaattccagaccggtgaggaaggggagggaggaggaagaccaagataaatgaataaataaaaacctattggctctaaatgcacaatgagaattaatagggctgagctctcaaccaaagattctcgggcaagggcgaaatttcaatgagggctgcgggagacggcgggcggcctcccacctctgactcccagtgcctggccagagggggccagcctgctgagtctgcagggccagagagaaggaggcaaaggcttctcggcctcttgcaagaccccttgaggatggggagcagtcccacggcgctctgaaagagaggttgcccaccaacctgcacagccacgaaaggaagggggagaccttgtccttgtgccttgagcctcaggagagagatggtgaggaaagagggctgggggcacagaccaggcaggtgatgctgaaaatggccctgcagctggctgcccactcacctcccgaggtgcaccttgttagaaatactgggtcctggataacacccccccccagaccctcggagccagaagctgcattttaacaggaaattcaggtaattcagatgcacacagggtacgctctgaggaacactgctctacataatccgtcagcggtgggtgatactttttattgatgatgagcaggcaagaggcctgtgcttcccatgggacctttgcagagtgggggtgtcactactgaaggagaaaggcagacagcaggaggagtggggatcctggagtgaggggtgaagctgggagctcagattcctgaatattggagacctggtgggaggttccagaaaggtgttatgatatccagacaaaagcttcaagcttggaatccaaagacctgagcttgcatcccggctttgctgcttatgggctgagtgatctggggcaagtctctgagactctgtttccccaccggtaacaggacgtggtgatggctgccttgcccatctctccagcttgctgggagaagggaagtggttctctcagtatatcagcaagtgcttagagagtgccagttctcttctagtgtgagcctttgatagtgctgctgatccagtcttgagcatctggacttttccatggtgaaataggtgaatgttaaacatttcatctaaggagacttcagcacacagagacgccagggtcttgacatacaggaaaacccaaagcacacgtgtttctcataagctgctttgccttctctgtgcctcagtttacccagatgaagagccagtggc

SEQ ID NO: 63452 - DNA, 992 bp, Bovine  19866880753155
  misc_feature (1)..(1): n is a, c, g, or t
naattcgcctctgctgccttcccggcctgccgtaagtcttactgccgtgtgtggaaagcctcagcgggttccgggcccccgtcgtccaggtgacagattgggctgcgtaatcagagggggaaggagagcgcgcagaagctgtcagaggcgcgagagcttggctggagccgccagaaatctggcaacatgagttagcgtaactgagtcaacagccgaccgtctccaaatgatctcgccatgaacagggatgaaatacgagcggaaaagataaacttcacctaagaggcataggccagagaaaacccagaaagtctccatttcttggggacagcgaagggacattcttgggacatgtagaagcatcctttgtctcctggccacctggcactgtggaaatttcccaggaggaaaggaaattaagaagtccagagacctaatggtgtgattcaagaaaaaagagggagagagagcagatgaaggagagaagcacgggtgctttaggtctcttctgaaaaataaggcacgtgtggacaaccacacacattccaagagaggctcagcagcgacgtgggtggagccgaaagggcctatccttgccgggcgaggggggggggggcgtggagaaggccacataactgggtaccaccaggacaaccagggagggccacccatcagccctaaaaccagaagtcacatactggggtttctctttcccaactgctcgatttaacagtgatgttcaaaacctctggcttcgggtaaatgcttcactatgagccaaaggaattagcatgaaggtaagcccatctcctctgtctggttcttctgatttcttaatttcattgaggaaagtggactctgaactttcaaatgactccttcctgctagtactttgctccctccttaccttggcttctttagatccagttttctagaaaaagctagaaaattacacagaattacattccaagtatgtaagaactcttcttttt

SEQ ID NO: 63453 - DNA, 1883 bp, Bovine  19866880797299
  misc_feature (1)..(1): n is a, c, g, or t
natgggtgagtggaaggacagtgtggtccaggaaggcttctcggaggaggagagattagggctgagtcttatgggaagaactagggtttcgatgaggacagaggaggcacccaaagcttctacttctgccccatttgcgcccctgttctgtgaggttttcagtcagctgatagcaggaggtctgcacagctctgtccttaagcaggaagcaattttggaaactgagcttcacccagctcttagttaaagccgctcagtctcttgaaacgcccgaggcaggtcccagcctgggacaagaatagttccatgcatgacatcttgttgcttggtgaggcctccttgctgggggcggacgagtgagaggagggggcagccctgcctgcgagggccccgtgggtgagatcctggcctcctactttttcaagggaaggagtttgggtccagacaccccaggagggtggagggcggagcctctggactgcctaggggaagggaaagggcttggaggagacatcgttccagagtgtcagacttagagcttccagaactttccagtccatgcaccccaccttccccaggctcttctgcctctctacatcccctggccctgacttttatgcttcaacgcacgtttaacacaaactgcctcaagttccacgtgtgacgacgaagcagggggtggatggatggacaggcaggcgaccccagctgtggatgagaagttgaggttcgggacggggcgagtgggggctcgtactcatccctttctgggctgtgggactttggataagtccttcatgctctgagcctcggttttctcatctgaaaactggggtgacgcaaaacacaatctcaaaggctggttgtctgggtgagacgagacaaggatggaaagcccctctctgggagcctggcaaaaaagtgaatgttcccaaaaagggattttttttcacccctggtctagaatttagcttgagagacacaaggagtaaaagtagacattgacagaagaggagcctggagcccagtgtgtaagtgtgctgtggagcacacgccaacggccggcagggcggcgggggccggggagcgagtgtcagagcagagagagtgaagggtgggggctgggcggcgccggacccccgcaaggacagccccttagccaggtttccccagctgtgggcgaggctgccactgtgccctggatggagaaatagaccaaggctcccaagtcccactgttggtggagctgggattcagccttctccgcctggccaagggtgtcgggggaggaggggaggaggaaaggagcactgggcaggcagagaccagaggaggcccacggggcacgcaagtcctggggctggaatggagcttggcaggctcaaagaagcaggtgccaagctgcagcccctcccccttaccagccagccatcactaccccagaaagggggtccgggctgtgttcctgacccacggcccagaccccaggctctcctgcctcaggcctggccagggcccactgggcccacgaggaggcctggctccttcctggagggaaccagagtgttggagaaagtgtacaatggcagacgatgcatggttctgttcagctttggtttgcgggttctgattttttttttaatcatcacagcagatttgcttaaatatatgaaaatgtgtttctgattccccaagcacacaccaactgctggcagggcgacaggggccagggagtggtgtgtcagagcagagagagtgaaggatgggggctgggcggcgccggaccccgccagtctcctcgcggcaaggacagccccttagccaggtttccccagctgtgcaacgaggtttggttaggttaaccacttcatccagcgtcgctg

SEQ ID NO: 63454 - DNA, 761 bp, Bovine  19866880800137
  misc_feature (1)..(1): n is a, c, g, or t
nccgaagctgcagtagggctttgcgtcatgccaggcacacggcgaggcttccttgagagtcccattaatcctgttacgtcaacatcatcaccaccaccgtcttcatcaccatcaccatcactatgcctaccgcaacccaaacatcaggttggaaaacaagcacaaaattgggtggaaatgaaaagccagaggccaagacaggggaaacgtccaaagagcaggtaagaagtcctgtctggcagggcgggcctggagcaccggctctcaaagtggctgagactctggtggcccaggagccagaatttagaaatggatgtaaattgaggcaagaaaaagaaactcccaaaagtggttgaaacagggggtgctgtccctggtcccacgtgtggcttctgatggtgtaacttggggcactggccatgtctgccgactgagttgtcctgagcccacgtgccagccacttgctggcaccctcgcccggtgtcaccgcccatcaaaggccacgggtggcaggtgacgatgtctcacactccccggcacacacagccgcgtgaatcagggcttgggggagtcggaacttggaccagaatatcgtggtatttaataacagagtgaaaggatgcggctggggaatcaaaagacgttgccgctaaatgcctggaagagctattttaagtggagctgatgttttaagtaaattccactcagctctcccattaatcccttgaaattggtcatgaaagactgatcggtgacggtca

SEQ ID NO: 63455 - DNA, 1730 bp, Bovine  19866880802520
  misc_feature (1)..(1): n is a, c, g, or t
naccccctggtcagtctgcagggtctcgggggagctgcagtctcccaactccgtaagccctctggaagggcgtgctcaggctgaccacagggagtggcccttgtctctgactcaagtggacccaggaccactttcccaagggaccatgctctcctggccccggaacctcgcctcagctcttctctgcctcctggggaaacatctgggggctggtttccagctgagggacaggcgggggcccgcactcatcaccccaccaatgcccactccccacacccttcgctccggccccgtgtcgcccccaccgctgtggaagaggcccgctccaaattcatggctgctcaggggctcatgaattatgcacggccccagatcaatccgtcagcaccctgtcagcgagggatcaaaggccctggcggccagctgacagctctctctgtgcgaggaggagcggagacgtggctttcaaggcccgtggtgggccgtgcgaaaagagcccttcgccggtgccgggggagccctgggcactctgctccccgcccctccccggtgccccggctctgtttctctgccagcgcgaacttgacaaatgtctttaaaggcaggggagggggtaacgtgtgttttgagcgcgttccaagatgctccttgtgaataattgatgccagcgccaggtttgtcatgagaaggtcaccttgggtggggacggttttagccacatcacaggcttcccacggagttgacaagatggcccctctcagcccagggccccgcatccagcccagggctgggggtctggcttctgaacaggagattctgggttgttctgtccaggccccaacagctggatgaatagaggagggcagggtggagtcaaagtgagaaagtggaggcgggtgggtggccgccgggcactcctactcttggcagaagctggagatggacctgggagggcgatatattcatagcaaatgaccacagactgtgcggctcaagacgagagaaacgaggcctctctccgttcaggaggccagtgtccaccgtcagcagaggtggccccttccggaggcctcggggcagaatctgctccacccagcatccagaggctccagcatgctccgcctttcttggctcatggatacatcacttgggcctctgccttcatcttcacgtggcctgatctccccatgtggtttctgtatctgcgtctctcctcgctggacttagggcccaccccaatgcaagatgagctcgagagtcttctcttaatttcatctgcaaagactcttctctgaacaaggttgagctgaggttctgggcagacacatttctggcggccaacattcaccccaattcagcaggagacacaggctcgagcccaacagggacggagccacttgggcctgatggctgctgtgaccgcctcctcttggggcatagctgggcccacagcctcatccgggatggagtcccaggaccctgtaaaggaaacctctgggagctcctgctggcctaaccccccgcggcagcccagcgcacccaggttccagctgctctgttccagctgggacaggatgctgtggtccccgggtagcagatgaagactgggaaactcaggcagaggaagcgactcgcccagagaaccaggccagggaatggacggctgggtcaaggctggcgtctgggtgacttggggaccaccttctctggagttgcactgcccagctgtg

SEQ ID NO: 63456 - DNA, 725 bp, Bovine  19866880824720
  misc_feature (1)..(1): n is a, c, g, or t
nataaccgcagagccatcacttgtgaagcttgacagaaaataatgagaaacactaaatcttttataaggtcaacactcgccttagccgagcagctgtcaaacaagaaaagaatttagcgccggagccacgaaacttccatcggctcattaagcccaacagggcccgggcctggcgtggcggagaagacgcggggcctttccgttttgtgtcagtaatttgcggcggaggaggaagaagaaacagcccgcgccaaaggggcctggggggcggctggggaatcgttaggacgccgggagcggccccggctcctaattggaagcattgggcattatcaacggaggatttgcctcggttccctgacagctcgtgggcccagaatgatcgcccacttgtcagtgtaaaagaccattaaaaacaaaccattttgatttaattggaggcggtgcaccgtggggccaggtgaggctgctccgtagcccggctccccccaagctgctgcccctctctctcggtgatggggctgggggtggagcgggggggggctggaggcgagcgttttccagacttttcttcgcctttcaaaaactgtctgagaaaggactgaatgggagacggaaagagcttcacggtggcggcgagggctgttttcaatggggttgatcagcatgcaccgtgacaagcagagctgccaggaagtgggggggatctccccttgccttttcag

SEQ ID NO: 63457 - DNA, 2471 bp, Bovine  19866880848645
  misc_feature (1)..(1): n is a, c, g, or t
nccatctgctgggtcagcctgactggccctcgtccacttaccttccaggggccaaacgttcccggtccacagtgccctcccagtggataaagattctgggaaatgtttgtctagtctccatgaaaccaggaagatgtcataaaggaaattccctactgcccagtaaggaccctttcccacgcagaagttttggggcccaagtgacctgtgcagccctggatggaggccttggagcccatgaaactctgggggaggagggggcaaggggaccccaccatcggcgtgtgtgtcttctttcaaacatcctccctaatcttgaccatttccccccacatctcacttcagctgaggttgctctctgcctgaacctctttcagcattatttttgcattgttcttctccccaaggaatatcccatttagacttccctcccaattgaatttgatttctccctctgagccaaatcttatttttgttattttccatcgatatctttaccctgctctgaggcctctgcattacttctcgggccttcttggcgagagcaacgcctcccgattaaggaccttatgcaaatttcattagtgaactgttcactccacctttcagatcattattaaagatgttaaataagagcgggacagacagcaattccacacaccttcgccgagaccgccctctgtcatttatctttggcttgtgtgtgtgcagttccattctcaaaatgaggttcttctccatcctaggttgaatttattttgtaaggaaagtttcataacatattatggcagacattttactaaaatcaaatctcacagctatccacagttcccctgcatatattgccccagccgaaggatggtttagctcggtgacctgcttgctctcataagaaacattgctggggacaccatggtctttgggatgcttgctgagtttcagtgaatctctccattccttggtcaaccagctaagaccatgcactaaatacccactggattctgacttccaccgtgctgggctgagataatatggaagaagtgaaccttgtcctctaagaatctcatagtccgcctaagcaaacagaacattcatatacacatgtgcccaccacacagagagctgtggccaggtttgggtgttcatgaatgcagtatgcagtcagtcacaggctacatttaaaaatacttgacaagacttccctggtgctccagtggctatcaatccaccttccatcatgtacacactgctatattcaaaacagataaccaacaaggacctactgcatacatggaactctactccatgttatgtaccagcctggatgggagggggatttggaggagaaacagttcagttcagtcgctcagtcgtgtccgactctttgcgactccatgaaccgcagcacaccaggcctccctgtccatcaccaactcccagagtttacccaaacccatgttggtgattgagtcagtgatgccatccaacgatctcatcctctgtcgtccccttctcctcctgcccttagtctttcccagcatcagggtcttttcaaatgaggagaatggatacacatatatggagagctgagtcccttcactgttcgccagaaattaccacaacattgttaatcagctataccccaatacaaagtaaaagtttaaaaacaaaagaaagaatcctctttccaatgaaggggatgcgacttagatccctggtcagggaactaagatcccacatgctgtggggtatagccaaaaaaaaaaaaaaaagtaaagaaaatctaatagtacttgagtgtaacatgtgttttaaaaccttaattttttatgatgggaaatttaaacatgcatgaaatgcaaattgactatgatctcccaggcgttcatcatccagtttcaacagttacaacattttaccattcttatcatatctccttacctctccttttccttttttggcaggggaagacactttaaagtaaagcccagacatcatatcattagcatcagtaatgacttcgcaatgtacctttaacagatattaaaaaaataaccacaacagcgttatcatatcaaacacacttgaagggaattccttatgacatattacctaatacctggtccttgttcaattgttccccccgattatctaaaaaaagtcttttatacagttggttcctatggaccacatattgtatttgatggacatgcctcttagtctgcatcatatccttttgaaaatgccatttagctgtgaaagaaactaagtcatttatcttgtagaattccaaatgtagtccatcttaaaggacatctgttatgtaaaatatgaacacagagaaagatcacgaggagatcatctaagatgaactaaagataaagtaagaatgccaacacatgtgaaacaaggacccttcgagttggacggaagcccggaggttgttcacactaacccagcctccaccccat

SEQ ID NO: 63458 - DNA, 1428 bp, Bovine  19866880884360
  misc_feature (1)..(1): n is a, c, g, or t
ncctgaacttcatgcagtggttccccactgcctacagcacgggccccacacttcctccaccgccccagggaagaggcgactggcaagggtaggaggggaggtggcaggccccggtcctgctctccaccccagggaaaattcctttcgacctcagagacgtgggtggcagcagtggaacagaaacctgccatctaataaaataccatcttttaaaagtaaaagccaaataaagccatcatgttaaaagtatgattatccacctggcaatctgattctgaatcagatcacccagtgttcttcctgtaaataggccccacctcgtgtgaattcccatgtcaactggggaagatgacagctagctggccagatgcacagtgatctgaattagccactcatggcagtcaaaatggtgtgtataaaatagaattctgcccttgactcaagcccctaaactctcatcagcctattaaaagagaagcttggtgagaaagcagatgagtctgacaggtcacggtgaaataaaagcccactctctcacgtggaagtaactctaatatcttaaccctgtttacccagaatcctgttctctctgctcattcccatcaacgccaaattcctaccttcatcaggaaatggaagcccaacgacccagaaataatctgagcaaacctatctcgctgcagacgctttcgtttttatcttcattaactctttggtccctgtcaagcatcctgggagcaggatttatgttttggccactgggtttagaggatcttaacatgtagcacaatctgtacctttaacagggggcagaaaataccgcatgttttgtagacaggtacaaactgttttctttttcgagtgaaagaacaccatgttatctcattcactatattttttaactggaagaattttaaagaaaagtagcatgtcacccagatgaatgtcacttaattttttctcacatgaaatcccacccatttaataatcctatgtcttttccccctcttaagagaggggcttccctggtggctcagtggtgcagaatccgcctgccagtgtaggagacatggcttcggtccccgatctggaagatcccacatgccttggagcaattaagcccatgcaccacggctactgaagccctcgtgctctacagcctgtgctctgtaacgagagaagtcactgcactgagaagccagcgcactgcaactagagagcagccccacccaccacagcaagagaaaagtctgcccagcgatgaagtcccagcacagccacaaacaagcaaagttatttacgcacacaataagtctgtcctcttcaggtaaatggactgagtgaatagtcactcatcctgggtgactggatatttataaaagttcacaaaagtaaaatgctgaagtccaagaaattcacactaggccc

SEQ ID NO: 63459 - DNA, 1822 bp, Bovine  19866880892222
  misc_feature (1)..(1): n is a, c, g, or t
ngtaaagggaagtaggtggcaagaaaaaaaaagctatatctgtaatatttcatgtagtgagggctgttaagtaatataaagcaggatgaatggacagagtgacaaggaggtcgtcattctgacaggttagtctgataaagggatctttgagtggtaacctgtatgagcctagggtttgacctgggaagatatctttttaaaatgcattcctgcagaagagaaggcaaaggagaattcatagggggtaagatcacatcttttccaatgagtcaatgactctgatgctgggagggattgggggcaagaggagaaggggacgacggaggatgagatggctggatggcatcactgactcaatggacatgagtctgggtgaactcctggagttggtgatggacagggaggcctggcgtgctgcaattcatggggtcgcaaagagtcggacacaactgagcgactgatctgatctgaagatcacatctaaccagtccatcctaaatgaaatcagtcctgaatattcgttggaaggactgatgctaaagctgaagctcagtactctggccacctgatgtgaagagctcactcactggaaaagaccctgatgctgagaaaggttgaaggcaaaaggagaagagggtggcagaggatgagatggttggatggcatcactgactcaatggacatgaatctgagcaaactctgggagatagtggactggggagcctggagtcctgcggtccatggggtctcaaagagtcagacttgacttagtggctgaagaaccaattgagaacctctgtactaataaggatttggttttcagccaagtccatacctctgaagagaccgtacacagaggctgtagaagaaatagaaggtttgggattcaaatgaaataagttagtggccaaatttgatttcatagaggttcaagacatcttctcctttgtctctttgtcctctcccttatagacaagttcctaaaaaattgtgatctttattactggagagaacccgcccaagtttttagaggagctgggtgtgctttatttggagcagagcagatgaaagccggtggaaagtcatgatggtgaccttcaactcacctttgagtcaaccatggggaagactcctatgtaatctagtggcaataatgagaaccagttgtagggaggaagatttcaacctaatagtgcatggcacttcctgcaattgggaaggcagcgagtccattgactaaaggtattaacctggagtctatgtaggggatcccagcacaggctggtagcatagatcagaacccccttagggctgaaattctataatcacattgtactgtcttctaggtaaaaatcaagaccgttcatgaatgggaaccccgtggaacgacttaaggtcacttacagtgcacttggagtcgttttcctggagttgcatgctgttaagggggctttaattaagctttctcctccgggcacaagcagcctgtttgtggtgagtgcaatatgccatcccagaatatgtcaaacttcatttgcaaaatatcagactgctgtttttttcccagagccaatctgcagagtaatacgttcaataacttttgctctttttgctctcaaaaagataggtctctttttggagtcgatagtgcaataaatgcggaatctggtgcaaattccaatggaaagaaaagatattgttatttaaaggccaaataacggcttaaaattagagttgtgaaggcattgaaaaacaccagacttcccagatggcttggagataattcactttgcactcagtccgttcacacgctaaaaaaaaa

SEQ ID NO: 63460 - DNA, 1278 bp, Bovine  19866880921185
  misc_feature (1)..(1): n is a, c, g, or t
nacacacaggtttgatccccggtccaggaagatcccacatgccccagagcaacttagcccatacgccacaactattgagcttgtgcgctagcaccccagagtcacacttgctgagcccacgtgccgcaactactgaaggctcagagcctgtgctctgcaacaagagaagccactgcaatgagaagcctgcacacggaaactagagagcagcccccactcgccacaactagagaaagcccacatgtggccacaaagacccagcagagccaaaaagaaagaaagaaagaaaatgttccttctcagcttcccaagcctcagtttcctcatctgtatgctggggatgatgcccctcatggggcaggatcaatgaggaaacacacataaaggactcagaataccacatggcccatcagaactgctcagcaacgacagttatcattatggaaggaggaagccccgctcccagcctcggtggggatcacagagctacgagggtcagcgcagatagagtagaactacatgcttcccttcctgctcgtgtttcctgtgggtcagcggaggaagagactagaatgtacaaagagtcagtggaccgccttctgctctctctgggtccctccctcccctctctgccccccaccccaccaacgtgcacaaagccttcttccctcctgcggtttctattctcgtcctaagttccttccatctccagttactgggtgatcaatagggacaggatgcttatggaagaagacacgaaggcaagaaaggggaaggggccaagggagggggaaaaccaggcgggtgctggccagcccagggcctcgggtaagaagccagaccccggcggcatctggggaagctagtggattccaacacccacccaattctcaaatggtagctatagctcctgttcccttaatcagtgatgtataggtcaggtgcacaggaccttcatctgatgcaaggaaactcgttccaccatctcccaccaccaccaccctgcttgacttgaacacctccaggaacggggaactcactcttctttttctgtccctggttgactaaggcccagctggatggcttccctggaaccttcaggagctttctgggtggaagcctcggacccagggcagggcctgggggtgagactagggcatgtgaacacctccctttgcctctgccccagacccagagtcagcaggatcggggaggctgtttagccagagtttgcctgatttcggaccccagggtccccggcctgccgggcgcctgtgg

SEQ ID NO: 63461 - DNA, 1073 bp, Bovine  19866880923137
  misc_feature (1)..(1): n is a, c, g, or t
ntccaagccacccacccaaactcctataaaataataataagccccttcccaagcacctgtcctagggatctgagacaggttttgaactggaagaccagttctgggtgcaatcactggccaaaactcagcagagtgaaaccaggctgaccacaagggggagcatgtggacctcacaaggaccctggtgccagggagctgggctgaaagggtcatcctgccaggcaaccaagccccccaccaatatgctccccaatgctgactgcaactgtggttaaatagtcttctgcttcttcatcggctgctcaggtcctggggggcatggaccttgtcagttttgtccaccactctatcgtcggagcctggaacatggtaggcactcagtaaatatttgctggagaaatgcggtccagggccttttaaggctttgagacattattcacagtaaggaggaagttgatttgagatgcagagatgagatggtaaaaccagagattcctttatcatttagccaacagtggtcccccagattttggcaccagggacaggttttgtggaagatcatttttccagggactggggtgtaggggatggtttcaggatgattcagacaaattacatttattgtgtactttatttctattattattttatcagatcatcaagcattagatcccagagtttggaaacccctgatttagcagactctgctatcttcccctatggtggatattgtgaatccacgttgcaatgatgcatcctcaaagaccaaatgtgtttcttggccacattaatagaggtagcaggtccagaatgagggaggtgaccttcctattctcttctgccactcaggtcactcttctggcgtcattttaaaacatgagccgtcacagattcaggggaaggcccataaccagcggcgcgtccagacaggagacatcagcccgggacaagggcaaggaggtcactgtgtcagagaacacggccggaaatggtcttccccagctgcgagaggaaagacttagacggttctcaatagcctgaggccctgctatgaggacagtggagggcctttg

SEQ ID NO: 63462 - DNA, 1313 bp, Bovine  19866880946245
  misc_feature (1)..(1): n is a, c, g, or t
ntaaaaatggggataatcatacgtacctgggagcattgctgtggggattgaatgagaaagtgagtgccaatactcactttgcattttatttatttatttatccactcatgcatttattcatactcattaattcatacactcactcattcattcattcatattcattcattaattcatacatattcattcattcatacactcattcattcattcatatgtacactcattcattcatttgtacactcattcattcattcatacactgtctccctctctttttcttggctgctctgcagggcatgcaggatcttacttccccgaccagggatcaaacccgagcccccttaactattggatcaccattcactgcctttttatgaagcatctactatgtgtcaggcagcagcctaggctctggggagatgacggtggatcagagagaccaggtgccttgctcatgataattttaatggaggaagaacagacaataaaggattaactaaaaacttgtgtttcttgtggcaaacagctggacaggggccaggaagtctgccccgggcggatgactggggacagaagctgtccacagtagcagctgtccttctttcaagacacatttccaagggcacctcctccagccagcctggcctcacccccaccctgacgtctcctgtgctttgcccagcatgtacgcctgtgcctggccatgccccatcctcagctgactccatgtctctcctgcacatcgatggccgggagctcagaagcaaagcctaaccgagatttccagacgggcgtccatcacaatggcctcgctggcacgccagacctcggggtctatctctgctccttctggtcatcatgggacgacagcaggtcaaagaaactgtttggtctaggcaacagtggattggaagaggctgctggagatcttaaagaggtcatgccctgaccacatggcatgacctgcaaacaaagggcagccctctgtttactcaggagccaaccgagccctaggacggtctccccctgaagatgagggaggcgagggtatagctgagatcagagcatcccctggcagagccctctgcccactgcgatgctgggcagcctcttcccgcatgggccctccagtggctcagaaccccagtaactgacaggaggccgcatctcatcaaaggaaaaaaaaggattaaaatcaagattttgctattatttttctctgatacgagtgcagcgaggaatagctcagttgcgtcacatcctagtttttcatttgtgtttttgtttcatgcttcaatatcttcctccag

SEQ ID NO: 63463 - DNA, 1336 bp, Bovine  19866880979072
  misc_feature (1)..(1): n is a, c, g, or t
nccttcctgccagccgaactcagctgatattctgtcaatacaattatggggagagactgtttggtttgcttcgctgacagccttgaatcttctgtctctctggagaggcaggcaagatctgtttggtttgcttcgtatatgtgtatatacgtgtgtaacacatgtatatttgtgtgtgtgcacagataataatgagacaggcaatgtcataggtcaccccttgtaagtttcaagtttctgcactacctggatgggttcagatttgggaggaggaaaccctgagcaggacttaagaggctttatagaggaaaagttctgaaactggaccttgaagggcgaaaaggtagattctggtcctggggtgggggtggagactaggagaaaccaagccttccagggctgtttgattccaccctcctcagatcctgagtgttcgcagatttccaccccaaccccaacagagttctagttcctcagccttggcaccagcgctgggatcatagtaatcgtcatcacgaggaagcatttatttagagccagtgtgttcaaactgggtgcttgacgaaattaggcaaccacactaggaacgtaacatctctaataagtgttgatgctggtgaacgtcaacgcgtaggtagagacagatgcaaagaggatggcagacccacagtcgggggaacaccccagtgcaggtcagggtctttttcatgatcgagtaaagcgtgacagtgttacattccgcttctgcgctgaagacaatgtgcctctgattgttcagatgcttttacattcaatttacagagtaactggggaaaatacagcatgaggaaggggactgaaattccaccaccatcctaatgatagtctcagccagctggtgggaagcttttatttttccagggaaagctgtgggctcattcatccctggaactctttctctctcggtcctttttttcttttctcttcctccttttttttccctctcttcttttaaatcaaaacttctggcttcctggcacccaggcacatctttggtgatcagggtgagcgagcaggggctgtaagcagtgcccggtcctatggctgtttcagaaagcagacatgctctctctcaggctttttaccatcatggtagggggcgcaggttagggcggaggcagctctgcttgagacctgccttcctctttgtccctctaaagaaggagcctttggctttcaaacctcaggaatttgggttccccaggatgaacccagcccctttctaaactctcagatcactggcagtaaggctgtttctctaggaagaattctgagtcctgtatggacaagtcagcag

SEQ ID NO: 63464 - DNA, 1388 bp, Bovine  19866881001378
  misc_feature (1)..(1): n is a, c, g, or t
ntacctataagacttgagacatggcccaaaactctgctttaactggcaggtgatgcttctactaagagccgaagtgcaagcgcctcacttgagctccgttagaggcattctaacagtccaacagtgtcgagggggaggctagatgctcaagccactgtgtggtgaccagccctgccgagctccacccacacgggagcagtgggagagtgcacggaggtgttcacgctccacagcccatggcaagctagcataaagaaatgcattatctatctggctatttgctgtctgtgctgtccaatctctaaaatgaaaaaaaaaggggggggggtgcaaaacctactttcatttaaaaatttgaggcctgctgacctggaatataacctgaatttttgcttgtcaggacttactggtgtgggaagcagagcgggtgtggcagggagcagaaatgcagtccattctgcctgaaatccagttttggaggtgcggggcactccaacagggagactttgaggaaaaaatcagatacagtttattgagctcttaacagctaacactattatattaccttcagcaagaaaaactactgtttaatagttccttataggaagggaagccttctaggaatgtagtttttagaaattttatcacaaacctaattttctatcagactgatagctcagagggtgtcctaaggctgagagaaggaaagggagggaaatagagagggcctctcctaggaggaggagcgaggcagagaggggtcaggagcagcggggatagacagacgggcgggcctggtggaagtcggacactgacagcaactcctcgtttcactctgggagctatggcaactcgcgtaacacggttcagcgctgcccagggagcggggactccataaatgcagctccgtattcttcctgacaagacccatgagccttgatttcttctgtttcttagctcacaccatcacaattacaacagaacatattttaatatttaattattaccccttgacattcttttaacctaattaactggtgatggctgctaacagctctagtcccgatgcccaacattaacattctcaaaaacttcctagacgaagaagcagaaaaatgtcacactccaccacgagcttcaccagtgcttctaataacttctgacattgaaaaacaattggtagttttggcagatatgataacaggcagagatggcttgaagtctgggtcgtggacacaggaggatttcagaatgaatatcaagcctaacaagctaccaatttcttatctaggataatgggaacaaattaaccttaagcagggaagatgtgacacaggtgtggatcaggttcccaagatgcagtgctgccttggcttcaaaggtccagt

SEQ ID NO: 63465 - DNA, 877 bp, Bovine  19866881017693
  misc_feature (1)..(1): n is a, c, g, or t
nacccgacacgggtggggaatgcggctttggggctctaccccagagccactgaatcagaatttctgggcatcctgccaggaatatgcattgtccacaaactacactggtgactcttgaacctctcaagtttgagaactactgaacccagcagaggaatcaatgccctaaacagttaagcagtttggctgttcaatggtctttcccatttcagagagcttgggatacagcaaaataagacgatgagtctcacggtttaaaacagatgtatcattcaaaaacaaggcacgaatatgctaaagaaactgaaggttggtaaaaatgcacattaaagagactgataaatgagttttatctgctgcaaaccatgtaacatataaagaaagattaatttacaagatattaaggtatgttccaaatatcacggctgaaggttcattttttccttctcttgcattttcatacctagtggatcagtaaaacattgtggattaatattttaaatgccgaaaggagccagttgcttgttctagtctgactcagttaagctcttacaatattttgactgtttgaagaaattaataatgggatgttaggcggtagattaactgaaactaaatatcaacagagctagatttatttttggatgactgagctcatctcttcaaagaacggaagcaggattcattgtatcataagttattaacttacacaacatgaaacagcccccgaacagagccggccacagcaattaaggcttacgtaagaggctgaaagtttagacttcgcattagccacgactgggctgtccaggctccagtcggtggtgaccccaggctcacagagacgccaggagcagttcagatataactgcccgga

SEQ ID NO: 63466 - DNA, 1122 bp, Bovine  19866881034145
  misc_feature (1)..(1): n is a, c, g, or t
ncttagcacgtccgccatgttgccgccgccacagccggctcttcaaaaccggcgagcaaaaagacgcgccggctgatgacgcaagcgctcggaggactctgggaaatgtagttttcgcgggacggggccgtccgggaggtttgtgaggccaccctaggagagaggatttcctctttaaaggaatgcgtgggcaggagcgcgatcacctgaatttagggaagtccggctgcgctctcggctttcttcatggtaacaaggaaatacagaaagttccctcacttccccaaacttgcagtcttgggagtcatatggaaatgaattgctcagagcaataaagggtccgtggtgtaaaggattgaataaaattcctccatattcgtaaatcaatgggggagaagggaaatttcttccctacagtagaatgccagctaataaatgcagaatgaatgatggaaagaaaattactacttggcaactgttagattaattattgattcaaataggaactgaagactgccagggggtgaaagggtgaggaatagcagcatggttatatagtctcaacgtagcatccctcaagaaactcgctaattaagaaggaaaaaataataatccagaagtttcagctctggctatatgatcaaaagaaggaaaagtagggtctggaaaagctattcattatttgtacacccaagtttgtagcagcattatccacaagagccaaaaggtggaggcaaccgaagtgtccgtcctgggatgagttcattaacatgtggcatatacacacaagggaacatttattcagtcttaaaaaagaaggacattctgacacccacacatactacagtgtgggtcagggtatcctcactggctcagccgtaaagaatccacctgcgatgcaggagacacaggagactccgatttggtccctgggttgggaagatcccctggaggagggcatggcaacccaatccagtattcttccctggaggctttcatggacagaggagcctggggggctgcagtccatagggtcccaaagaataggacacaactgaagccactgagcacacagggacatataacatgggtgaagcttaaagatgttatgctaggtgaaat

SEQ ID NO: 63467 - DNA, 1544 bp, Bovine  19866881113228
  misc_feature (1)..(1): n is a, c, g, or t
nacatgactgagcgactgaacaacattatgtagatgaacctggaaaacactatgccaagcaaaagaagccagaataggcaaatccatagacagcaagcagatgagaggttatcaggagatgaggggagaagggagtggagattgattgcctagtgggtacaaggaggtggtagttgaaaaacattatgaatacactaaatgtgactgaattatatccttcagacagttaattatatgtatttcacaccaataaaaaaaaattccagtacaaaatagtctaaggtaaggtttaatatgcaaaatgaaatgaggcagcacaaactgtaacacagattttttttcatttgaataaattttatgctaaagatttttccttgcttttggtgtggatcatttttaagtttttattcaatttgttacaaattgcttctgttatatgttttttggttttttggccaccaggggtgtgggatcttaactcctccacccgggatcaaacccacactccctgcattggaagctgaagcctcagccggaggaccaccagcaaagtccctggataaattctgccggttgcagtcccgacaagatgcaaatactgtgctgtctgggtaaggatggtttcacgatccatcctacttgtgatttctcattccacgtctggcttcacatctggctggctagcaagcttcctaagaaagatcgggggttcttttccaccttattccctgtattcctagcacctaagttggctcctggcacatagcaaatggcaaataattgtgtgctgagcaaatgaatgaccccagcaacagaatttcactcagcctgggtgaggggtggaggggactctgggtcatctcttctcaacctgggatgcacgcacccctcacctgggacctcgttagagacgcagattctgatttatcggcctgggatgggagctgacattctgtgtttccaacaagtgcccagggatatggatgctgctggtccaccagtcatatttggaggaacaggaatccaggcatgccagaccctaagccttgtcactgaagaaaaagtgcaggtttccaggtcagacacccgggtggtttgtctccccggacctcactgctcgctagtcctcccggcatagaggcgccagagcacttcctggttacccctggggagggtgattaaggcaattggcaactttttcccatgattccacggtaggctgtcattttgaggaaaatacgtgcaactcaattcccaaccctcggtgttgtatgtcttcttatgtgtggtggggggagcggggaagagtctgtggccctcccccagagaaacttgctgctctttctgcctttgtgtttctgagcatgtaaactcagttggaatcacagctaataaacaggtcatcttgtacttccaaaataaaaacatgccgtctttcagcggaatagcaactgtacattaaaaagctgtcaacttcaccacaatttccctgaaccttgcactgcagagagataccttgtcactcagagttgagtgcagcttta

SEQ ID NO: 63468 - DNA, 720 bp, Bovine  19866881114577
  misc_feature (1)..(1): n is a, c, g, or t
naaccattggagcttcagtttcagtccttccaacagttaataaatctttgaaagtttctattccaagatttttacctaagagaagagccattttctacccatgtcttccttataaagacaccactgcgtcctacagaaagcaagcagctacctggatccgggctgtggggatggcaaaggcagactagagaacaaaagtaagtaaaatcaggctactggggaactgacggcggtggtgacactgatgatactgttcatggtaactaacgcatatcagccctcttctgaacccctcgcgtactctaggcttttgatcttcacaacagccctgagtgggagactaccatcaagctcatcttacagatatcaggagtaaaccacccaaggtcacagcaggacttgaacccaggcaggccccggagcacctgtctttaatgacaagctacacagcctctttgatccaaggagatgacaaatgcgttcatgttttagaaacgataaagggctgaaacgaacacaagacacttcagcttttcactgtctcctttctttgcccttttcagatctgcctcaaaacaatcaagataatttgccttctgtttatatccccaaactagccgggaaaaaaaaaaaaaacttaatatgcattatccttcaataagtcaggccatgagtggaatgcacaagccaaataaagacatctcagcagccgtgtgctca

SEQ ID NO: 63469 - DNA, 1586 bp, Bovine  19866881128907
  misc_feature (1)..(1): n is a, c, g, or t
nagcactgaccactgtgttgtgacctccagagtatggcacagatgacaaacccggagaggaactggctgggagggtcaggaaggcttctggaggaggtgagctttcagaaggacaggtccagaaggatgggcggactggacgtggacgggaggagggagacccgcccgggcggtgaggaggacgccctgtgtagcaggatcagtgaaaatgcaggagccgtggggagagaggggttaatgagctgggttggaccaggagcctggtggggagctggagataaggccaaaggggaggcctggagccagcatgcattcttgacatttagcagctgcagggaaagccctgatcctggctgggcagcctccttccagaaagaaaggggaagaacctggggacacaggacaaggcaggagccagcacccttcaagtcccaggaagccggagcaaggacggggtgcccaaggcttggatgtaaggaaaaatcctgagagcaacctctctcccgctctggcctttaaattaaaaaaataaaaagtgaaaaaagatgcttaagattgaaagacaagatgcttatagctggaagggaaccagtgtggtcctgggcaagactgaaatttggttctcaaacttggctgtatcctgggaccacctgggaagcttgaataaatccttagcccaagcccaccccagagactctggggtaggtggtgaggctgcagtccagcaggttgcggggatgttaagagcccccaggcgagtccactgactggctcagctgcggaccactccagtggtggggggcccggacggagccaaaagtctgtacagctccctgggccctgcctcctccactcctctggaggcccagctgcccgtctgggattggggcctttaggaaggctgtcccgagggttaggggacatggagctaacggaagagagccccacacctgaacctccattcctgctgtgggaacaccctgacagcggtcctcaggctgactcacctgggggcaccccagacaagccacatcaggccctcgggggagggtccctcccagggagtaaccatcaggcttcccaggagactcccatgtgcagccaaggtagaggccagaggaccctgcaatgggacatttctccatcatggggcggcccctggctccgcgccccgctttccttcccttcctcgccccccatccccagtcccttggggacctcaggtgggaaggggagggctgcctggggcaggcggacgcctcgattccccttctccccacactgcagtcccctccaccctctatttttaggtccattattgtccattcttgggtgtattttttttttttttttttctactccttccccagaaaaaaacagatcagattcctccaggcaaagccatctcgtctcccccggagctggtacgtggggcacgcacgcggccaatagacatgaaataagtgaattatcaagtaagtagattagcagactctgtggtgtctcagaggacagaaggggtgggcaaaatgctccggtccctcctccccagccctccttcctcaggcagccagggcgtgctgggg

SEQ ID NO: 63470 - DNA, 1031 bp, Bovine  19866881158947
  misc_feature (1)..(1): n is a, c, g, or t
ncaccaacaaagcccgacggttactgcacgtgcccaggaagcggaaccttcataccgcctagcccgagtgcttggacggctgtcattctctgccctcatgctgctcccccagattcagggggtttggagacgattcctcctcccagcttccattccaaatgagaattatgctccatccatcacctccattgcaattattcccaacgcatctcgcctttccattccccatctgatcaccgattacgggctacaacatgagatatcttcttgcctgttgcttcttatttccgtaacatgaatgttgttaaatgcatgatgtccaaacttcccctaggagaagaatatccaattcctctattttccttgactttctcttccaattcacattacacatgaatatacaaacatcccctgagtagctggggcttattattctggagttctggtttctcttggaatacgctatcttcctcttggcttgagatcatgacttctgtgtgcagacatcagtttgctttagctgtgactgtcagcttctgactaacctggcattaacaacagttctctgttcctggcaaccctaagggcacctgtagccaggtaattcaatatatataacttcaaatatttggtattaatatttagtattggtattaacatttagtattgataatctgcttcattttacaaatgtcacaaatttatttttacaaaatcccaaattttcagactaaaagagatgaagtcaagaatcaggtctcatttgcaagatgggatgaaatgtgcagatcttgcttggtttatagaatcacaggctcttgaagcacaaaaaggcctaaaggcctctcccgctgcgcatgcgtggacctcccatcacaggagccctgccaggcgtccctgcagctcctgcctgcacctcctcctactgctctccaccccacgaggcagcccattctgttcccagccaaattccaggggtcaggaagttctttctgacattcaggcaaaatctgtttccggaaaatccaagt

SEQ ID NO: 63471 - DNA, 1015 bp, Bovine  19866881206199
  misc_feature (1)..(1): n is a, c, g, or t
ntgttctccggaaggattttatttttatttcctttttgctttgctttttttaaacaaacccttgtatcaaagtgtttttttaagtaaatgaatagatgaatacgtaagtagcaggggacagctccaggagacctgaactaaatgccagagtatggagggaatctggactcggaatcaccttcatgcagaaggccctgcagagtgggaggacggtggggctccatggcctcccctcctccccagctcggcctttcccagtcactcagttaataagggtctgctgtgaggctcccagggaagcggagagagccagtgaacccacagacaggccctcagcagacggggacgcgtctcacccaggcccctgcccgccgccatgtgagggtgcaaacgtgcataccccctcacccagggagtgccttctcacaccagagaggtgaaaggtgcacaaggcgctggcattacagagccacgatatatttttttttttttttgcagtataaaaatgtataaaaagttccgaaagtcaaaagctttctcatcaatataggcgccaaaattcctgtggcagcaaaaactgacatgaactgatgtgagtctgtttacatcttaatttatctcacttagtgtgaacagtcaaacgtcttgctacacaacatttggttacagggtactgcccccaaccctgctggagaacttggtggtatacgaaccatactacctttcaataacccagaacattccaaacccagaacacggacgcggaagctctggaggaggagctgtggacctgggacacgtggtggcgagcgggctgggcagcacttctgacttcctgtcactcaagtctcagcctgaacttcaccttcttggaggtcatctcatcacaccacagggtctctccttaaccacagcagtaaatccaaagaggtatttgatacacactgtttctttctgggtttagtgtatctgtcccctgctctacccctcgcccgccacacccgccaacaacaca

SEQ ID NO: 63472 - DNA, 812 bp, Bovine  19866881219510
  misc_feature (1)..(1): n is a, c, g, or t
nattaggcgtatatacctgacgtcaaaacaggctggtcttagtctattttccagttgattttcaacacgaaatggcaaccatcttacagaaaaacctgaaggaacttttcagccaacccaatattttggccacccagtgggggagggcggaagtgcctcctggattaaattgcaaagtcctgggtgctggaaagattacagggacagctgggctggggggggttggaatccccaggttgcagggctgtttctggtgcgcgtgccagctcctgcctcccctacaacgcctgccacctccttccacgacccgggtgcgcccagacttcaagatttctccagcagcgccagaaatgttgcctctgtctcctctagcccgcccccacctcacccagcctcctctttccctcttgtccgcattctcagagcttcggctcaccatgatttgagcagcagtgtcacctcgtgagcaggtgcctaaaaattctgcctctctgaggtgccggattatgtaaaaccaattaagcccctgcctttattcctttggcgagtcagccttcccgcatgctgatctgatttgtgatggagcggggcgggggctggggggtggaatatgtatttagggaagacttgtcaagagcatcagggcctctgaatcattcttcctcttgccccatctccccgtgtgtgacatattccatcactgctctcagtgccctacacggcaccctgagatgattcttcttccaacgcgacagcgaggcagtgttcttaaaatacatccctggtgtggggcctcggggagggccagtcca

SEQ ID NO: 63473 - DNA, 1106 bp, Bovine  19866881278781
  misc_feature (1)..(1): n is a, c, g, or t
ngggaaatgggatccggaatccgatcccctggggcagagtggggaccataggacaggggcagggacctcaggaaatggtgatggagtggctcctggtgtcagctctgcccaggaccatggagaccctgagagaatcacttcccacctctgtgccttggcttttccatctgtataatgggagagtgggagatactgatctctgaggtctctttcaaccctaggtttctgggaatcttttattccaatctggttacagagaggcaaagggtatcatccaggcaggggattgtggtccctaacaaatctttttttaaggcttgatggtgataattgctcacctccccggccttgtctctgtgtcccccagccacactcactggctttcattctctcccatttggccacatttgctcagggtttgggctggtccctctcatctagaacatctttgccttcctcttctggatagctccctcatcctctctagaaagaccttcctgccgccagatggacttagaattccccagtccacagtgctactaattgccattaaatgatgccatgtacagtgcgttcagcggccgcctcttgtgccatctcgcagggtccgtgtgggctggccttattcaccagcacgtccgcaggatgtcctgtgtagtgcaggcacctggtccttatttgagcaatgtattgagatgctccccattcaaacaggaccagcgccttcgccaacctgcccatcctgctcccagggctgctggcaggccagtggcgcttgcctcttatttacctgcattgacctgagagtgactcagctccattcagcagagctgtctcctgccaaagccgttacagtttcttagctccaggcagagacagactgcagatggcttaatttagaagcatctcggaaggaattctttgctccacagctcttcatcctttgactctgggggtctgcggggtcatgaccacacgcgcttgaggcctgacttgtggttaggaccctcatctctggcggagctgctattttgggaggagagagtgtgcaggcgggcgggatgggagctgccggtttccagcagggcctttcccttactcatttc

SEQ ID NO: 63474 - DNA, 907 bp, Bovine  19866881405472
  misc_feature (1)..(1): n is a, c, g, or t
nagtatggtttcagtgtgtctaccctctgatggcctccttaggagagcactgtcaaaggaagtgaaagagcaagtaggcacaaactggttcgggaacaaatactattatatctcggagtacaagaactggagaacttcactgggaatgttttaattcgtcagagtctacccttatggacagctttcttgaagaaatgtaactagcgcggcggctgcaaccggcgcatttagcacagctgaaaggagctaccccacatccgaggtcaggggcagaagccgggaggaccccatgcccaaggggaggcggccaagaggagttaccctacgtccaaggtcaggggcagtggccgagagtgccaggctgcgacggcgcaggaacggccgagaggaactacccacgtccgaggtcaggggcggcggccagaaggagctaccccacgtccgaggtcaggggcggcggccgggaagacctaccccacgccataggcataagacatccccagaaatagaaaaaggaagtcaataacactgcctgactcctgggaaaaaagagaggaaagagacttttcaatgaatcctttcaaattttgaatcatgtaaaagtatcatctattaaaaagtaaaacaaaaatatcctgaaatattaggtaccattcaatgtgaatggaactaaaaagtgactattgctaacagtcattgctccccttaaaatacttcagcagctttccacttccccttgagataaagactagacctcctggaggccctgcgtggtgtgccttatccctccttccattcccatccatcctctccacagcagccacgctggtattcttgcagcttttctaaaaaactatagtctgactctcttctcaaggtttttacataagctagacattccactttg

SEQ ID NO: 63475 - DNA, 1555 bp, Bovine  19866881407399
  misc_feature (1)..(1): n is a, c, g, or t
ntctgggagttggtgatggacagggaggcctggtatgctgcagtccatggggtcacagagagtcggacatgactgagtgactgaactgaactgaaatttcagtcatgcgatcttcatcatatcaaagctgagagttcaggattttagaaattatccagtttgggaaattcactgtacaggtagagaaactgggcccactgggattgagtgacttgctcaaagtccaatagctaaggggaggactaatataggaccaggtcttggaactttgaagcagtgctatgcttccatactagtggttttcaaactgggttccttaaggcaccagaagtccttagaaatatcatgaagataaggtatgcctcaagaataaagataaggaaagggatggtcagagagtagatcctcaggccctcttcaaccaaaaacagctctatttttactccatttatattgagacttgagtagttgtcttttaagaagaggttctctgcctctgccaaagtttcaaaaacctctgtgtgtatactaggcacattaaataatcatgagaggcaacaaacaaacaataaaaatcccaaaacaaaacctcacccacaatcacagtggtacaaatgagatctttagagatactggttagcaaaacccaggttgatacaaacattctgtttcctgtagatggttgcggtggccgggaggaggttaggacaagaactgcctacaacaaaacatagtctagaaatctgcatctgagctcacttctcaaatatagcctggcaattataggctctgggcacaaggaggaaaagaaaagcctgtcctaaaatgtatttctggcatcatatcaggaaccacatgtatttacaaggaaagcacacactccgtggttgataatgatatgcctggaagattggatcctagtcctgattaagttcttcagctacacaaataaaatctctccattgatcgagaccaaaactttcagttaccactctccaaaatgcacgtttcccagcctagtgaggcaacgccctcaatattcaaaaaaagtaaccagatcaggattcagaaagtagaattcaacaagaataaatggattaaaagctggttgtgaaaaagcatttgtctaggtctgcaatatcaatattaaaaagtgatagaattttcataaacacacttcttccactccaggacagtgggtgaagagggaataaagccccagaggagtacattcttttagctccctaactttctccttctgtcctccaccctccaataagttgattagaaagacatacatactggaacttccttggtgatccagtggctaagactccctgctcccaatgtagggggcccagattcaattcctagtcagggaactagatcccacatgccacaattaaagattctgggtgcttctaggacctgttgcaaagaaagaaagaaagacatacaaaatgtgtttatatatcaccttggtcccctcaatgggaaatcttacttccactttgcttgggtcattttatttcactgcagttcagcatttctgtga

SEQ ID NO: 63476 - DNA, 1291 bp, Bovine  19866880037003
  misc_feature (1)..(1): n is a, c, g, or t
natgaaattaaaagacgcttactccttggaaagaaagttatgaccacctagatagcatattaaaaagcagagacattactttgccaacaaagtttcgtctagtcaaggctgtggtttttcctgtggtcatgtatggatgtgagagttggactgtgaagaaggctgagcgctgaagaattgatgcttttgaactgtggtgttggagaagactctgagagtcccttggagtgcaaggagatccaaccagtccattctgaaggagatcagccctgggatttctttggaaggaatgatgctaaagctgaatctccagtactttggccatctcatgcaaagagttgactcattggaaaaaactgtgatgctgggagggattgggggcaggaggagaaggggacgacagaggatgagatggctggatggcatcactgactcaatggacgtgagtctgagtgaactccgggagttggtgatggacagggagacctggcgtgctgcgattcatggggtcgcaaagagttggacgtgactgagcgactgatctgatctgatctgattcacagtctcattgtctagcccagcaccataaccacagtttcaggtgtatctgacactttccccttgagtaaaatctctagcctaatctctagaccacataaactagagattttacccaatagactgtgtgaactccctcatatcaaagcctgatgccgtgctaatttttttaaaataagagaaaacaattataaatcaagttgttttttgtaaatctaattcaagattcccttgtatggagagaaaataggaatgtttatgtttaatggaggctataatagtaactgtcagatgtagactaacagaaactattggacagattctatgtgggaaataaagtactaacatattgctttaagaatttgcaaaaaaaatatagactactacaatacaaaaccaagaaacaaagaaactccaccagaaataattaaatgactgtgggtaatagtgtaaaatattcttatttttctatctaaattgtatttgttcatatgaactattgagataaatacatctatccatgtgtctgcaaagagacataaataggtcagcatgatttggaggcttttcaaagcagagaatgcaaaataattctttttttttttttttttatctcctgtttctcgaagttcttaccagacttaaagagaattgaaccttgagtaatagctctattagagctcttttccaggagccagttcctgtggtctcttctgggtccagctgctgatga

SEQ ID NO: 63477 - DNA, 742 bp, Bovine  19866880187430
  misc_feature (1)..(1): n is a, c, g, or t
nttgaacctgtggtgttggagaagactcttgagagtcccttggactgcaaggagatccaaccagtccatcctaaaggagatcagtcctgggtgttcattggaaggactgatgctgaagctgaaactccaatactttggccacctcatgcgaagagttgactcattggaaaagaccctgatgctgagagggattgggggcaggagaaggggacgacagaggatgagatggctggatggcatcaccgactcaaagcacatgagtttgggtaaactccgggagttggtgatggacagggagcctggcatgctgcgattcatggggtcgcaaagagttggacacgactgagtgactgaactgaactgaagtactttcatgtggaaatcaaaaataacagaacaagagcagactagggagaggacatttttcccagtaaaattttccaaatcaacactttcatccagtttctgacatcagttctttgagtgggcatcatctacctaatgcaaaacatggagaatgtggctttgctttgttgagttgcaaagggaaagagcttttgttcagagctgtagacaagtcagttcagtccacataatctattttctcctttaattctgaaatgcagcccatgctcatttggtagtgaggtgttgtacaagaaatgtttttcttctccttctttaaggtgacttcacatcaggtttcaagtgtgttacttcaacctcaatgcatgggggcagg

SEQ ID NO: 63478 - DNA, 1935 bp, Bovine  19866880343217
  misc_feature (1)..(1): n is a, c, g, or t
ntataaacatttatcggagcagtaaggattttggcacagtttatcctcattattcatggattctatatttgtggatttgtctacttgataaaatttatttgtaaccctaacgtccacctgatgggaatagctaactcattgaaaaagaccctgatgctgggaaacattgaaggcagaaagagaagagggcaacagagaatgagatgtgtgaatagcatcaccaattcaatagacatgaatttgagcaaactccaggagatggtgaaggatatggaagcctggcatgcagcagtccataggggtgcaaagagttggacttgacttggtggcaacaacatgacttgaacaacaacagcaacatccacctacaaggacacaagagtcccaatagaggaatcctccagagaatggttttcctagaggttttatttagtacacaatgacaattctgcaagctcaggaagagcattgaaaggtaaagaactaggaccccagttcagtagttttggaagcaaagcatccatgtaaatgtcatgatttgctggcacctaagcaataaggcagaggaagcagagatcaaattgccaacatccgctggatcatcgaaaaagcaagagttccagaaaaacatctatctctgctttactgactatgccaaagtctttgactgtgtggatcacaataaactgtggaaaattctaaaagagatgggaatacgagaccacctgacctgcctcttgagaaacctatatgcaggtcaggaagcaacagttagaactggacatggaacaacagactggttccaaataggaaaaggagtacatcaaggctgtatactgtccccctgcttatttaacttctatggcagagtacatcatgagaaacacaagaagcacaagctgaaatcaagattgccaggagaaatatcaataatttcagatatgcggatgacaccacccttatgtggtgcagaaagtgaagaagaactaaaaagcctcttgaggaaagtgaaagaggagagtgaaaaagttggcttaaagctcaacatatagaaaactaagatcatggcatctggtcccatcgcttcataggaaatagatggggaaacagtggaaacagtgtcagactttgttttttggagctccaaaatcgctgcggatggtgattgcagccatgaaattaaaagacacttactccttggaaagaaagttatgaccaacctagatagcatatttaaaagcagagatgttactttgccaacaaaggtccgtctagtcaaggctatggtttttccagtagtcatgtatcgacatgagagtaggactgtgaagaaggctgagcgccaaagaattgatgcttttgaactgtggtgttggagaagactcttgcaagtcccttggactgaaaggagatccaaccagtccattctgaaggaaatcagacctgggtgttctttggaagaaatgatgctaaaactgaaactccaggactttggccacctcatgcaaagagttgactcattggaaaagactctgatgctgggagggattgggggcaggaggagaaggggacaacagaggatgagatgggtggatggcatcactgactcaatggacatgagtctgggtgaactccgggagttggtgatggacagggaggcctggcgtgctgcagttcatggggtcgcaaagagtcggacacgactgagcaactgaactgaactgaactgaagcaataagagagatggaaagagaaagaagtttgggtgggttcatcaagcagggaggagaaaattgatccaaaatgtgggctgaagttttcaaagtgaaaatgtctttcttttttgtaaatccagatagtcatgttatatatcagctcgtatactacttctctgtgtgtgtggtgagaatattctcttagtaaatttcaagtata

SEQ ID NO: 63479 - DNA, 4249 bp, Bovine  19866880410603
  misc_feature (1)..(1): n is a, c, g, or t
nctaaagcttaaactcccagtactttggccacctcatgtgaagagttgattcattagagaagactctgatgctgagagggattgggggcaggaggaaaaggggacgacagaggatgagatggcttgatggcatcaccgactcgatggacgtgaactccggaagttggtgatggacagggaggcctggcatgctgcagttcatggggtctcaaagagtcagacacgactgagtgactgaactgaacttgaacccatcattttaaataataagtgaccaaacatagtgatagggcttcccaggtggcatgagtggtaaagaacctgcttgccagtgcatgagacattagagacatgggttcaatacctgggtcaggaagattccctggaggagggcatggtgatccactccagcgttcttgcctggagaatccctggagagagcagggtcgcaaagactcggacatgactgaagtgactttgcatgcatgcaaatatagtgaaattaaaatgctatgagtgaatctgaagggtacaaggggtggctcaaaacagccctgcttttctctccccatctcctcttggctcttactgttctcatacagcttcttaagtgagagcccaaaggtctgagctagtgctgaagcgtgtgtgcagtcacaatagagaaggctgccagaagtgctggagaattaatgccccctctcccccgccccagaacaacaaattcttcaaacaatgacaacaaacaacagcaaaagtcttcaacaaatgatggataagagctgaaggataaacaccccagctttctatacttctggttagaacaactcacagagatgaattacatagtccctcagaggtcttcatcaggatggaacttcagttgccaataacagcaatctgctcattaatatacctttcttgactttcttccccatgctgactcacttccctactttcccaccaacgttttcttgaatcatttgccaaaccaattactttcactcaaatccttgtctcggggtctgtttcttggggaaactgatctaaaccaattttgcagaagaataggaggactatcaacccacagaaaaatcaattgggagatatctaccagaaaatatgtaccgcagataaggtgttttaaaagttttaattaatattattcttaatatagaaagaatgtaaattcccacaattaatcatacaaaacataattgtcaatattgagagtagttaaaagagacattagaataggaagagattaatataattttttaagcaaaggtgaaatattagatgtgtttgtagcaggagatttttcttctgggaaaaaaaaggacatgctttagttaaatatctgatttacattttattcttttgtaaaatcagggaaattaatgatttggataattgttgatggggcagaagcttttggcactaatcattgacaaaatgtgtttcttctaagatttgttacaaaagacttttctgtgttacaatcagcaggtcgaacataaaaataatggtaagaatcgggcactattggatagtgtgtagttagaaaactcactgttaatcaccattcatttatgcatttcttgaggatgctgtgcacacaaggatcttctttttagttgttatttagtcgctaagttgcctccgagtctttgcaaccccatggactatagcccatgaggcttcatccgtgggatttcccaagtaagaatactggaatgggttgccatttcctccttcaagggatatttctgaatgacccctgaaatggaaagagggatctgaatgaaaagagttgtctcctcaattttagtgctgctgccagaccaggactgaaagcaatagaggcaaaggactaatggtccctccaggtggtccaagaagtgacctatggacaaaaaccccagagcctgaatgtcctcaggatatgcttttttcaacctgtgccacactgcacttttgctttctccacaaaagtgaaaccatggcttatggattacctcccttccttctaattaaacatatgtaactactcactaatattttaatatttaaaatactcaagctaaaaacaattattaagcaattcaattcctttccctcaatgaatagaaaacacttcattgcatttctagacaagcatgtaagcaataagtttgctagagtacttacaggacaatcataggaaacaaatgcccaaatccaattagtatgccagtaaacacttgtcacacaaggcaacaataataattacaacttattatcctagaggaaatataaaaaccaagaggtaatcaaaatagcccaatgcactgtagagaaaatctaccacattcatttctttgcattgtcaaatatatgatcctgaagtttttttaaaaagtaagagaatccttcaaacaatggatagtcccagtggaaacatttttcaaagtctgttctccaaactttccttatattttcaagttcataaaaaattcccagtaaatagattttaattgcacttaacatcaaattaacccttccccctagatattccatattacctcatgaaatagaaaacaattcatatctagcttgcctctaactggaagccacagtctaagattctatttgaaaaaagcaagaagtcctccaataggttagggtaactaaggtaatttaaatatgggtgaatacaggaaaaaattcccagattcccttactttctttgttgaaacccattcttttggaaaatcattttgtttaggctttggacaacaaaatgcatcgtcaagaaattttatagcaataattataaaagatgtccatttgaacccattgaggtctcactgattttataacacccagcagacctccctgcaggagaacactatatttatgtgagcaatatatgcgacaattgagatcgtaaaattaaatgaccacatagaactgtcatttatatgatgagcgcctacatatgtgatggctggtttattttgcagcgtcaggttgcgttaaatggtccactctcagtgaacggttttaatcacgcatttcttcactctttctgcaatattacacttgaaggactagtaagcagtttgctatgaaatgctaaatggttactggcactgctattctgacagaagagctcactaaaatagaagtacagtacatattgtatgcaattgttttatgagggacattatggttactagaataacatttcacaattaccaactgctgagagaaaagtcattaagatatttggcgagccagtgcaatttttcaacagagctatagtacaagaccttagaacggcttccatagggggagacaggctgtttcacaagagaaaaaaaataagtctcaagtctctgttgtttgatttataccatgttatcttcagagtccagtgaggaagttatagaatgttgtcaggagtgtcgaatgatggggaatacttacataaaatatatgtatattcatatacaataatttatggtatatgtgtgtgatcctggtgtgtgtaaatgattaacctcttgtgataattgttaggacaatgtcaatgtactaaaactcagcttttcctggggaaatactttggagattaacttgtgtattttatacacctaatttcttttttttttttttaactgaaaagatatttatggatgggggaggtgagagagtagagatccacctgtaaacattttacccaaataaggaggataaaaataagtagtttgctgtaagcattttatgtttcctgccaggactattagtggttaaaaaaaagtgatgataattttataaatgttgtgtgtagatatgtatattttatgtatataatgtgtatacttgaaatatgaatatatgtatgcatataatatatataagatagatagctttctgatctctgaactgacaaggattgtcctctgttactgccaatgctacttctattacttctatttttaaagtcgggaaaaaacaccagcattcaccgaaaacaaatatactctggtctgtgcttctacagtaacaaaaatagaccaaattggaattatcgatttggtatgtcagtatgtatgtgtgtgtatggataacagtgaaggcaagtatgtcagtgtgtatggataacagtgacatggataacacactgttgttaacagtgtgttatccactgttatccatggataacagtgacagtgtatggataacacactgacagtgtgtatgg

SEQ ID NO: 63480 - DNA, 2595 bp, Bovine  19866880438151
  misc_feature (1)..(1): n is a, c, g, or t
nttaaaaaaaaaaaaaaagaagaaaattctcatggcatttgattaattatattgcagaaaccatatctacttctattgtgaatatgaactatcatgtagcaaatgttaatcattagtaacgggtctattccacaactcacagtgaaaactatttcagcaccatataaaagacatcatattatccatgcagcttgccaaaaaatgaattgatttggcaataaaacaatttctatttacagtctatttacttccttttatgagactgactcaatattttctgtttttttccttctgttttattgttttgccaagaatttttttttgcaagattttaatccttgctaacagtttgtacttagctatgttgaaagaattaaaaatatttacacatcgtcaaaatttacatacctcaaaaaagtactatcttttgaggttctgaagctacttgttttaataggaattagtttttattcttatcaactattgcctaaaattgaaatcttgaatatattttgacactacatataactattgcttttatttgaaggatactttgatatataaatgaaaagcctatattttctggtctctacatagtaaaaaaaattatatttatacagttatattaattccagaatttataattataatattttaaaatcattgaaaataaataactgaaaagaaaaaaatagagtcaacaccctcatgcaatatacctactgttctatggaagcaaatgaatagctaaaatactagttgccaaatataatcttgaatctgagcttacacataggtgggagggcatgaaactacatttagtttctttaaaaagtacacgctttcattttcagcatccacagtttttattatcaccataggagtagagaggcataatgtttggggtttcttttctttcttgtttcttattcttttttttttaacttcttttaaaatctcatgcctgtgttttcttttcctttgcagttcacccagcatagtgctttctgaaaatacacatgtaattcccattatctataatgaaacttgcatgcatcaagaagagatcagattccactgcaaagtatgtttcttgtgtggtattgtgagcacctggtctacctcatgacaaactccttggatactttgtttatactcagggaaggacattctcatctacaatatagaaattctccagatggccacctgtcttgccacatggcaaaatcatggtactttattttctcatgtagacaaatatttttacaagaactctggagtgtgcttcatgggagaattcagacgtggatcaaaagcaactggtgtacaaacgagcatcaaagaaaatgttgcgtgtacttagtgtctagtactcatcattgactggggataaggaacaacccttttgtcaaatttagaatccaattatatcttatattctaaatttagagccagtttcttgtctttggttttctattttcaataaccaatatcagaaactctgcatttatcacagatgaccagtcaattggaataattgttttctccaatgtatatgccacttacaacatcactggggatttatagttattttttacaatgaggaaactgatgcacactgttttagaacaacttaaatgagtatctgtagccacataaactgacggcagagcctatactaaatttaatggtaaaaactaataattccatttgctgcctgttttgcttaaatactccttggtctcaggggaagaaatcccaacgaggattcccataatagctttgcctttctaaactgtttatgtcagttcagttcagttcagtctctcagttctgcctgacactttgcgaccccatgaaccacagcacatcaggcctccctgtccatcaccaactcctggagttcacccaaacccaagtccatcaagccggtgatgcaatccaaccatctcatcttctgtcacccccttctcctcgtgcccccaatccctcccaacatcagggtcttttcaaatgagtcagctctttggccactttgagtggccaaagtattggagtttctgcttcaacaacagtccttccagtgaacactcagaactgatctcctttctgagtgatcagaaaaggactgatcactgtccctttggttggatctccttgaagagatccaactggttgttggatctccttgaagtccaagggactctcaagagtcttctccaacaccacagttcaaaagcatcaattctttggtgctcaactttctttaaagtccaactctcacatccatacatgactactggaaaaagcatagccttgactagatggacccttgttggcaaagtaatgtctctgcttttgaatatgctatctaggttggtcataagtttccttccaaggagcaaacatcttttaatttcatggctgcagtcaccatcagcagtgattttggagcccagaaaaataaagtgacactgtgttccactgttttcccatctatttcccatgaagtgatgggaccagatgccatgattttagttttctgaatgttgagctttaagccaactttttcactctccactttcactttcacca

SEQ ID NO: 63481 - DNA, 1394 bp, Bovine  19866880446434
  misc_feature (1)..(1): n is a, c, g, or t
naatatcttcagattatctcttcgcataggcaatgaggaacacgggaggttctatccttcaggtaattacaggcccaagattttcacaacaaatttaaatttacagggaggtggtgattgttgggccaagcctcgttttttaggagaaatggaacgatccagatctgtccttggagttgttttcctctgacctctgcccctatcccaacatatatcctgagcctttcctacaagagggaacagttttcttagacatactattggaggacaggaaagagcagctttgtgtcatatcatagaatggcccctagaaggtagcacatttcctgaggaggtaaactttttatggtttaatttttaattgctcactcaacatctccacctcaatgcccacaggagcctcaatgtctctatgccccaactgaaaacgcccaccttctccatctctatggtacctcccttctcccagctactcacttcaaaacttcaatgagtgagagcttcccaggtagcaaagtggtaaagaatctgtctgtcaatgcaggagacacaagaaacatgggttcaatcccagggtcaggaagatcccctggaggaggtcatggcagctcccaccagtattcttgcctgggaaatcccatggacagaggagcctggagggctgcagtccatggggtcacagagtaggatatgacttgactgagtgactgagcatacacacacacacacacacatacacagtggagagaagtgatctggcagacactgccttacccaaatgctttgaatgtcaggatacatgtgtggtggtcggagaataacaggaataaaaagcagaaacttccttttaaagcattaaggaggttgggctgaaaacatccagtctgacatcaactaatcccaggtagctacaaaatgactggtttttttattttgcttgtaatgtgtcctcaggaaatttcaccaaatgaataactaaaacaagcccatatgggcattcttgaacatctctagtctattacaatgaggagagcacctgtttaaaaatagtctgggtgataaatcacagaaggttgcattaatcaaggtagcctagagctgataagtgcaattatgggtttgtcaccccggggaaacatcttgatcagagctcctcaaacccagtataaaccctcaaatttttgcccaaagacgcatgtacctaatttggggacttagcacatcttatccatagggtattgaaggccttctggcaaggccttatccaatatccacagtaatgaaaacttattctggtgagatctattaatggcgttatgatggactacctctacaacaaggggcagcagtcttcacacatcacaggtgaaaagaaacagaaccaaaaaccaagc

SEQ ID NO: 63482 - DNA, 815 bp, Bovine  19866880568010
  misc_feature (1)..(1): n is a, c, g, or t
naggtcttttcctttactttcctaaacatgtttttcaattggtttcagttgatttagctgcctcaagtggagtacagcaaaagcataactgccctgaatatgacagatagctagcagctgttgttgaaaaactgacactgcattggaactgtctcaacagaaaagctgtgctttgcaaaggcaacatgctctgaaatatttgtgtctgtgatatgcttttgcatgaagtctctcctgatggaaaccctgagaaggtgcatttgccatcttcagtttttgaatcatgaaactttccaagaaagcaaagtaaaccaagagatgttatgtaagtttatcaattcaggctcaacattttctacagtaatttcatagatatttttgtttcctatactgtatatcacaacagactctatctatgtacgtttgaattcactttatgatttttggcctgatgaatgtgtcattttcatgtaggtagataatatggcaatatgtaatgttaagtgggtctttgggaagaaaatggaatttataaaaataatctaatccatttagatatttttcagctcatcttggtgatcttttaatccaagctttttcttaaatactgtatttgcaatttaagcactgccacatgctgccacccgctgttacaaagatacattagattgatagaatgatgctgcattctttatgactggagaaaataatgacttcctctgttctctctaatcatgtttttatgggttggtttccaaaatactgcatacttgaccttaaaaggggataaagactgcacatttcatttaacgagt

SEQ ID NO: 63483 - DNA, 1939 bp, Bovine  19866880641329
  misc_feature (1)..(1): n is a, c, g, or t
naagccagatcagacttgctgagagcaggtgcatgttgaatacacacagaacttccaagacttgatgccatgaccatttcacaatggacctgtgaaagagttaccagggtgccagcaataagaagctgactgatatccaagctgactgatatccatgatgaatcaagttttctacctaattattaagatccttcttcacatatttgaagccctatagtaatcatgtatgtagatcataaatattttgcagtcagtgccccatataagaggtctgtctataataccttatctctagacctcttgcaaccaaccttccaaatgtgtacatttcaaatccaagaccatctcatcaatccattagctacagttcatgaatcagatacatctacactcaggccatccttccttccatgcaaccacatggatcacctaaagtcttgtctattctggggattccttttcaccactgtttttcagagccaactgtgagaggagctatagttcagtagctgcccctttctggctcatgccaattctaacagtatgaagcagaagaaagcagaatcctatcctgatacttaagccctgtaactatcctgataatttctaatttttttcctcagatgtataaaaagtgaaacaaacacacacatcactctcacacataagcccataccagctttgtccctgaactagatcctattgtttcagaaacatttcctatcaggcatcaagcattaagagtcaactataaattaacctttctacagaagtagaaaaaggcagcaataacattcctaagatgtacacattttcttaaaaattaaacattgttttagagctatgttggtttccctcccccatttccatcacaagcaaacttactcttactggaaaggataaaactgatgtcaggaaaagtaaacagtcctcactcatgtaaacaacctcatctgtaattcattaactctgctgctctcagcctcttagaaaaagtgtctcatttattagcttccaatcccaagttcatgtttgtcttccagttcaggggtattattgagcagtaaagaaaagagatgttctattactgatgacatctcatacattggagttaccaatctcacccccagtgatgcaggtttttaataaataaactcttttgatctctgtccgactaactatcccactctccacattatttatatgccctgcccactaaagaaagtagaaaaacacatttactgaggcaccccactccaattgaaatagcaacagccactgaagaacagcaatgcctctcacagtgagcaatgctattggtatttgacatgattttacttagtaagcgagactactgatgccagatgatactctagccaggaaaataatgatattaaaaattataataagaaaaattgtttccttttacattttccttcaatcctttacaactattagagaaaaaaaaggtctcagtttggtgatagtctttaacacctaaggtttaactcagagagagcaggcttcatgctcagaacacttggtgggcaaccacatctaacaagaacttattgtcattattctgtttttgttgtctatttatgaaaagtgtacagtccgtttagtagagagagtgaggtttctcttttgataaacttatgttttaaaagcaagttattttaagcaaaagtgttaagcaaataatagtgcaggtgatacgtaaatacaatgaacatttcaaaatgggagtataaaagaaagaaatattgaaaacattgcaaagtaaaaaaaagacataactctttatggatgtcatccagaacgtagaaattactcaatatggcaggtgtttgtgtctggtccgtgtgtgtgtgcacaggagaggatctaaggttctgaatcttcctctatgtcccatttccacatgatgaaaatatca

SEQ ID NO: 63484 - DNA, 904 bp, Bovine  19866880681960
  misc_feature (1)..(1): n is a, c, g, or t
ncaaaagatacctgaattgagcctgatttactaaaagaaaaaggcatactagtgtgagaaagcaatgatttttttctttttttttttaattcccaagttaaaacagaatgcatttaagcataatatatgtctgtgttttaaaatgcatatggaattctgggtttggggcagggagacatcacttgatttcactataaatttacccatctggatactagaagtgagacatttattgtttactcattcatccaatcagagaagataaatttttcaaattgcagttatatcaacagatacagcagagatcttaattagttaaaaatcttcataagtgtcatttggctgaacgaataaaataacaagagcaacaaaaatatctccagccacacaacaagccatctaaaaattctctggggatctattcctcacttctatagcaaagtaacacatgtaactctaccacaaatctaaaggcaaatagatattcctgttcactttttcttacaagaaagcatctgcttacaattttttttttttttggtgctgttatttttctcttgaatgtttcaattcaaaaacatcaccctaccacctttttggcttgttaaatctctctgtccttagggctacatctctatgcaccagagaaacgatctcattaacaaagtagttctgtgcgtccttaatcctgaggccctagactgcagctggaggcagttctctactcagcccgcagtgccgagtgacacaggcaggcgacatcatctgagtactaacttctactacatccagacagactgcgagaaccatttccaaatcgtgggaagacgtcagagaaccaaaggtaatccttctgtttctatgtccaatttttgcagcaaagatttccaccggaaggaaccat

SEQ ID NO: 63485 - DNA, 1583 bp, Bovine  19866880684968
  misc_feature (1)..(1): n is a, c, g, or t
ntatgttctgaaaagtgcaccagtagtagtatataggtatatataatcattagatgacaggtataagatgctttgggatgagcagaattcacattaaattccagcacgtaatacgttaagttttgaatgtagtcttatttatttaaatctgcattctgatggtctgactttcaaagaggtaacaaatatctgtgatccaatgattacctattcaaattaacccagcttctttgaatatgatctaatgattgaatgatcctccaaacactgtaagtccttggggaaatatactgatgtccaagcacattttctcaaggcttggagaggactagatctgccaaggagttgccttgaagcatggacactctgctctacctaaacacaagtcctaggctttaatcacaatggctaggttcacactaaagcaattaaccatatgattgctttcacaggagcccaacctcatcagtatctttccttcaggctaactgacaagactgggtgtagtcaatgtagtcaagtgaatctgattacctaagaggtataaatctctcaatacacaaatacgggtaggactattcaccctgaatctagtttttagaggttgcccttttataatcaaccctatagatttaaatgatcagggtaaaatatttatgaggccagagttggcaagttttacaaggaagattgcgaccaaataacactctgctatctagattgtggggtttttgtttcagtttgtttgttttgatctttttagcaagaagtgagtgagctctcaaaatctaaaatagtaagatttactttgagaatttgaaagaagtaaaaatgcccaagaaatataatttgtaatttaatagcaactttagacaaggtttgaagtgtgtgtgtgtgtgtgtgtacacataaacacatatatatatgtatatgcctgtgcctttttttaggcttgttaaatcttgttacttcactaatcattgctggatttggtggtatatcaagtgtgaacttgaaactttctagcatcctcttcttggtatcctattgggaagttcttgccagcatgataacaggatttttggttactacccactagaattatttcttcaaaagtgttttcctagcttaaaagctgaatataagatctgagcaatgtaagttttccaatgggtttgtcatttctcagcaattttgagattatcataaatattccttaaatgcagttaaaatacactagacaccaagtgacccacctcccacactaaggaattcatgcttctggtaggtaggtgccagaaatctgggaggttatgtggtctgatgggcctcactgggatcatatcccattctagaatgccaatgtacatgaatgctatgaaaaacttgttggaatcatgaaactgacttcccaaaagatttctgaaattgggaattcaacagtttcatcacctccactaaaaaaacggtaatccatggaattttagtcttgatgttgggaccctcttaaataaaaacacaccaataacatgaagatttttttctttagggggttaaggtagtttgtcttgaatcaaacatga

SEQ ID NO: 63486 - DNA, 710 bp, Bovine  19866880709521
  misc_feature (1)..(1): n is a, c, g, or t
nggacttatacattttttaaaggtcaatagaaactgttttgtttaaccctattatcatacttcacacagctgagctatctgctttggcctgagggaagtgtcaaaatgtgaccgtaaaaattgactatctttttaaaaggaagatataacacagtaagttttgaaatgtgattgagattcatgtctgtgatattttgctcttttcattacactaggaaggacttctaaaattctagcctttaggagccttcaataatattcaaaaagatgacagtttctttaaaagccttcaagaaaaacaaaaggaagatcagcgaccataagctaaccctgctgctgctgcgtcgcttcagtcgtgtccgactctgcgaccccacagatggcagccaaccaggcttcccgtccctgggattctccaggcaagaacactggagtgggttgccatttccttctccaatgcatgaaagtgaaaagtgaaagtgaagtcgctcagtcgtgtcagactctagcgaccccatgaactgcagcctaccaggctcctccgtccatgggattttccaggcaaaagtactggagtcgggcaccattgccttctccaaagctaaccctagtggcttgaattgatgtccttattctactcagatcacaaagtggtagaacagcttctaatcacgtatcagtctcttttttgcaggtagaaaattcatgca

SEQ ID NO: 63487 - DNA, 1079 bp, Bovine  19866880790090
  misc_feature (1)..(1): n is a, c, g, or t
ntgagtggattcaatcttgaaaaaaattctgatgctgagctgattttgaaaaatgatcttcttccatgttggaaaagtttaaattgccagtttaagcctgttcaaactatttttatcacattcttagtaatttcccatggaagcatttctaaaggctcagcaaaacatttataattttataaaaccttttaaattaatttataacttagctatgagcttcttttggggagactcaaaacagtaggtgaccttatatccataatgtgtatacttaaatgttttattacagcagagtgaattaggatggaattatttaactttccataccaacgtttcatttaactacagtcagcttggtgctttacataaaccgatttaattctattttatacaactgcaaggtcgtttttgtatgttctaactgttttgctttattttcaactgtagaatggctttaggtagggagtataagaaaatactgaccaaattgaataattctcttggcattgtatcccattagacgtttaagaagatcaatgttttctcctaatcttgattagtgagacataacatatacctgatttctcctcctcttagtccacccttttttatctcagctgttaccatgacaaccaattgtgtgctggtataacctgacagcacattgctccagcccagtcatatctcctttactttctctcccagagcttctttacgtacatttacctttcagttctgtttgtcttctaataaatgtttacagggctgtatattttcctctgtgtagcatttcaagcacattcacatgataaactggatagatttctaactagaattcattattttcattagaattaattttagctttgatctcccaatttaacccaaggggttatgtagaggagtcttcttaatatctaaataaatatttgcctttatttgtgcagtccactggagaaggaaatggcaacccactccagtattcttgcctagagaattccgtagacagaggagcctggtgggctgctgtccatggggtagcacagagtcagacacgactgaagtgatttagcatgcat

SEQ ID NO: 63488 - DNA, 889 bp, Bovine  19866880853901
  misc_feature (1)..(1): n is a, c, g, or t
natttttacttatattgaaaacccttcatcaactgctgtttgtttctctttggtaacatcagcaactccgttgaatctcggcagtcttagcaggatatattcctttcccatgttctcctattctatttcctgcagcgtctgatgtaaaacagattttaaagttcatgatagaacagaggtcaacatgaaagactctaggatcctggcctttggtttttgcttctggtctttattattataacaaatagttagttgaactattattttccatgtcatgaaaaaatattagaatgacagccctttctttttaatcatagatcaagattttcaaatacataagaacagatataagagaaaaaactacaacagtatcacaagataaaaaaggaactggaacattcttaagtttctaaataaacagcaagcataccatcaaagtctaagctttgctccttctctcctgttttgatccagaatgtgtcttcaaacagtcttaggccaatgcctctgcctgtgctttagattctacttcctgctgcttcatctgggaacatatactgaacattttctctttttccgttctccctttcaaaacaacacccggccttgtcccatctctacagtacccacagcttctgcatgactctcttctcttctgaacagccacagttctgtaccgggtggccattctctgcactccattctcatcttcctctctctcctttttaaaaatttttttcttaacccattccagtctttctatcagcaccactctgatcacaataaactgtggaaaattctgaaagacatggacataccagaccacctgacctgtctcttgagaaacctgtatgcaggtcaggaagcaacagttagaactggacatgga

SEQ ID NO: 63489 - DNA, 1255 bp, Bovine  19866880873366
  misc_feature (1)..(1): n is a, c, g, or t
nctcccattctacttctcttattccccaggcccacaggcagggtaagctcacagctcctttgagcactgcaagaagctagatgctgtgaatgcaaaccaaatgtcattctcatattagtcctgcttagtcatctctaccttgccaccttattctcctgctgggggtccccactagcctgaagatcatgcaagatgccacagtgcaagcaggcactgctgatagtcagataccaccattactctgttggactcgccttttctgggctccatcaccaatgtcctatagctgtcaagcagtccaagactctgtgggggtctacagtaaaaatggcacatactacagccctggatggatgattagctatactgctctttccctaatgatgtacaagcttttctgtcttacatatatatatttatatatttagggtaggcaagtttgataagagagggaaaagtttttgtttcactgattgatgagttcagtgagagttcagtgagattggctcctgggtggacctcccagggggagttaccatactgcctgtgacagctaaggctcccccactagtcaggctcacaagttgaattctctgagaagctcttaggttgccaacatctacagcccatgtctgtatctcactagatcctttgtacagagtcaaattcacgtattttcctgacatccacaatgttgctcaattccacacgttcaaaccagtgcctcacaaatctgaaacacgatccttcttgcttcccagataatcctaactttgaggtcaagttgcaagtcatccaccagagaagtctgtttttgcctgcatcaaacttgccaactgaggccatacttctgggtcgtctcaaaaataaatctgctcacatcaagccctgtagagaactttctttggaaatttcagatggtgtcagcaaagtcaactgcaaatgtcaacagcaaatgaccctgctacctctcacctctggttctcctttttctgccccctctccctttggccttgacctcccagactgctgactctctacacagaaatttgtcttctggtctctcattctttccttatatagaacaatttagctccttcttaattcacaccttcacgtgctcagcatgggcaaacattcaaaatcaccctcctccgagggtggtgtcatctcactttgccctcagaaaagtgtttgccacactgctctgcaacccttaggtaaatatacagatacacaatgaaaattttttcta

SEQ ID NO: 63490 - DNA, 1303 bp, Bovine  19866880904681
  misc_feature (1)..(1): n is a, c, g, or t
naatactaaatttatacattgctacattactcattactaaaagaatttgcacaacttactatgacaaactctgtagctgacttgtacctgttatttgatgaaatggcaagaatataattactaataaattcaaactactgctcaactttatttcacaaggcacaaccatttacaccaagcaagtgtacacaaacaagactcctatttgcagctggcattaaactttaagagcagttgactttgttatctagatccaatttttaatgctcactgttaagtttctttcttttttcaattttcaaaccaccagaggatgatttccttaagaatgttctcccaggtatgttcagaatattaattaggcccatctatttctgccgggtaataacaatgtcacaggctgaatggacgctgtgacctgtgaaagaactattcatatgctttcgtctgccccagtgcattctttaacaaatgaacatagacctttttcacagtcatcttaaatgtttcaactctgtgtttcatgtttggctcttgcatctccaaccatttcttttctgcctcttttgggggaagacttccttgctactcatttaaatgcttctgcctttatgactattttactaccatacctatggggcttcttactgtatttgcctgtaactgaaggagattttaaagaaattaaatttattcagactaaatcttctgggggatgcaaaggcatcttaaacaattagcaataattaaaaagcatctattcagactggataaaaggtaaatagatttcatttaaatatagtggttagttggtacagttttcccatttgtatgctttaaaaaaaaaaaaaaaaacaactgttagcaaataactttgaaatagcaaaagaaaacattggtttctgtcctttgtataattttttttttttactcatgagtaaaactcttaacaaattgctgtactaaaaattttaattatctttaatttaggtggtatacctaacactgaatatgatatcaagagaatggtgcatgaataaaacctagatttgctttttaaattaatccagaattagtgtggaactgcttaaaggtttacggttttttgactgatttttttttgtaagttttgttcttatatttatctgcctcaatgaaatatttgctttgtgtattctaagggtaatatgtttcattgggttctaagtcatccctaaattatttcaaattaggacttatgtatagtcagataagataaattatatttttattcaagcacatttacaagaatacatatagtata

SEQ ID NO: 63491 - DNA, 1410 bp, Bovine  19866880912624
  misc_feature (1)..(1): n is a, c, g, or t
ncaagaagatatcagtctaggccccaaatatcttgatctctatttttaataagggaccatgtggattgtccttttttcacaactgtccttatgaaagagtgaggaccagggcacccagtagtgtgttagaggggaagaggtgtgctgatagaggactcaaatttagctgggactaagggtactacagtacctactagtgtaaattattataaacggagatcttcccctgagatatcacactggtaaaacactcttctcttgcccaagaaatcataagtattaagcaaaccattaaatataagtaaagagaggaaatgagcaccctaaaactcctgctcaaatatatggtgtatatgctacctggatcctgccttctctccatcaactggatgttctccagatctcacagaccttgtgaacactgcgtcctaccctgtccatataaaacagaaaaggccttcattcaacaagcccacccaccttacttgaggaataagataactgaattttcactatgataaagaggcagaattagattactgcctttcccccaccaccaccaaaaaaaaaaaaaaaccttagaatgagagaatttagctttattaatttttaattctaagtcattcatataaagaaattttgcataataactctctaaggttttaagcaccctgagatttgcccttcaaacagcatgataggaaaatatttatctatgtgcccaagagttaaatttgataaataaacgacgttaattttgaaactattaaaagccagtttgctgttatgattgttttgcttcaaatatcaaaatgatgatgagccatatatgcccctgggcctatttcttgattcttttcatgtcttacaaagcttttttgaaaaactgaacaatagaagaaataggaatcctggctgaacaccccagttcagttccgttcagttcagtctctcagtcttgtcctactctttgtgaccccatggactacagcacgccaggcttccctgtccatcaccaattcccagagcttcctcaaactcatatccattgactcggtgatgccatccaaccatcacgttctctattgtccccttctcgtcctgccttcaaccattcccaacatcagggtcttctcaaatgagttagttcttcatatcaggtggccaaagtattggagtttcagcttcagcatcagtccagtgaatattcaggactgatttcctttaggatggactggttggatctccttgcagtccaagggactctcaagagtcttctccaacaccacagttcaaagcatcagttctttggtgctgagctttctttatagtccagctctcacatccatacatgaccactggaaaaaccatagccttgactagatggaccttcgtggcaaagtaatgtct

SEQ ID NO: 63492 - DNA, 1062 bp, Bovine  19866880920842
  misc_feature (1)..(1): n is a, c, g, or t
ntaagtcgcttcaactgtgtgtgtgtgtgtgtgtgtgtgtgtgtgtgtactcgtgcgcactaagtcgcttcaactgtactatgaactgtagcccaccaggctcctctgcccatggggttctccaggcgaaaatactggagagggttgccatgctctcctccaggggatcttcctgacccagggatcaaacccacatctcttgtctcctgcatcggcacgtgagttctttaccacaagtgccacctgggaagcccaagtccccgttgcgtatatattcccaaaacaaacagtaagtaggataatttgagcaagtatctttttttttttcagagacaatgtttgtctgtacttgaaacaagaagggagagccatgtagtctagaatggtttcaatcatctggaaaaaaaaaaaaaaaggagtgtgaattcaggagtgacttcacagaggtgcttccacctgcctcctgactgggtcttcttcatgatggattaagaacaaaataatacaaaaaatttcatgtccgagtatggaagtaactgaaatagatctcattttctttagctagacagcctagtattaagagctctcccctagttgccattcttataaattatcattattttttcaaactgtttgctacccaggtggctgagtttttcgttgcaaaatattagttcagatggtctcacacaaacttatgttaaatgttaaatatcttttgatctccagactttctggtccacatctgcacagaccaacagaggggtgtggtatgcgaagtgcacaaggagagcaggggaaacacctaagtcaaatgacagccctgcactcacacatttggcctccaacagcaggaaaacgccctgctcccaagctgaggggaagctgcatgaggtcactcccggcagacccggagtggacccctggatcctgctcctccacagcaggatctgatcatcctgaccctctcctccaaagggcctcttcccctgaggcacggaggaccaggtccaccctcatatcagctcttcttatcccccagcccactccgcaaacccaagt

SEQ ID NO: 63493 - DNA, 1077 bp, Bovine  19866880957475
  misc_feature (1)..(1): n is a, c, g, or t
ntctgatttaccttgaatatgttttactacaatccttgcatataaatcattaataatataattatctgacggtgtatagaagctctactaatattagaacttcaaaatgtattaactctagatacaaattatgcagaaatataaagaatgagattattatcttgttttactttggtaagagacagggttaattttcatgataaatcaaggatttagatgcattaggttttttggtcattgaaataacaaagggaactgtgagttgatctaaggcaaaaatagaatccttatttttctcttttaaaaaataaaacaactgcccagtgagaactggttgcaccaatccactatttgtccaattacactttttttttttccccaaaaaaggcaacttcagctctggattgccaaatgatccaaaagaaaggcactttttgaccatgggcatcaacttttagataaggcataaaaccagagtattggtactttccagaagaattgaggcactagatctggtgtcctggccagattgcaattctggtaattgcattctgctttctataaaggcccctggttagttacatttgataaaaaactcttcacttcctacctgaacagtcacagaatgtgggagtgctgtgggaaattgttgctgggtttgttcattaatgggtgaatgtgaacactgcaacatgctcactcacacacacaaaaatatgattggtgaactgaaatccccatgcgaaaagtgtgcttctgcacagatctacgttttcataaagttagatcccattgtaacaccaatgccatggaaatagagtctttgtcagtacacaaaaattattttagtccttgaagaagacactgattacataattttaaagatgcaattataactaaagccataatacacaaaataaaagaataactcattagaggagaagaaatgaatatgttggctcccatcttgtggctctagggacagcccaattaataaacacattactgagacttacagtaagaaagctttgacacatgtgcagcaatttttctaaagaagatttccagtaacctcta

SEQ ID NO: 63494 - DNA, 712 bp, Bovine  19866880972513
  misc_feature (1)..(1): n is a, c, g, or t
ntctaggtgctcaatgaaacacctagctctcattattattattattgagcagtaatatagtgctcaagtgcaatatatgtatttgtatatttctatttacatttcaatcctagtttcccccatgataaattcattttttcagccaataattgattaattcatggattcaataaatgttgtatggttacctattctatgctaggggactagagttatgtaacatacagcttaaaatgcacagtaaacatttcaaccagctgttacagggagtatgaaaggaagccaagtgagaagtagcttgctgccaatccacggaaaggctccaaagaagagaaaatagatccagacaggtcacaaaagtgaagtgaaatgagtgaagaaatggagtcccaggggattttgaacactggcgtagaggatgatttccctgagagcagtgaagaaaataaatcaagagcagatgagatatgaaaaaattgagaagcggcggaggcctggatgctgccacaaactgcctcaaaagtcagggtgcacacctccaggagagctgcatacagatgcttaagccgctagaaccatggtggatccactggatccagaccaaccagaggaagaaagaatctaaatatcaggaagggaagcaagtgataaacagcagaaaatggtatgcggcaaaattcaacaaattttatgtattgcaggctgcatttgg

SEQ ID NO: 63495 - DNA, 702 bp, Bovine  19866880981305
  misc_feature (1)..(1): n is a, c, g, or t
nttatttgatatcacaacttcctcactaactgaatcttcctgacttctgaagtcacttgaatgctaattcagcgcttccatgaggaagaatacctagaaaaatccttctcaagctgggaaagtgatctttgtccattagtctgaaggtttaaaagagagttgcaagggtccatggtgaggaagaggccccactcaggcagtcaaattggccaggttacctaggcagccaatgtaatattccaggcagatataacgtaagcgagcttccctggtggctcagcaataaagaatctggatgcaatgcaggagacacggggtcaatccctgggttgggaagattcccatggagaatgaaatggcaacacactccagtattcttgcctgggaaatcccacagacagaggaacctgagaggttacagtccaccagggtcgcaagagtcagccacgacatagcgaccaaacaacaaaagagagcttcacaatcaccttcatttagtaaaacacagactggttgctaaataataataatgagcttaagaaatttaaccatcatatccatgtaatcacagactctggtccagaaaatacagtaaccctatgcttctaattattattcttgagcatcttgtttcccaatattttagaacaccaagaaaatgaacttccatttgtctctcttcaaatacagagggtttaatgt

SEQ ID NO: 63496 - DNA, 2797 bp, Bovine  19866880981939
  misc_feature (1)..(1): n is a, c, g, or t
nttctacagcatctcttggtatacgttaaccctttacgactgccaattattttggaatggtctttctgtgtgtgacaacattcccacactgagagtctcctccccaaactggatgtagaacccaaatgcgccagttcccttgcatttacagccacaccaaccatacaaggcgagacaagactttttggatatgatcaacactatgtcaagtacaaagtgacggtacagagcttccatgttgttggtacagttggaatgaaagtgtctagtgtagagctactggaaaagcagtgacttctaggccatgggagtggaagtttcagaaaagtcacgttcctggtctttgcttctctgtggtggctgtggcaccagtggaggcttcaccaggccacttacgagccttgttgtgagcattgcagcactgtaagcactgaaagcaattatatgtaagtataaatatgtatttaattttgaatcatggtctctccaacccttctgaagattctctgagacacctaatatcttttaataaattatttttttctgttgaagtctgccagagaggattctggtgcttgcaactcagaaccctgactgatatgcatagctcattatactcataagaacattaaagcttggacatttcctttatcctctatgattatgagatcggaagaaaaataaacaatagaaaaatgaatgttcacaggagtttttgaaacctaagttatgatctaatttaataagctataacatgacttggtagaattggtaaaaagaagcatgagatgactaagaaatagtttcaaaaataattatgcaatcagagacagctgcatgtgacaactgcaagggatttaaagtccaatcccttggactgcaagcatttaaagagctgcgtttaaaatttaaaattgtagttattcaagggtatattgaaaaacttgttcatcctcactgtctgaggtacaattgcgtgaggatcccttgcctaaaggtgaatgagtaaacgagatgggaaaaaagatgcaatgatattaaaatctcaacaagaaggaagtcttgaaaaggcaaatgatacataaaaatgacttcaaagagtatactatagtttacactttgaaaaatcaatattcaataaacatttaaagaaaaaaagtggtaagcaaaagcagcaaacagaagttctctgaagagtgactctgaattatgaaatagtattttatatgccagagtagtaaatgaggaattgtaatttggtgcaaccaattcatccatttctaatttacactcctcactgtgtcattcattgactaatgcttgaaatgtagagatgactaacaagatggctcttgttcattaggacaactcttgacaccaaaacagtattgaaattatccccaaagcaacagactattaccaaattgatttatgtgctatcactaggacacttttaaattcatagctaatcacatgagtataatataaaattcaacagagaattcagaatttagctctgaaagaacatctcagctacacatataattgcaagtgaacatttgaacaattgaaatatatttagcagagagaaccagagttaattgatcattcatccccccaaaaaataaaaatcagtgttcttacatggcttttgggatatcacataaaagggaaagggaaaaaagctgtactttgaagctgagcactcacaaaacctaatattatattcaaattaaataaatcaagatgcaactatctttctaaaatctgttcattgatttgatattgaatttgaggcctgttattcaaagatggaaattttgaacaggtaattcaagatagaaaattcacatgcatgaagtttgaatgtaagtctcctaaaaatgataaaatgaaaaaaaacacattcacctgcttgataaacagagacatcacatatattatgaaaacatgttttccatatggcctattatgtttaatgctaatatccatttatggggaaatgctgggttgtatgagtcacagactggaatcaagatcactggcaggaatatcaacaacctcagatacacatatgataccactctaatggcagaaagtgcagaggaactaaagcacttcttcatgtgggtgaaagaggagagcaaaaaggctggcttaaaactcaacattcaaaaaactaagatcatagcatccagtcccataacttcacggcaaatagaaggagaaaaagtggaagaaataatagattttcttttcttgggctccaaaatcactgcagactgtgactgcagccatgaaataaaaagatgcttgcttcttatgacaaacctagacagtgtattcaaaagtgcagacatcactttgtatagccaaagccatggtttttccagtcatcatgtacagatgtgagtattggaccaaggagaaagctgagcaccaaagaatcaatgctttcaatttgtggtgctggagaagactcatgagaatcccttggactgcaaagagatcaaaccattcaatcctaaaggaaatcaaccctgaatattcattagaaggattgttgctgaggctgaagctccaatactttggccacctgacaggaagagctgactcattggaaaagacccggatgctggaaatattgaaggccaaaggagaagagggtggcagaggatgaaatggttagatggaatcactgactcaatggaatgaatttgagcaaactatagcagacagtgtctttccctgatggctcagatgataaagaatctgccttcagtgtaggagatccagg

SEQ ID NO: 63497 - DNA, 1118 bp, Bovine  19866881030306
  misc_feature (1)..(1): n is a, c, g, or t
nactaaagttgaatttttctactttagtctttagtttagttatttccaccttccctcaaatgaagagggagggaagttctaagtctaagcatcaagtctgttctctgcctagagtgtcatttttttccttgtcttgtctggctaactcatcagtcttttaattatcagctgaaggctcctttcctagtgtggccctctgtgatccttcagctttatctattcccctgcatctctagctcttcactcttcttgacatgtattaaaggtattttcctctgaagggggtgagtcctatctttttccccagcctttattatatgatagattggcgctcactatctatttgttggctcaacagatggacaactgccttcacttaggagaacattgaaaactaggatcaggtcaaatatctggctaaaaatttgggattctagagccaagcctgtttttattagagcaataactcaacacgaagtctctcaggcctagtgtcataagacttgaaattcaggtccagctctgctgtgacctttgtgtggggccctgaggaggccattgtcttggtcttattgttgtctccctggggtgaaagcatacatgacagagagttttcataaccataaaacataagcttactcatatcgtagtccgttctgccccagaaagtcttccacagcgacagtatcttctgctttaacacggaagtccactgtactgtgaggtttgacttgtgtgaccgaatctggtttccagaaatccatctgaacaaggaataagacatattgtattggacaccaataattcaatgggtgaatcaccactagtgagcacactaccccagtggattattatgaatcaaattatccatgaaatctcttataaatatcacctttatttgagtggacaaaagttgggaccaagtagttggatgtcaataaaagtgtttacacacacatacatacatagcattaattgtcaacaagcatgaagagggtatgattatctcccataatggtagttacttgcagtattctataactgctcttttctctttattgattttctagaacagttgcttattggtgatagcagtgtttgtggtaatggatatatgt

SEQ ID NO: 63498 - DNA, 1249 bp, Bovine  19866881033314
  misc_feature (1)..(1): n is a, c, g, or t
nttgagttgatgattctgctcaaatcctcttgatgacaaccttcatcttaagtctgtgatgaagaaatcagtgatgtctgatttagaaagtccttttcaaagtccactccctatcttgtaaaactaatttacaaaattcaattggtccttttgatcactttcactaatccagtttaagagcttaaactccccccaagtggcccttaattagtggctaatatgaatgcatgagcatgcacttgagctgtatctggaagctaacaagtgcatctgtaacttgaggttcaataatgaccttccttctctggacccctgattgagacaatgcatatggtagttgtttacaaacttcaaataaatctgtgaggtacattgattggtcttactcctatcctgtaatttctactttattgattccttttcttcttcatctactctacatgggggtggaaaaaaaacaactaccagagtataataaagaaaagagtgctgaacatcatttctataatctttgaagtataatcattttatatttttagaaaagctattttttttttagtttattcaagaacaaattcaaattttagcttatcagagaccaaacatttccttagggaatatttcccaaataaatttcctttccaagctcttttaaattgataatacatttttgcctattgttaaaccattaagatataaataaaagctctctctcatctactttgtctgtttcttctttctgattcattcttatggttgtatcatacattattcattatagtacattttaccaagtgcagcaattggaacacaatttcactctaatattgttaaatgaatcagtcaaagaaagtacaggataggttaatcaaaaatgcttgaatattttgtaagatactaagagttttaatggaaattgtaaatttaaaaggtggattaagatacattaataataagatctatatttattagaatttcacaaaatccccaacactggaaaagcaggaaatctcattcattgctggaaaagatgcaaaatggtacattgccttggaagacagttgggcagtttcttacaaagctaagcatactcaaactattcatttcagcaatcttactccttagtgtttacccaaaagagttgaaaacttatgtctacacaaaaacctgagctcagatatttaaagaagctttgtttatgattttttaaaacttagaagcaatcaagagaccttcaggagagaaaggg

SEQ ID NO: 63499 - DNA, 1795 bp, Bovine  19866881074776
  misc_feature (1)..(1): n is a, c, g, or t
nctttttttaaaggaaattctaaagtatcctatatattgatggaatgattggtggaagagagaaagcatgcagaaggatgtggggatagtcagaacaaagtcccttgagctggcaaaggagagtgggtttgaaacccatgtggaaaatttgctatttgaaagaagcagacagaacacactcatctgaaatatggcaagggaaggttgagggaagatgtagaatttaacacattagttggcttccctcatggctcagatgataaagaatctgcctgcgatgcaggagacctgggtttgatctctgggttgggaagatcccctggagaagggaatggctacccattccaagtattcttgcctggaaaattctatggacagaggagactgtccatctacggaatggacagactatagcccatgggatcacaaagagtcagacatgacttgagtgattaacactgggaattcctttagtagggagataagttcactgtccattttcttccatttttctcaagcatatgaaatatatttatattcgttgtagaagatttgagaagagaagataacttgaaaaggttgatgccttttggtgactcacctggttcaggcatggatctttaatgtgtttgaatggttctcttttctcaaaccccataaggacaaaaaaatttgttatgaatagatcatttatgcaattattctccctccctctctctctctttgcacatattcacatgctttgtatgaacaaatatgaaatagattcagtgaatacagtagcactttgacaatgtgagggaggttatcagccacattaacagaaagagcctcttcttaattggggcccaaacgtaaaaagttctttagcttgggcataacccttcctgtgcaacatcattaacacccaaggcaattatggattcagacactgagtttgaatcatttcacaagacactatgaaaatgcagaataattaaattatccattgctcacactagtggccaataatcaacaaagaacttttgtgtcctctatttgaaaatgggccattttttttatccccaagtgtcctgagggagatcttcagagaaatttgaaaaaaaaaaaaaaatgttaaaaagggtattctgtataattcccatgtcctcttcttgacactatgaagacagtaatagtagcataagtgttcaatcttactgaaaaaccacagatatattctgggtggcctgtttgttctaaatgcatctgtctattctttttcacattcaaggatggattgctcagattttttgcttctccagatccttggctcataaattatatctttcttggccggaaagaacctcatactatagcatgtgtaaaatactccatgtgttaatgaagctataatgattattttctcagagtcatgcaatttttcctgtgttaatgactaaaaatataaagagaaataaatcacatactgattcttgagccaactaaggataaaagtgcagttgagtaatggctggattaaccaagaacctagctgggattagtatggaaaaacatgtattttgtgtcttatactgaatttctagcacaggtttggagtaagagatggaaagttagggttataacatggccctcctgggatgtctggcctgctggcataagttctttcgaaggaggtcaccattaccatcattacccctaccataggttggcctcaggccaaactacagggtgggaacacagccctacccatcagcagaaaattggattaaagacttgcccaccagaataaggt

SEQ ID NO: 63500 - DNA, 1201 bp, Bovine  19866881113557
  misc_feature (1)..(1): n is a, c, g, or t
naggacagcattagtgaaacagtatattcacacccgttccagtagatggtttatgcactttaattcctgttaaaaaaaacttaattaaattgcacaatttattatcttatgttagatgttgagaaaaacagtctggaaagtctatgtgccgtgtgtcagacccagacagctgtctcagacttttggtcctgtgtaaattttgcgaataactgaattgttaacaggctctttgttggatgtttttctgcacttaatagacctcacatcacttggaaaaaaattatgttctaaaaagagaaaagatagtgtgtattttgttaaacaaatcagcatactcaataatgatattttcctttgatgtgtaacagattctgctacatttctgcaactattagcctataaaggtattttgtaatatagtccacctctaactttactttctatgaaagtgactgccaactgtatttatctccgtgctttcaaacctgctacaaatgtacctctacatctttctgtgattgcttttaagagcaaaaccttaattcagactttctacactccttctggtttatggtgatatcaaactcaaagcaaattcactcattgaaatcaatctggggggaaaaactcactggtctataatttaggattatttgttcactggcaaatgattagatagcataatcatttactgagcctcagtctgtgttttctgaaacactttgtatatactatatggtagattagaatagagaaggaaacaaaagtagcagtaaagttatggcaaccaagccattcttcagctcttgagttcatgtctataacttaaaatgcctttcagggcatgagagaaggaaaactcacagaattgtctaagatatttcatattttcagatagactcacacagtcacacaaacgtgtgtgcgtgcacacacacacacacatatacacttatttacaatgaattcatcaggaagcccctccctaatttaggcccaagcttgcaaagaagtcagttgttttttctttttcctgacactattacatcaaaacagtatccaggcattagacagtatttattagcttgtaaggccagagataatgatcccattcaatcagaacacatgaataattcaagtcccaacttcacataatttctggctctacttttaaaaccagtgaaagaaccatttgtatcat

SEQ ID NO: 63501 - DNA, 2050 bp, Bovine  19866881141806
  misc_feature (1)..(1): n is a, c, g, or t
naataaagataactggaatttctatgtctgcaaaactttataaaaatagtattagacatcttggatttaaatattcgtttgttaaatgctcaaaggtggatcagatggtcttttgtcacaacgctgtcacagtaactggagagtggtgtttaggatactttttcagttaaataattacaaagaatgaggctgactgaataggtagaaaaatctagattgcacaaatagttttcagttctgaagcctctctgtaggcgttatagattatttcaaatcttctccaagaatctaagttcctccaaaagtttttacagagaatacagttttattgtttcagaagtggcccagacaaaaatagcaccatgagaagaaacaagcttcctagtaagatcaaaattaattatggtttttctaaaaaaacttaaaagacttttatatactcaattccagtaaacctcagaggacacgctactgaaacaaaagaagttaagaccagaaagaatttccacagatttgagaaaactcaatgaccctttcagtctgttaggcaaacttgtgttctgtaggtatgttttagaattttgtaagtaaccatgtgatcatagatgataggaggaggagcgaagaagaggagcaaaattgtacagaatgaacaaaaaaattaagagaaactcatacagattacaaagatgatcaggaggtcagttttctaaaatgtaggcactgttatcaacctcagagcaatggtcctcaactgtggccctttcgccccccaccccagaagttactaggcaatggccaaagacctggtagctcagacagtaaagaatccgcctgcaatgcaggagacctggtttgatccctgcgttgcgaaggtcctctggaggaaggcatgacaacccactccagtattcttgcctggagaataccacgggacaggggagcttggtgggctacagtatatggggttgcaaagagtcagacacaactgaagcaacttagcatgcacatcatcacagaaaatacaaatcattaacaaggtacaactttctacatatttccttaatatgtcaatagttctagaaaaagtcctgggattgatttttatgggatcagcatggggctcagagggtaaaccgtctgcctacaatgtgggagacccaagttcgatccctggatcgggaagatcccctggagaaggaaatggcaccccactccatgtactcttgcctggaaaatcccatggactgagaaagcctggtaggctacagtccatggcgtcgcaaagagttggacacgactgagcgatttcactttcactttcagttcagttcagttcagtcgctcagaggggctggcttatttcatttgtcaggtctgccaagcacataagaacaaaaaagactacaaatataactttaggaaaaaattacctttatttacattgcaagagatgactgtttatcaggcaatacatccatataattggcttggttatgactacagatgtccttaatgtataaatttgggatccatctacacctcggctcctcactataaaattcttatcatttattttaaaaaggaataaaattcacaaactggaagaacctcaaattcacttgttcctaacctttcttataaataaaaaagctaaagcacagagtgaccaattcatcaaagtcgtgtacatcatggcatgatagacactaaatccagcttcctccatgcctcagagtgagttaaatggcatttagcatgaacccaaatgactgtaatatgagtgaaaactgtaatccccattagaaaggtacaaattgattgctctgagaattcaaatacagtaatcatcttctggatagcggcaggccacacatttcatctagaatgctcaaacttaccgctttggacgcttagtctatttttttatattattttatgtaaatttttgaaaactttattaaattctttcctgtcttttaaaaaatagcaactgctgaacataatttggcctttttcataactgcggcatcataatgaaccaccatca

SEQ ID NO: 63502 - DNA, 905 bp, Bovine  19866881206357
  misc_feature (1)..(1): n is a, c, g, or t
naattggacatgactgagcacacatgcacacaaaagtgggttgccattgccttctccaatgcattaaagtaaaaagtgaaagtgaagtcgctcagtcgtgtccgactcttagcgatcccaaggactgcaccctaccaggttcctgcgtccatgggattctccatcaaagtaataataactgatacttaggtacatttcattaaaattagtttgtgcatctagaataaaagtatttcaactgaggtaaggaaatatatgctgtctttataaaggagtttcccatgattgtgaggtatcacgtttctgatacaagtgatccacttttcctgtgttgtttttactaccatagtgatctaaatagctaacagtgaaagatgagggtaaaactgaaataaatatttaaaaaagcaatttctgtggttaaagaaaatagtaggttaaaaactgatcaaatggaagtataattgaaacaagtaaaaatgataaaacagatttaggaggctttaaatacaagagttctgaaggattctagattttgtatctatagtatagtgtatattgacttcctagattccatgacatctgctttctaagagaattttttcatcctccccatttactgtcccatgagttcattcacattgatttaacacaccatcatctaaaggatgtgataagttggtgtttatatctgtcaagggaccgaggagatgaaagtaggcatcaccaaaaggtataattttaggttgttggataccccttgcatttttcttaattatttctgacattttatctatttcaccatgagcttccttggagaatacagatgaaaaaaaaaatgttcttcatgacccaaaagaagaaatacatcttctcttaataaatcccacgtgaaatcatatagg

SEQ ID NO: 63503 - DNA, 951 bp, Bovine  19866881208681
  misc_feature (1)..(1): n is a, c, g, or t
nactttgatagattatcccaaatataattacttggtcttttagttctgtctttattatcataggaaacttcagagtatttttttttcttcagattgcaaactcatttataaaggagcttctaatggacaaattaattagattggtttgggcttgaataaaagcttaaggaggtattaatattctaatcaatttttagaaatgtggtggaccagtgttcttgcctagagaatctcagggacagagcagcctggtgggctgcagtctatggggtcgcacagagtcggacacgactgacatgacttagcagcagcagcagcagagactgtcatacggagtgaagtaagtcagaaagagaaaagtgaataccatatattaagtcatgtatgtggaatctagaaaaatggtatgatggccttatttgcaaagcagaagtagagacacagacataaagaacagatgtatggataccaaggggaagggtgaggtgggaagaattgggagactggcattgacatatatacattattgatactatgtagaaaatagataactaatgagaacctaccatatagggaactcagtgctctgtggttacctaaatgggaagaaaatccataaaagagaggatacatgtatatgtaaagctgattcactttgctttacagtagaaactaacaaaatattgtgaaggaactatattccagtaaaaattaagaaaaaaatacaaaactgttcttgaaaagtcaaaaaatattctaaacgaaagtcttggggaaatattcttagaatttaaaaaaaaagataaaaagaaaatctttcttaggtttgtttttaagaaccagggaagctgtcaaagactgcaaggtaattcctactaaacaaccagtagataaatgtggtgtggccaccatgagccaaccttgtgtttgcagcagactagagttcccacc

SEQ ID NO: 63504 - DNA, 704 bp, Bovine  19866881212176
  misc_feature (1)..(1): n is a, c, g, or t
nagcaccaagctgagctccttgtgttatatagcagtttcccactagctatctattttatccatggtgttgtatatatgtcagtgctactgggaatagagatgcagacatagatagttatttttaatgcaaaaattgcctgaggtgtgtcacctcagagaagactagaaaaattactgtgacatgaatgaaggcatgatattcaaactgcccatctacacacaggcagccccttccaataaccatctcatcgtgtgtcatcttgtaaatgactactgattcaaattgtgtatggatgatgtatctggtggttattgtatattaaacatataaattaaatctagtgtcagcccatgaagctattagtttttctaggagacaagtttttcctttctcctgtatgctagcattagagttcatgagcctttggagtttggaaaatataatttttagagttttatggtcaaataagtttcagagttactgttctgaataaattgaatgagaataattcactggtagataattacagtgaatcagtcttggaataggtatcgggagtttgatcatttatatcatattaaagaaattagctaatcaaatattatttttattagaaatgagaccatacatctctttttcttctatgtgaaacaccacttaaagattttgataaaagtgaaagagctaattaccttcatgttta

SEQ ID NO: 63505 - DNA, 825 bp, Bovine  19866881228772
  misc_feature (1)..(1): n is a, c, g, or t
ntgtaagtgtaatcatagcagaaatgtaaaaaagtatgaaagcacttttaaagtttgttagggatttcagtttgacatagttgtgtgttagttgctcagtcgtgtccaactgtttgtgatcctatggactgtagccctccagtctcctctgtccatggaattctccaggcaagaatacggcagtgggttgctttgccctcctccaggggattttcatgactcagggtttgaaccagcatctcctgcattacaggcagactctttaccctctgaaccaccagtaattcagctctatttataccttgattgcacccttcttgggttttggggatttggttttgcttacataaatacagtgttctctgatggatttctcacatagtctaaataaatattaaaaaggtaaagttaagaatcaatgtaatatgcaaaatcacctgtcatgactatctggaatatggtaggtatttgtcaaatcaattgaaagatggcatgctagtaattagggagacatgtttctatgtattctgaatatgtagcaacttggtagagttctcgtatgttttcattttgagagtttcaatgaaggagctgtcatttaatttactcgactttgttttaattgatttttcagagaattccttatggtggcaatggttccccagggtgccaattttgaagcatgctatgcttaattttttaaaaatcaacctgcttaggcaaatgcattcatcaatctaggaagaaaactattgagatatttccttttagactgatatctaaactatgtgagattttcttctgctcatttaaactaggcatttt

SEQ ID NO: 63506 - DNA, 1798 bp, Bovine  19866881300892
  misc_feature (1)..(1): n is a, c, g, or t
nactcttgcctggagaatcccagggacgggggagcctggtgggctgccctctatggggtcgcacagagtcagacatgactgaagcgacttagcagcagcagcaggacaaaataagagcacctgcatttttatgtcactgataccattctggcaattcaatcagaactctattttttaaaatttctataaatctttagaggtaacagaggatggggataaagtagagaataaatagtccaaattctctttgcctaatttagaatttgcagaaattcagagggagagaaaaactaggttttagtttctcttttttcctctcagtggaagggaaaaaaataaggcaaagacaagaacaactaggttaactgaaagaatgaacaacacaagcacactgaacaggaacacttagctggctacttaagagaacactttgaattcagatacttggggagcatctttccaagtgcaaccggctagttaaaatgtaaggaaagccttggattgatggggcaagagtttgcttttccaattacaaacaattttcacctgctcattaaagtagagttactatgcaattcttggattcaattcagttcagttaaaaaagtatgtattgagcgtctgtgtgccaaactggaaccccgtgttcagggcttagttcaatgacctatatgtcttgaacaaaaataaaactgctactaccgaaaatcctgtaattcatatgttcacactcatcttgactggatttcacgtcaatgaatctaaattgatgttatgttattttggagctttgaggaagtgaggttcaggagacagaaagcaatggactattgacatttctgatggggagaagagcgcccctctctcatctgccttctgggcctctgtggcagtcttagcttgttagcacatggtttgacttcacacaaagacaaattttacctcagtgtagccataagcaaaacctgataatcaataaaaaacaatccaagtgttaacgtggcattgtgccaaaatccatttatttcatattatattaaattttgagtttaggcttatcaaaatcccagtgatacagtacccactaagaagatttaataggtagagctgtcagagaaacctcaagaaaaagtatcttgagtgttcagttgcctgtgtatttatttaaaagaacacattttagataggtctttgctatatgtcttcatatcagctgagtccataagattaaaatacaaataaatatgtaagtggttaaccattttccaggaaaataactaatatctggtaatttcctctttcaaagctcagaacgctgcaagtctgcacaactagaataactttgtaaaatcactattgttatcatgtctcttcagaaccattgtgtgtaattgctatggaaatgtaaaaataccccctgctttttttttttccctcctctccactagcacacgacaacccattcagtcttttgcaagttcgctgtaaatgatgccagtaagagcatccaatgagaccctcagacattagtgtattagcattatctgttacactactggaccaaaataacaaataatatgcctggaggtgctgctgtttgtgactgctagtttccctgcatggcatatgcctagagagtctcagatgagagatgactgcacaaaactgtgattgtgagatgacttagcagaacccgtcatgatgtcctaatggcctcccgctgggggaaacaggagtaattgtttgtcaggggagggaacacatgctgtaagaaagcatcttctgcaaaccaagcagc

SEQ ID NO: 63507 - DNA, 2557 bp, Bovine  19866881321723
  misc_feature (1)..(1): n is a, c, g, or t
nactggggatggattaaagtctgatgctgtaaagaacaatattgcataggaacctggaatgttaggtcaatgaatcaaggcaaattggaagtggtcaaacaggagatggcaagagtgaacatcgacattttaggaatcagtgaactaaaatggactggaatgggtgaatttaactcagatgatcattatatctgctactgtgtgcaagaatcccttggaagaaatggagtagccatcatagtcaacagaagagtccaaaatgtattacttggatgcaatctcaaaaacaacaaaatgatttctgttcatttccaaggcaaaccattcaatatcacagtaatccaagtctatgccctgaccagtaatgctgaagaagctgaagttgaacagttctatgaagacctacaagaccttctagaactaacacccaaaaaagatgtccttttcattataggggactggaatgcaaaagtaggaagtcaagaaacacctggagtaacaggcaatattgaccttggagtatatatgatagactatgaaaaatctgcccctcatccacttttgtagctcactcgttcatcacttcccttttgaaatgttcacttcaggaacactcaactgcttacaatgccctaatggacacttgtaattcactttcacaaactatttactctggcccaaattttcttcttatcctattctttctgcaaaacccatattcatttcccaaactcttgcacagtcacagatttctctggaatcccaccataaaagccaaataccccttcattactttatatgtattcctattactagacatatatttttacatatgtacctcttcttctctttgtgcattctgaatctaaccaagacttattcaactttgtattcctagtgcccaatttagcatataggaagtctccttagatggattgttaataaataagtgtatgattaatgaataaatcaatgtttatttatctctttaaaactatgtatttagcaatgatataaataagatctgtatagtaaagtgtttaatatctaatatactccactctggaggacttatttactgcttttagaactaaaaacataaataataagataagctagattactttattgttgttaaactggagctgttcaactctatagttcttccctagagaaaagaaatattttctgtgtcttatatagtggaaggactttattagaaaaagaacttagttacccaccttggaggttcattaggttgtgtctgtttggaggtcacatttgccttcacctcatccctgtttcctggaaatgaaacagaatgtgctgataatgaatcaataatatgttgatgctgtgcacagggattaatcaaaagccctcattctctttcaggacaatttcaagctgccagtaatcagcagaggcaagcaagctggagagcaagcctagcacatacttgacagtgacaatcaagctgtacacactaatctctgtggtgaaattcagacagtgccttccagccccaaggcaagaaatgcacagaatctaaggttaaataccaatcccctcattctttctttgggtcaactagtgcacattcaaatcatttaaactgagttgcttctttttaatggagacactaacttgccttttcctttacttgagaggaatatctaattaaaataaaaatttccccctccatttggatataagtgcttcattcttgcaactgaccatttttatcacttcttgcctcctcattatataaagagtaaatatcaacttcatagagcaaagtaaaccattaccgctctgattaaagtgaccctaacaatttggtgttgattgcctccttcagggagaattcgttgataaataataacataaggacacaaaagatgctgttttagctgctcttctgaaaaacaatgctttgaagtaagaccatatgaaaactgatgaaaaagtttgttcctgtttttattttcccattgaaaattatatgaagataaaacagtcattctgttacaactgtttcattttacatgtgaagatatgtgaaactagacatgttaaaaggaatgtcccactgcaccctagttatttgtttctaggatgttaattcagttcaaccacctgtgttcacagaacctacttgtactccctgacttgactgattgccaccttattcccttatttcatatctggacaggaagcactctcactcaatactaaatgtcctcttggcctgaatcatggattacacaaacctctgacatcagtcagagaagacttctgggcttgacctctcagatcctatattctagcagccagcttccctttaccagatgtgcagaacatccctatgtgttatcttatatgtccattttttttttttaccaatttttgccctactctgtgccccagtaggttgacaaatatgggttacatcaatgtgcaactttatcttctggtttctggttgggtttaaccaatttggagcacccacaggagaggagataggaggacagcaaagtcaagctattcattcccg

SEQ ID NO: 63508 - DNA, 1969 bp, Bovine  19866881383588
  misc_feature (1)..(1): n is a, c, g, or t
ntatttaggatttagacaatcagtaatttaattcactgcattataaatgaaactgagtttttaaaatgatctgtaaacctaaccactctgctaaacatatgagtctgtgggaaaatatgttttatttccaagtgtgactgatttttaaatggaccttggaaatataacctattagcaaagcatgaaatactcatattttatgcatatatgtctacacatgcatacacatatatatgttactatataagttattggagatggcaatgggcaccctactccagtactcttgcctggaaaatcccatggacagaggagcctggtgggcttgtagtccatggggtcgccgggagtcagacacagctgagtaacttcactttcacttttcactttcatgcattggagaaggaaatggcaacccactcccggtgttcttgcctggagaatcctagggacgggggagcctggtgggcatgccgtctatggggtcacacagagtcggacacgactgaagcgacttagcagcagcagcatataagttatttatatgttaatatgttactatattttttgaaggtttttctctttttgttttaggaatgtcattccatataaaaacaatagaaatataatagtataaagaagaaagttacaattgaatattcaagtggaaaatctgcacacattatcatttaccataattttaaacggtaaattaactgattgcaaaaaaaaccccaaatgttcttcctaaatccctctgctgtcttaactcttggagtactataggcagaagtcctacctagtgttatttataagtatcaaattaaaactgaatatgtacagaaaatccattattttaaaggtcaacgtaatatctttaactattcccaccttgacaaaaggacaaaatgaagattcagtaaagatactgaagtatccaattctgagactattcagtcagttgccaataaagaaatctggtgctagattggtcccaggaccaacaaaaaagatatagttaaatccaaaccaaccatctgataaggggcaacttaatgtctaaaatacttgtggaaaaccagtcaaaatatacttgccagcttaattcagaggatagtagggattaagcaattaacttggttataagttttatatatatatactttttatatactaatatatatatacacacacatatatgtacaacacataactcacatgtaccaggcagtgtagtggtaaggaatcctattgccatgcaggagacccaggagatgtagtttctatcccagggtcaggaagatcccctggaaaaataaattgcaatatacttcagtatttctgcctggaaagttcaatggacagaggagccgggtagactacagtcaatggggtcgtgaagaataggacatgactgagcacacgcacacacacacacacaatcataactcaaacataatatactatgatcacatcacaatgaccagttttatgtaagacatataaagtataatgtgaagtcaagtgggccttaggaagcatcactacgaaccaacctagtggaggtgatggaattccagttgagctatttcaaatcctgaaacatgatgctgtgaaagtgctgtactcaatatgccagcacatttggaaaattcagctgtggccacgggactggaaaaggtcagttttcattccaatcccaaagaaaagcaatgcagaagaatgctcaaactactgcacaattgcactcatctcacacgctagcaaagtaatgctcaaaattctccaagccaggcttcaaccatacatgaactgtgaacttccagatgttcaagctggttttagaaaaggcagaggaactagagatcgaattgttaacatctgctggattatcgaataagcaagagagttccagaagaacatctatttctgctttactaactatgccaaagcctttgactgtgtggat

SEQ ID NO: 63509 - DNA, 839 bp, Bovine  19866881420748
  misc_feature (1)..(1): n is a, c, g, or t
ntatgaattataatctgaattattacatcaaaataattctgattttttcttcaaaaatttgtatagaataaaaattgacctgagcatactatgtatataaattctttatgaatttttcatatgtcttctcttctagattgtaaccaggtatatgattagatatgttgtaatctgtaagaaatgctcatgttgtattttcctcctgattggaagaaaactcatgagagaaactgttccctgttcctgcacaatttgcagtctcaagaagattggatagttcaaagcaaagcctcattctgttttgaaatttcttccattatttatttattctgaagtcatattattgcattctcctttccctctttcttctgaggagctaagagaggagagttttatggaagaaagtgtcctcagaagaaaatttcacacttatttattcagttaaatgatatcttttattgatgcatcctaatttttgtgcttcctgatttttatatgaagcaaagaaaagaaaactttctaagtggatgcaatagtacctcaaggtttcacagacttagtttatgtttgccttagtaaaaatttgccacaaatttgcatgataactgctgagtctattctttcctttaatctagacctgtatttacccaacactttatataactgtttatattttgtcatgagaaccatgccagtctgtggtaaatatatataatatatatatattatacacacacacacacacacacacaagcacatgggcttcccaggtggttcagtgtgtaaagtatctgcctgagatgcaggagatacaggcagacatggggttccatccccag

SEQ ID NO: 63510 - DNA, 1255 bp, Bovine  19866881810776
  misc_feature (1)..(1): n is a, c, g, or t
nctggcctcactaggtctctgaacatgcctggggtcttctcactggttttctcatcaggaagccagttagtttcaaggggtgctaatccctgtcatgtttagccctctatcttcccagaaaactttcctccaacacatgccactatatgctcctggacctaatagcctcctcctctgagccctgtaaaatcccaaatccacctttaaacagtatctctagttcccaagaagctcccttcactgccaaccctaagtcaaatttgctattggactctacagcgccagcttcctttgtgagtagacaatggaggatgtcttacttccatttatggatacacttcttttttaattaaaaaactttttctttttttttttactggagtatagttgctttacacgttgtgttaacttctgcagtacagtaaagtgaatcaggtatacatatatcctctctgttgtagatttcactcccatttaggtcaccacagagcactgaatagggttccctgcacttaagtaggtgctcagtagttgtctattttgtatagtcattatggatatacttctattggtctcaattttatggaaaatggaacacattacaggtttttgcactattatttttgcttgtaggaatacagtggtggcttttttttttttacttttctgatacataagccaatatttaatcatttcactaggcaagatgaaaaaaaatgatgagaatatgagaaagagaaaaatatcatcgttttaagtttctaggccaaatgtctaccaaaaaaattagtacactatcaagtactatatgcatagataaagtcttttctcatatgttatctcatttagaaagttaaaatctgaggagggatggcagttcttaattattgctacttttttaaagaggaaattgtgactccaagtgacaagtgatgtgcctaggcttactcagtgagaaacaactccctgttagcagctgcctgatgcttattcaatgcctctctccacagctacaggatttcccagttaataactttaattgtgatcatttctctgtcatatgaatatgggacttttaaaaatgcatgtaattctatcatattattaattcattatttgtattctaagaatatggcctgatactgactctctaatcttacacttaaataaaaaaaatgaccctttaagaatggtttttctgagcagcagagctttctggggctgtcaagctcagaggctcgtttcccatttaatg

SEQ ID NO: 63511 - DNA, 835 bp, Bovine  19866882081667
  misc_feature (1)..(1): n is a, c, g, or t
ncctctgtagagctctgcactctgcacccccaatcgacctgcccacctgaagccctgggaagagaatcaatcgagtaaccatgtgctaggtgttatgcaatctgctaaggatacaaaacaaacagccaagaatccttctcccccaccaccaccccaccaaaagctccactagaggacagacagatgcaaaaacacatgatgggagcacagagtgataggaactccgatggagacgtgagccctcacgaagaagaggggcagctttgcaaagaaggtgacatttagactaaatttggaagaacaacagcaattccccttgtaaacaaaaaagacaagaggattcctacaagaggagaaggacacccaaagtcatggaggtaaggagaggcagggaacagaatgaaagcagttcagggccacttggcttggaaagaaggtggggatgcagggcaagtgatacatggccagacttcatgagagaaggtgagagagccattcaaggatgcggtgatgaggggatggtcagaaggtgagtgaggaggttgatatcaagatgagagagcaactgaggacaaggaaagccaagtctgagacacaaactaaatgttcctttaatgggcaccagtgacaagagcaaaataacagctgttttaagttaacatcaatcttaggtattgtttcagcatcggaggcagagcaacggtttgcaaaagttgtctctgatggcttagattgcacttggttattgctttgaggaaaggaaaccaaacattttttatgtggccctaatgacaatccctggtggctcagacagtaaagcttctgcctacaaatg

SEQ ID NO: 63512 - DNA, 863 bp, Bovine  19866880353656
  misc_feature (1)..(1): n is a, c, g, or t
nccagaattctgatgaattgatgttcttaatgataatccagcagagtcattcaaagttatagcttgtctgcaatttctctgcaaatccttagaaaaaggaataccacaactttggcatttggtctgattttctttttctttcccacattttggacaaaattcacactgtttagaaaccttaaaatgcaaaagaaagaaaagaaaaaaaaaagactttggcattttatttcaacatcatggaacaacaacaacaataatctcaaaatgattctcctatttctcatcaccatcgctatggctaccacaaaatcctgaatgtcacttgggatttagcatcacaatgctggaaggaatttttgaaaccatctagtccagcagtcttcaaatcagactatgtatattcctcaagggctacataaagattttctaaggcatacagggcataaataatcttaaggtaatcaatatttagatgttcaagtcacacatataacccttctaaaaactgctctgattatgcttatgtcaaagtatcacctgccacaactgttcttctcatactttaaaaaaaaaaaaaagaatcctaaatccatcttccatttgaaatattaaaatggcatatggccctagggtataaaaatcaccaaacaaaacagaaagataatgttacatgctggaaaaatgaattgattctaagttctggttaagacaatcttttacaagataatttatttctaaattatcagtgctacaaaaatagttcaaggaaggcccaatctaggcctcttacaattatgataccattaaagaagtttttttgacagtagagtatcatacgattttgaagcctataatgtagaagg

SEQ ID NO: 63513 - DNA, 760 bp, Bovine  19866880364990
  misc_feature (1)..(1): n is a, c, g, or t
nagagtatgtgaataaaagtcaccaggtggtttacaagatgtacagtgagcgcttactgtttacagagagtaggctttaaatgccactgtcctatttctgaactgcagctgtcatcagcaaggagtccatcatcactgctatcatcctataaaagacagcctctgttagtactgaaactataaaatctaactactaacaaaacagcactactgagggtaaaaatccttgtggcaaatatgtaaaaaacatatctctaattaggtgattagactttagaaaatgctgtatgtcactcaatcccgaaggaactgcataggaatccaaagaaaaacttctaatgatataaaatattggaactccttactaagcattaagtttcacctggttatcctgatcttctgagaagtcgatgagttcatcttcaagcattttactaccttccgctgattcatcactgtagtttagccttattttgcttaaaccatctgtatcaataagaaatattacataattcttaaaaagaatatgcacataacttaaaagtatatgatcttaaaattaatgctagcaattatatagtaattacaaatataaaatttgtattagcatatagtatcacaaatacaaaataagttacttttttaaaaacctgaactgtcatactatttgcagagctgtttctactactcagaccctaaaattcattaaatattaaaaactagctatcatcttattattaaaatttatggatatttaaat

SEQ ID NO: 63514 - DNA, 1679 bp, Bovine  19866880447904
  misc_feature (1)..(1): n is a, c, g, or t
nttttggcgggctgaaaggattgtgtcatgggctgccctgaatgagttgcccagtgaccttggcagtatgagtgtctgacaagggtggggaacgagggaggtgaaattaaaagtcacaaataagccttgtcttgttcatagctgtgtcagtgaagtgtattgcctaagaaatgcctcttgaaaatctcatgtaatgtttattaattgcaaattaaaatgtgttttcgttaggtggttgtaatctgaagaataaatctactcagtcattggaatattgtgctgaattactgggtctggatcaagatgatcttcgtgtaagtttaactacaagagtcatgctgacaacagcagggggcaccaaaggaacagtgataaagtaagttccctgctcactgctccttgcaagtcctgccttgtgagggaaaagccagatcctgtctctgttccttgctgagtaaggcaaaggagtgtatcaaaccatttcaataaatttaaaaagtaaggataaaaaaagcccttttagctacacagaaaatcctgtaacttactttcagaaatgttagcaaggtatgtttagcctggttctctgctaagctaattcccaattattgtcatgatgaagaaaatctgtgcctgcagtagcatggtccttcagagacatttctggaggccacggaaaggctggtagaagccctgggtgtggtcctctgctccatttcccctgtgtgctaaagcagttctatgttttatggatggagtgtccacataagagtccctttaggaaagggttcttctgcaagaaatataagttgggaaaccactgtttagaagagattgaagtattagtctgacctgaatgacttttaagatttctttcgaagtttgataattctttctggtgttcccaaggtgcctcatgctttacgacagcatttggcacagtgtctggaggttcttttgtgtggcactctcttcattggcccgtgtatgtatctacagtgtctgatgctgttatgccgtgtagttaattaatacttagatgaaagagtacagttggacaatttggattttaagatcaactttttttccttaagcagtgttaacaaattactgaactttaaagttgtctggaattaaacacagtttcttttgcatttaagaaagtcacctggaagattattcctctgaataaatttcttgtgtattcagcatgtaccgtgaggtataaaattaaggttaaaaagatgttttgagcctaatattcttttactcaataataggtctttaattatagataattctcctgtagtattttacttggccctatttatttgtttccattcacaactgacattttgtagctgtttattttctccttcgcgttgactgtgcgtgctcagctcttgggaacctgtgttgtttccataacgtattactaggaagaatttctgttgactcggtcttcttttacagggtacccctgaaagtggaacaggcaaacaatgcccgggatgccctggcaaagaccgtctatagccatctttttgatcatgtggtcaacagagtgaaccagtgttttccttttgaaacatcatcctattttattggagtcctggatattgctgggtttggtaaatatagttttgtttgtgagtttgtatctgtttgatatttttaca

SEQ ID NO: 63515 - DNA, 1209 bp, Bovine  19866880682091
  misc_feature (1)..(1): n is a, c, g, or t
nattaaataaaagtggaaagtttcttcattgggaaaatgattccctcactcatttctccagtttttggatcaaattaaaaatgaagactattagaagatttgcagttacaagtcattatgctcctgagatagccattaaacaaaaattaaaagtgaactcataggtgtttttctaagcaattgtattctccaaattacactgtttgaagctctttataaaatcacgatgcaaaagcaatcaacagaaggaaaagcaaatatttatatttatgttaaaagcattagaattataagtatcaattttaaatataccatatgaaggaagtaaacaatctttaaatgcttttcaaagatctgtagtcaatttattccctgtcattcactagctcatttcccagctacatgcttcagatttttctgaaaaatgtaaagaagtgttttggtaacttataatctaatgtgatttcaaggggaaaaaatggaagaaatatatattgcatgctgattcccagaaataccactgacttgtgtgacattggacaactcacttcacctctttgtgcctcatttgtaaaataatggtattgtgcttaattagaagttgttaactggcaccccttttgccagatctagtctttggactagatctgggctatttcttagcccagcatgttttaaaaattggtaaaaattacacattcaaatccaaattcctgatttctctataaaattataaggtcagcaacagtgagcttatatctcatgtggaagcaaaggctgtcactgaatagcagctgtcctttgtagataaggcattgggtctttgagttattaatacttagctgcctgtttagcaactaagtttctgatgaaatagatgacctcaagtttctttcagctctaatattcccacactgaaggtgagtcatatagcaaaagggcttcccagttggcaacagtggtaaagaatccatttgccaatgcaggagacgtaaaagtcgcaggttcgattcctggggtcaggaagatcccctggaggagggcctggcaacccactccagtattcttgcctggagaatcccattgacagaggagcctgtccagagggctacggtccaaagggtcacaaagagtcagacatgactgaagcgatttagcatgcatgaatatagcaaaaagtccattcaacctctctaagcttcagctcta

SEQ ID NO: 63516 - DNA, 2499 bp, Bovine  19866880753939
  misc_feature (1)..(1): n is a, c, g, or t
ntaaattgagatttattagctataaactcattgttattaatccctaattggcacttaacttttatttttcaggctctttttaaagctttgggcttaaatgaagttgactacaagtttgggttaactaaagtattttttagacctggcaaggtaaatgcatttttattttaaactgtaacataattagtatggacagttggagtcagtgaatattttaagtgttcagtgatttatattattcttaaattagataatcacttagagcatgcatatatatatgggacacacacacacaaaaattttcccactggtgagaagtttccaatgtatagcactctatagagtttttggttttttccctctagctttggaggtattggaatcagaggattgtttagttgaatttttacttaaaataagggttaaccaggaatacttctattttaaacaagttgaaaggttttctaaaacattgattcggtcttcagtaattaaaagtttcacagtacttttgagtgttcattgtgagaacgagatctgttagagcatgatagatgtattgcatgtagaaaattagactggagtctgtgctgacgtctgtcaaatcatagaagggatggctgtgtgcatacttttgtactaatacagttttcttaggctacccatagttttagtatttatagattcttgcgctggtcttgtactatgatacaaaattgagttatggaagatttcatgactaaatacatatgaggcagaaatacttacttcccattcacagtctgttcatagtattttcaccactcttgacttctttaatattgattgaatattgctttctcataattttaaacacaagtattattatgtaatagacaactatacttgtttgacttagcaaaatcattcataaatgttgctttctcataattttaaacacaattattattatgtaatagacaactatacttgtttgacttagcaaaattattcgtaaatatctctagtgccttgaaggctaaattaatcagataaataaatctgacttcacattttgaggcatgagatgaaatctgtgtaatgcattaccaatgtatgccctttcctatgaatatttttactgcagaaaacctgtatcatctcttatcataaatggaagcaagttaaaagaaaatgaatatataagtattcatagttggcttagctgtagtcatgcatatttatcagaaactcaacatttcttatttcggatctataataactattttagggatttatggcttgatagagaaagcacttggttttatctgcctccagaaaaattaatcagtcagaaggacacagtgcaggcacagggcaaattttcaaagatctttaatctctgttacctttaattttgattataagaagctgttattttgataggtgtgtgacatcctcaatatattgtagtgggatattcggtaaaggatagaaatcaatatgtagtttggtggtaaattgtggaaataatgcattttgtgatttaataacctaatagatgttttatttgtgttgtctgtctcttagtagcagtttcttctttctgatcaaaagaaggatggggttgggagagacatggtagttttggtggtacccaattttatagagctgacctttgcttgtacagttatctgggaatatggatttgccagttcagagatatgctagactttttttcattcttctcgccataaaacctttttacctatcatctataatggtcatttaagattttttttttcctactttttattattgagtcttctaactagcaatgagtaactcaccctccccgtaacctctacaaaacgagtcctggaggaaggaagagaaaggcagcaaaattcagtcacgtgtgtctgggtttgctgtgaaactccactgagacgtgtctgtgtaacgggcttgtgaccccatacagaaagctagattttgatttgtgttattttgtatctcgctgtgtgtttaagcacatctgtcttttgatattattagtcaattatttgatttcccagtttgcagaatttgatcagattatgaagtctgaccctgaccacttagcacagctggtgaagagggtcaaccactggctaatctgcagtcgctggaagaaggtccagtggtgctcgctgtccgtcatcaaatgtaggtgttttcttccactctcagacctggaattatgttggaaacgcgttggcttgtggaatgttattaatttgtctcagtggtgagagctaggccacagggactgtgtcacttactcacactatgtccctggttcctcacgtaacaccttacatgtagtatgtgataaattagtacttttcgacttcctcagcttcttgagtgtacgatacttagcttctttaatcacatgtattataattaatttcatcttggtctaaaaattctatctcactatcttgactccttccctctctcccctactctctctcc

SEQ ID NO: 63517 - DNA, 1405 bp, Bovine  19866880760885
  misc_feature (1)..(1): n is a, c, g, or t
nactctttaaagacaagatgctgcatctccaccaaagtattagaagtttcattctctgacaccaagtttcaagagaatacatgattagctgcatttgctttgtaaactaatggcacaatcagagtcgtgaaatataatacatactgaaatgatgtgctgtttcatttttctgagcatatgatatacaacctttaattagtttttcttaacagggggaacatttactggaagagttgatatattctggtcaacaatgtgttcaaaactggccttgggtaaattatttctctaaagttgacaaaatagactcaactggttttttaaatgtgcatttgtatcttctttgaaattatccttggtttagaatattcaaacaatcatgttcaactagaggaacaaacttcttatgcaagtccaacccaactacagacacaagttatcaactaaccacgtcatcaatgtgcagccataacttttgtcacagtcagtgtgatattgatcactctaagcaattctgataaaactgcagggcaagtcctggaagcaaagacaatgcaacagatgaaaagaggatgtccttcacactatggtgaacacattcatactcaaatatgtgcaacttaagaaagaatttttctaatacactcaatttgagttttaaaaatcaggatctatcttatctgtatacaagcaattactcaaaaaccacacacacaaaataacattctcctgcatagtttatattcaacaactgcaaaagcagtgatttgaaaccaggcatatcttgtgcctcgtcagaagcgcttggggtgactgtaatgtaacgaggtcagaactagcacaaggtgtaccagtgtaatcagagacggcgggtaagggagaagcggcagggcgaaagtacagcaacacaaacacacacaggacttccctctcatttaccgcacgagctgctcagcgagtttcattacatgaaagtgcttttgcttctagggaaaatatcccctccattggttagccatcctcactgcgaaaggactgggaagttgtcctttgtcagatttctgttacctgccagaaaatgatcacttggcagaaatactttgatggctattaaagcatcataacgatctttgtgtttaaaaagcgatcgggtaattctgagaaagagatgactttctgattctttaaaaaacaattcagtgattgtcctcagtttcaaatgtgttatcaggtagtggaacagtgagactcaaaggaaacagacaacacagagtcagagagagctctcttcttgtggaagcagaaatgtcttaagagagttaagtagctgtgcatttcagtcttacctgactggcaggcagctcgtctaaaccaaaggtacgtcctttacggaggtagcttatcc

SEQ ID NO: 63518 - DNA, 1013 bp, Bovine  19866880763455
  misc_feature (1)..(1): n is a, c, g, or t
nagaagatggaacattgcacagatcaccccatcctatgctgacgatgacttcatgcattctaattgcctctactatgtcaattgtattcaggtgtcctttaaatgccttatattttaaatgtttcaaacatttcttaacataaaagaacaacctaaaatctgttgtaatgtagggagtcatgggttatgtttgttttaaacttctcctgacttcagtcttttcttagaatccctgagcatcccttccttgggatagatcagggtattcagagtgtagggagtcaaaactaagaacaaatagcacaactattgtactttataaaccaagccaagagaaaagtaagaatggttcctattgaaacatacactatcatagttcatgcaactgaaaccatgattgtcaaagatgtctgcctgatgttcaaagattctcttcactctgacgctgtgtgaagagcctatgtattctatggcaatcaaccaaatttcattaacttagttgctacacttatgcaaaaaagctggcaagtacagtcaagaggagaactttgtgattcgctaattaaggtgcattagaagttggctctatctaaaatgccacgctaccacaatgcagaagtttcagtctcactgtgtgggcaggaagtatgtaagacgatgagtcaccacctttcggaataattttctcaaatacacaatggcccctagccccgtctcttctccacccttcagtcatcctatctcagcacaccctaaccctaaccctaaccctaacccacccagctccaaagcggacctaaaggtgtccagtgacctcacatattaacatcctcagcatttgtttttctaaaatgctgcatcttctcaaagatgtctgccattaaccccaaggaatcaagagatccaactccccccacttgtaatcccttacattctttttcatctttaaaatgaggataataatgtctgttccacccactgtgtgtctgtaaaatcgtaatgcctgttttact

SEQ ID NO: 63519 - DNA, 1513 bp, Bovine  19866880768630
  misc_feature (1)..(1): n is a, c, g, or t
naaatctctgtctattttatgtaaacctctgtcctacaaattgtgtgagttgcaaaaatgcataagacttgctttctgctatccactgattatctagtaggatagataggcatgaaactgactagcacaaagtagactagaaagaaacaaagtgaactgttagactgagtaggagtgtaccaaggattaaggagactaacctattatttattttttaaaatcctctataatctcccttacataatgacaccatgatttgtgggaatctgttttctcttcctccctttccctctgggttcaggttttgctatgtgtgagttttgtcccctccctcacatgggcaccttctcccttaggctttctaatcagttttccatgctttccagggcataattgtccttctctcctaatttccttcttttcagaacctctttctgttatttcttctgcttcattcagccttagagcatccttcgacattaatatatgtgaaagctacacaaatcaagacactttcattaatgttgtagagaaagttactcacaaaggataatttgttaccagtaattagccttcaacctcaagatttattaccaatattcagtcaaaactgttcactctaatcattcactaagaaatatccaccttggaggagggacctgctgtttcttccattattattgtataacagagtcgagtttgaaatacaaactaccattcaaagtggaggtccaaccagatgctttggaacagaaagatggtctgactttactctctttgtttatgcatatgtatatgtattgttctggaatttgatcccttgaatgagtatctgttgtagtaagaggttaggagaacatgatatgagtacaattattgtaaagggtattcagtgtactaagaaaagatcagaatcttggttacataaaatcctcagctaaatgccagaaattttgcttaagtgctttgagggaatagcctaactttaaaaggagagttacaaatgcagatttaaaatatgtatgtagaatggattagacactatttatttaaatattcttaaaagattctatataatggtagtgtataattacttgtttttactcattggttattgaaagagaataagtaaaagaataataaaaatcataattacttttattgagtacttctgacctaccaggaactaaactaaatgttttctatatgtataggatcatagtaactattattattcccattttttgaatattattatgctattttaaaaaattctttcttaacaacacatggtcagacttcttgtcatctaaactttgagcttgtctgaaactcaggtatctagattttagaaaacaaggtgaaagcttatgaaataatttttttctttcatgggttctctaatacttgatagtttttatttatttacagaattcactctgaaatttttaaaatttacccacaaagggacctccccggcagtccatggttaggactccacacttccattata

SEQ ID NO: 63520 - DNA, 1076 bp, Bovine  19866880804550
  misc_feature (1)..(1): n is a, c, g, or t
ntaatgattttgcaaaagcttaccaaaagagtataatattttagttaatattttggaaaaatctttcctagcaacaaatgaattgcacaaaaattgtcttcattttaatttttttgctatgaaaaatttcaaacacagagtagagaaaataatatgactatcacttatcactgagactcaacacatgtaacagtctgtattttttttaaaaaaggacatttttctataaaatttcaatatagtaacaaaaagacttaaactgtttttaaaagtcaaaagtcatttgggttaaaactacataccttaattttggccattaaagcatcaatagaaatttcaaggtccttgacctgtttattcatctctgcttttccatctttcaatgcacttactacttcattaaatttatcgagccgttttttcagtgtgcccaccttgaccaggccatcaatgctgcaaagataatactttatcagtttaattctaccatttaatcatagaaatagatttttcattttaattaaatgctaaaaatatgactaaatagaatacttctgttttcatgttatgcaatattgttcttttttttaaggtctcttgttgagggtaaaagaaatcatcaaatatggatgtgaatgacattaatatctgtcagtaagatttaagacttctatacttacactgaagaatttgagaattaaaattctttaaattttaaaaatttaaagaaaaactttaaagactaattgctttgaaaatgtgttatagatgaacagttattcagacttccacgtttaaaatttctaataataaaagaatcaaataagaaataaaggctaaatttacagtgacacagtataattcctacagaaaatcttgaaaattatggtcaaaacattaatgagatgtttttaaaaacaatgtcaatttgacatttagtaataaactcaagtcactaaaataatcagtataaaacagctcctttcaatctcttatactgtttacatttctctaatctaacccatatggcagaaagtgaagaactaaaaagcctcttgatgaaagtgaaagagcag

SEQ ID NO: 63521 - DNA, 1492 bp, Bovine  19866880901640
  misc_feature (1)..(1): n is a, c, g, or t
ntttattaagactctgaccaggaagtaggaagagggggaattaaaagaaatcactgagaatttgtgcactttcaaaaaactctggtgaaaagaaacttcaactttagttataaataatctataatccatagggtttttatgactccacaatttaaattttaagtgtctgaattgattctatgcgtgtacctgattgatactaataaggcacagcagaaagcacataaaatatttaaaatacaaaaaagcatatacccataaagcaagcttcttccatccttgaactgaatacttgtggatacaacagaatacatattaatataacagaatgtaactaagaaatttacttttcatttcatggttttgatttactgggctgacaaatatattaaaaatttaaaaaaaaaaaaaagactttgagggacaaagaaagcctcactacatttctgtcacttcccccgaaatacgctactttggcatactgataatcttgagttaaaagcacttgagaaacagcagctgtaacaagtgcactctgaccctttttattcctgaaagcaagagataaaactcccacttgaaaggtccctccctctaccagggggaaagagacatgcttatcaccaggggacggaatggaggacaagagcaatctgtgcagaaaaaccctgtcttgtcagactaacgccagccctccctgccacttgtccacaattcaccacccttagcccaaaagcccctgccttatcaattcttctcaaatttgttgtttctttgtctaaaagacataaaagcctcctggtctggttacttctttaattcttcattcccttgcgaaggctgctatgttcatgtaaaaatgtgacagaagttgtatgcgttcctactgtgactctgtcttatgtcaatttaattttcaggcccagagatccaaaaaggtagaggaaaatttttcctcccctacaacttcaaatatatacaaataattgagctcatttttaaaattgtttcttttttagaacatgtactgcattgttaagtacaaataggtacttgttaataaaaggaaaaactagaaacactctgtcttttctttcctgagggtatctttaattggcctcctctaacatggcacattatatattatgcatttaggttcctgggttgtttacagtaacagaatagttttctctgtgaacagacctcatgagagatctaccttgtttttctaaggttcccagaaggatggcagtcatatggcattagttaaccatgtatcagtagaatataaattattcatgaacactggcagagtctaaagtaaacagaaatgatatcaacaaatttaagttagaagtcctacttaacaggaatatttattaaactaagaagagcgaagctctcccacaaaacaagccctacagtctccatgaaaaatgaagactccaggtcactttccccccaagacttccattttgttatgcagtctagt

SEQ ID NO: 63522 - DNA, 785 bp, Bovine  19866880927930
  misc_feature (1)..(1): n is a, c, g, or t
ncagagagatcttgaaaacggaaagttaagctctctccaagactcagacaatgtacctttgtaggtcaaagaaaaagtgagagtggggtggggagggaagaggcacaattgtaactcattccaagccagaaatttcactcatcccttcctttcctataaataaaattaagtttggggaaaaagatctggaaaaatatttgaacaaaaatttcgtcccaagccctatacctccttttcctcccagccagaggccacccaggggcttgactggtgttctctattggagaagcctgaaggaatacacttggaaggcttaagtgtatctgctttagtaggtaacatttccgggccacacagaaatggaactagtgtgctggctgtgcctccaagttgaccaactttgcaagtaattagtggtgaggcttagagcttgagtcttgaagtcccttgggtcttctgttcctctcatgctaaaagaagagggcagattagatgttctgaaaggtgattctagatcggaatttttccagcttgactgctgccattttggactagacagttctttgttgtggtgggctgtcctatgtactgtaggatgtttcgcagccctgacctttacccatgccagtagcatactccttaatgtgttttttttttccactaattttttggggtccacacagtgctgcatgtgggatcttagttacctgaccaggatggaacctgtacctcctgcagtggaagcatggaatcataaccactggacctccagggaagaccccatt

SEQ ID NO: 63523 - DNA, 804 bp, Bovine  19866880939407
  misc_feature (1)..(1): n is a, c, g, or t
nggctatttctttctttatttaagctttcttccttttattcacagtactagagcatccaaagaaacctcatgtcacaccatattcttcaccctctggtcttaaaaaaatgaaaagtcatcttgggtggggctttattttttgtggctgttttcgggatgaggtttgaattacccacccaggatgctgtgacgaaagcgctctttcatttctaatatgattcctctggaagcaagagtcatcctctcaatgcaattataacatgtgaatgttaatttaacagaataggccttctcaagtcttactttaatacacattgggagaaaaattttgtaatttaagaatgacttgtttttttagaactctgactctcacatttactgtttttgataggatgtttaaaaaaaacgggttgaatttggcttttagtatgaaatgtaaaaccatgaaggccaaacatacaaacatttatttcttgataaccacaagtggcctatgattaagacagaacctgataatttaaggaaaattaacttgtctaaagtgagaacagagaataattcatgaatgtactcatttttctttctccttccccattagtctacattggtctttagctctgacatgtaaaccagtgggaaaacattaactctggtcaatggactgaatggatttatttaagaagaaatatttaaagaactaaaagcatcaaattatctccacaacacatatattgggtcacagagacaaaatataaaatacatcataaatcttacttcttccagaaacctcatctcaagccccat

SEQ ID NO: 63524 - DNA, 1790 bp, Bovine  19866880994050
  misc_feature (1)..(1): n is a, c, g, or t
nctctaaagagaattaaattttctcctgccttctaatagttgcttatacatttctatttctcaaacaactgcaattactcctatggttgaagttccgaaccatccatatccgaaccatccatatcaaataaatctctaaggaaaagctgctcaatgattttagaataatatatataaattctatatatgaatatatatgcaacagtataagacaaggctactgctacggtttacagagtaaacttaaaatccaggttgcttgtactaccaccattcaaagtcatatccaaattagaaaactgttatgccctgaagaatctagaagttaattattcggaacccaccacacatgttcttaacgttatatttgagggaaggtttaaaggataaatcacaagtagagaactaatctataatgcacgttaagtatattaatggtactataaaacaattcacaacttataacaatgattctacaggaaaaacacattcagaaatagctcccaatgtcacagggccacgtgccacattcacagccttagccaccgggctaaggcctccccagactcaggtgttggctctgttttgtttggagcctctaagagatcagacaaagggctgcaggacaaagcgttcctgcagtgagaaggggaagcccggcgctgaaagggctgcagggagcccttaaacctagtttctctccatcttgtttcatcccccaaatgaccaccagccgctaccttcttccccgctttaccactactcaggagaaagaggaaattagtttcattaaggcagttgttttctcttagaggaaggaggcttcttctcctctcaagagactgcagtaaacatctaccacccagcaaacacagggcatccagccccaggacatggacaaaggaaaccgcccccgtacttgagaagattacagtcgagtaggaggggaaaatgtaaaccactgtctccaataaagtgttacagaggttaagaatgtatataccactcctcaaagcaaagagtaatcaatgcaggggaggaggaggaagagacagagcatctgtgggaaaactccagaaaggaggtgacttcagtcagtcctgagagatggattagtgtttgctgagcgcagggctctggagagcggcattccaggcaaaagtagtactgtgagcagagacacacagcaccacccggatccctgaggaccgagggggaaggctgcaagaggaagagaaacgcacacaagaccaggggtatggcaagagtgtgagagggagactgctggccgacaaaagacgagactagcaatgtagactgggaaaaggaaaggttgacccttaaatgccgcgtgttcagggctttagtctgaaggccagccagctgcagatgtggaacatgaagtcaacggagaggttcaagacggcgttcttaacagaataaaagatatcaaaatatcagaatccaccacacatgaaaaagatgtttcatctgaatacacacacatgtgtgttgttgacatgtaatatctatttgttatcagtacacatatatacacacacgaataatacacctacctaatgcaatttaaaatctatttcttactatgtgccacaactgaaaaactttaaaaggcactgctatcatctaaaacatgttccccatgagagctaaccccctcttccacgcttctgttgtatcagaaaacagatctgtttaacttgtccattgctttctgtactttcttaattttcaagtgcgagatcatactccacaaatcatccacacaa

SEQ ID NO: 63525 - DNA, 1366 bp, Bovine  19866881134945
  misc_feature (1)..(1): n is a, c, g, or t
natttcaagattatgtaaatgagctattgtctctttaaaattggggctccatggggaaggatcaacacagcacatatctgtgctctaaaggtatccaggtcctgagttctggttccctcttcatggggtgagtgataacataagattcagaaagtctcaactttctcaacttggatagaaagagcagtatcctttctgactcaaaaaattttctaagattgaagatttgaatgtgtatgtaacagttgcctcccccaaaggaattattatttatgcctcttgctgcctttattcggcaaaaactagtttaaattgtgctctctctgaattattttagtttggtaaattatctctttagatctactgtcaacattttaaaaattataatataaatgttgatgattttgtaaagataacattacagaatcaagagtaaaggaaaagtgaaggtatatgccactttctcacaaattccactccccagggctaattctatgaataatttgaagtgggtcttttcaggattgtttttctctataaatatggaaatgtagatgtcagcacagacgtactctctctatctatcactctctctctaggattatcgagaatttactatatgccagaaaatgtgcaaagtgttttggaaacattatcttgtttaaacttcaaaataactttaacaaataggtatattgttatcaccattttgtagatgagggatacaaattggtactaagcttggtaatttgcccaaagtgggtagtgtcaggataaaaatctaggcagcctaactccagagctggcaattataactttatgaattctccctatgtacctattaatacagagcctctcatatatgtaccattttattttttcaaatagaatggaaagctcaagaacaataaaattcttttgatgctaattttcatttcactgaaactaacagttatgtcttgcttatttgtttttcaataaattgattgtctcttctacttacacatgtccagctctcaaccgagtctttttcagttttattaatttttcctgcctgaatctataacccaaagtttaaattaaataacagttatgccccgcccctccaattctgaaggagagaccagataattgtgttggattagaattccactgtgttgaatttgtttgaaataaagatctctactctgattatgcctgtagtaattaaataaaatctttaccaaacatctctctgatttgttaccttctctggatgacaactgcagggcctggttactgcttctctcccaccgacatgggcacagagcacagatgaagcaggtaattgtctttcttccctctctccttcctcccttccttgttt

SEQ ID NO: 63526 - DNA, 1517 bp, Bovine  19866881298152
  misc_feature (1)..(1): n is a, c, g, or t
ngaagcaacattgggaagagtgagcacgtccatgggaagacgggccagagagggctggaaagatgaagctgggctattagcacctaaattttctgtccggtgtgggttttactaacgtacagtcttgggtgcggtcctggaagtggaagtgaaggcaattggaatgaatgaggtcaaggatggtgaagttagggtattggctatgagtgttgaaacctccgaggatgatggtgggatttggagtggagagctagtctgtatcatgtagtaagtatgagggttggggagcagaaggtcagcagataattgctgccagactattttctgtaaagtgcttctctgatcgtgtcatgcaggtgcttaggaatttacaagagatctctagaccctatcagattgaaatctaaattgatcagactggtctgtaaaaatctatttattaacaggcttccccttaaccgtgaaagcttatcttttatattccttaacttgaccctgcctatcaaaccccctgccctgatctagacactcacatgtacaatctcaaatactattaccatcccagtgtttttcccctggcttctctatatttctccaccttaagactacttacagaacagatactgaaaatctttacgaaaactgaggaggacatgtattgtccttgttctatcctacacttccctcatgtactagtcaatattcctgtttttcctttttaaattaaagatttaaattttttatagcagttttgggatcacagtaaaattgagaggaaggtacagtgattttcatacacgccctctgccccaccccacaggcataccctcccgtattatcaacatcccccagtacggttgggcatgttacacttgataaatctacatggacacatcataaccacccaaggcctgtagtttaccttagggctcacctttggtgtgtgcgttggtttggaaaatgtatgatgatatgtgggtctcccaggtgatgctagtggtgaagaacctgcctgccaatgcaggagtacagagatgtgggtttggtccccgggttgggaagatcccctggaggagggcacggcaacccactccggtatccttgcctggagaatcctatggacagaggagcctggcagtctatagtccatggggtcacaaagagtcaaacacaacagaaacgacttagcatgcatgatgttacgtatctaccattattagcaccttacagaatattttctctgctctaaaaatcctctgggctccacctattcatctctcccccaaccttacacaaatttcttttagttcccattacatacacatttcccatgtgttttatgtacttacttatatctgttgcctgaaacagcttgagagaaggggttgtgtcttctgcttctttcctgagcctcattgcacctagaaaagggctggacatcattgtttatctactgttaactaatgatcgttctcagaatatcctaatatttgtacgtcctgtgaggcagtcataag

SEQ ID NO: 63527 - DNA, 1130 bp, Bovine  19866881681827
  misc_feature (1)..(1): n is a, c, g, or t
naaatgaaacatgattactgcttcattttgcttactgcttttccaccaaaaattccaaggcagttataagtcaaactaatgctgcactttaatatactgttctgaaatcattttttcaattggtatttattgaacagtatttttttaatgttttttctttaaaacagaggcattacatggctgttttagactcaaattccaaattactgaaccacatataccaaaaaaaaaaatctgattccagatgaggttcaaaaaactcttccaaaaaacaaaagcccacgagatctttagttcaggcttcacagtaaataaattattcccattccctgtatttacacaactgagataacagactttcaagagactccttcaccaaagtttatgtgtgagagaccaatgcatctatgactgtgggctcctccattcacagaaaccttcacatcaaaaggctacatttcttctcaaccaggatagagagtaccctgtaatataatcactcatacatttttggaaggaacagtttccttttctatgatgagaactacttttcaaatggatgcttacagttatcttccacatcttttttactgtcctcttctgcaggaaacacttggtttatgagtgccaaaaatgtctaaaaaaaaacaaaacaagagcttattaaactagaagcttataaatggtaaagaagtcaaaggagcttaattgtctgcatacattgcaataacagcaataatatgctcttcattaagatgtaataccagatcctcctgttcaacaggtctttaacacaaaagcaggataactttagtcaaatatattatccattattattatgaatgcaaaatcaataatagaaatcaataaaaaaaatcctgtgctctaacaccaagagtggcacaaaacaagaagtatgttaatactaacatactgcatagtacattacacaggcatgcttttcaataacttttcaaaaaataaaaattttaatgtttatatatacagcaattttattgttttaaaaaaggaaaaagtaacagccaatcaatcaaatataccaacagactataatttaattaatgttattgtctgagtaaaacacattagacacaaattcctataggaat

SEQ ID NO: 63528 - DNA, 700 bp, Bovine  19866881752301
  misc_feature (1)..(1): n is a, c, g, or t
nttgagggtatagaattccttccccctaccccatgagatatggcctcacatactttgctactctttgaagcacagttgttccccaatagttcattcttaacatttcaaagaagcttcagatgttttccttaggtttgttaatcacagaggcattataaaacctttccagacaaactccacctggcctcttcttatttggtccttccgtaactctgattactcagcatttctgtacttctctgcttatgttcggaaacttgcacattggtagagagaacttttctttactcagggttatccaaagtcaactaaaataacgatatacatgaaatgcaatggttgccaccgcctggcactagaacccattaaaatgtgaaacatcacaagatttggggaccttttaataatccccgctcaattttggaaaaccatttaatgccactctaaaacattaaaacttgcagtttaggtttgaggtacttaaatgagtaaacaaagccctaagtgcaaacctgatataaaatactttttgttgtttgtccactccaaatgcaatagtttgcatctactaaccccaaactcccagtcagtccctctcctttgccccttctcacttggcagccatgagtctgctctctgtgtctgcgaatctgtatagcacagggaactgtattcaatctccagggataaaccataatgg

SEQ ID NO: 63529 - DNA, 1492 bp, Bovine  19866881892007
  misc_feature (1)..(1): n is a, c, g, or t
ntaataatcttcccttccagtctggcagtgaatgcaatttaacctaaaaatatcagagaaagacaaaggtaatattttgtctcctcagtgactctgcaaagaacagttatgttctaagaaaagtcttagagcacgaaaaacttaaaacacacaaacctcaaacttttcctaaatgcactaatatattcaaatagtataagtctgacaccaagtggtaaaaaatggtataaacactttaactaaaaaaatataactggtattgttgttacaggatatttgatagaccaaaaaatttttatagtcagtcttatgtacatgtctaatattcaccgtcaacaccatcttccatctaatcatatttttaaaagatacattaaaatttctctctacatagagatgctgtaagaattaagttaattttttaaaattttcgtgtctaccctacaataagcactaacttaatattaactcttataatttcatgtcagctaggtgttatggatactaagcaacctgtccttttcctcagggtgcaggtgtgaggaagggaaacaaagggaaaccaaatgaaaccgtgttaacaggactgtaacaggcatgttaagcatgttctgggaaatgtatacgaaaggcagagaccaattccttctggagtgttttctctaagaactgctccttcctcagatacagagccttacattagaaatctgtggccctgctttctgtccatgaattactgacccagagttggacatctgtctcaggctgggaccatcatatgttttcttctaggaatttgcatttgagaatttgatactttcattaatctgagatgtccgcttgagccgaggatgtaagctgttatctggtaaggtggtcatgtgaacagagaaacaggaaaagactgcctgagtttaaaaaaaaaaaaaaagcaaaagtatagaaggaggcagagatgagagaattcacgtgtcaccagagaaacagaagatcttcttttgaggaacaagctgtgaagaatcctaatggctttccaacacacggttcaagatctaaaaatgacctgaactgtaccctgaccttgtgttttgagagacatccttatattcttataataaatttgccttccttgctaaatcttgccttagtgagtctgttattttccactaaaataatcttaactgagataccagataagctcaaacattaactttctatccaatatgttcttcagtaattcaaattttattcttttaaatatttgggtaccagttacatgatgtaattttatactaatttttcaccaatgaagtgactgtatttttataggatataaaggctatcaatcttgattttttgtgaggaaaatatttatgtaaacttacagaggaaaaagatcatttgaacttaaaattttacaaatggttgtggtcatttcacaacatacgttagtatcagattatcatactgtgtaccttaaatgttcagttca

SEQ ID NO: 63530 - DNA, 937 bp, Bovine  19866882034689
  misc_feature (1)..(1): n is a, c, g, or t
natttgatgtggcttgctacataaataggattatgaaaatgaaagaaaattgtaaagaaaatttaagggcaaacctagaaaaatttattaacaatctgtgctgttagaatgaacagtcttctgagaaacgtttgaacatttcctgagctggaacatttccaactagacttaaccaagtaactagatctacagagggaatcatctggcattgatagaggataaactagttgatctgattggtcttttgcatcttaaacttcacatgaaactagaacagtgttttcttttgcctttagtcttgggtactgtgggtactgtcatttatgtctaaaagatccaggctgattttctggaagccgcacttgcaggaagctttttgccaagctacactgtcaaaagtacactatctgtaattctgtgctttccctttactatatgtcatatttataattctataaaataattaaaaagttgaagttatataaataaaactattgtgctagctcaccctgtgtactgggtaggttcttaaaaaagaatgtaagtaaaatcaggaacagataggagttggatacttaacaagtaaaggaatgatgccaagacctaacttgtacagaaaagaagtttttcttggtggtagggatggagaatattgtgaccaatgttgaatagtaacatggaaagataaacctggaaggttcgagcaggagtgagactgttaaggaaaattcaaagtcaagtcttataggagctaataaagatggaagctagagtgagcctttaattgctgtagacttttccctctttcattctctttggacttgttcaaaggctctaaaaatccttattagttccatacaaattagtcaaaattgttataaatatcttccgattcctaggatagtattcatctgacagtacatgctgacataaaaga

SEQ ID NO: 63531 - DNA, 943 bp, Bovine  19866880359655
  misc_feature (1)..(1): n is a, c, g, or t
naaactacaataagggaaatgtaacacttactcaaggttacccaataagtcactctctgtcattaggacttaagggttttcagcttcgctgtctgatttcagtccattaggccacaaagtcatcaaaacaaaccagaaaagagcaccatcaaaaagcaaaagtaataaaatcaaaggatcctggaggagtattgtactaaaagccatctgctatctaagtccacattctcaaccctcttgaaatgttatttgtaaagatttaaaaggcttgactggaagccttcatgtctttttaaagatacagtatatctattgctgactcatgcatgctgaattgagttgtaatatagatttttgaatatacatcagagaaatgccaatactttttgcattgccaaagcccttaggctttgctgttgagaaagatttgtgattagctaagcaaatgattcttgctatagcagtaatggtgagacgaatttatgtgtgcgtgtgtatgtgtatttgtgtatatattataagtgtgtttggagaatggagatagttgcaacatttaaatgataaatactagaatgcatgagcttcccaggtggctcagtgggtaaggaatccacctgcaatgtaggagacatgggttcaatccatgtgtctcatggacagaggaacctggtgggctacagtccatagggtcacaaagagttggacacgactgaagtgactgagcatgcacaatgcactgtatgcatatttttttagttctttttttaatatccaatattctcaccagcctactagaatttctgtgccataatcaggtgaaaaaaaaagatccataactgctgtcttagtgtttccacttgactttgtaccttgtctccctgccttgctctgtcaaatgcctttattcttctcactccttttttcatttaggctggcaggcaca

SEQ ID NO: 63532 - DNA, 2910 bp, Bovine  19866880370283
  misc_feature (1)..(1): n is a, c, g, or t
nttgacattatttgtttgtgtgtaatgagtggtttcttttcttaactaatccttcaaacctgaaacaaaagttaaaccttcagcaaaacaaggagtaactagtcaatctcataatatagcttagttaaagtatctaatagagaatcatcaagatccttgcttctcctttgtggctgattaggagtatccagtggtaatatttggcaaacctctggagccagatcactccatggactatcagtactttctctttacatctaatcaggttagagagccaattccagagacctcagaagcaattcataaaactcatccttaaatttctgttcctctagtagcactcttggtaccaaaatctgtattacattagtctccagaaactatgagatataggatacatgcatatacatgtgtacatacatctcacatattagtgaaagagagagaaagaatgaaaggttataaagaactgcctcatgtaattttggaagccaaagaggcccaagatctgtggttgacaggttcaggactcaagaaaagccaccattccagcctgagtccaaagactaggggaaaaaatcaatgttctaactcaagtggtaagacaggagaaccctgttactcagtctctttgttctatgcaggtattttggtcttcaactctttagatgagggccacccacattaagaggggcaatcttcactcagtttattgattcaaatgttaacctcatctaaaaacatcctgatgaacccaccagtaggtttgactaaatatctggacactgtatggcctgattaaattgacacatacaattagccaatacatcatgttaatatatatgcatcataagattaaagctgcctggagtgtttagccaacatgcagactatacaaacatcctctagtcatccttggttaggtctactgtaataaatgttcaagctaataactggttatgggagtgagggattttagtagtatctgattaattgtagccttattaaattagttaattcagttgcccaggatggtcactcaaaccttgagtaatctttgcaagagtgagacagaaactcttgctattttatgttcctgagatttagggaatatttgtttcagtggcaaaatgtagcccattttgacggatgtagtctcaatctgtaaaacgtggggttttaactagatatctttaaagtcacttacagaacttacattctatgattttaggtttcctgatttcaaataggaaaactcaatcatttgaaagcaaaacaactctaccaaagcactcagtgtattaaatgaaattctgtggccagaattgtggttttcaaattatctacccagtaatctgtttccattacattgcctcatgctctcttaaactcagcaattgtttaaaggaagcattaaaatatataccttatttaggaatgatttttatctaggaattaactgattattatggcaccttttggaatgtaccatttgaaaatgccagagtagctcatcagtagtcagtttcacgcaaaaaattcaacctaaactcatgttatttactgactttgtacctagccattagcaagggagtatgggaaatgcagaagtatatgatgtgatccaagtaatttcattaattttatcttaaccagcatggaatataatcacacataaatgacacatttaatttgtttagtatgaaattatttatgccttgatttcttgtggagaacaacagtcctctagggtaggactaactatgatgtaatgtgaaattatgaaaggcatttctgaaagctagcaaatcagagtctagcatctaatgagtgctactgctgctaagtcgcttcagttgtgtccgactctgtgtggccccatagacgacagcccaccaggctcccccatccctgggattctccaggcaagaacactggagtgggttgccatttccttctccaatgcaggaaagtgaaaagtgaaagtgaaatcgctcagccgcgtctgactcctagtgacccccatggactgcagcctaccaggctcctccgtctatgggattttccaggcaagagtactggagtggggtgccattgccctctccgtctaatgagtgaaactaccttcaaatctgtcacattgagaaattgtgtgactacaccttgagatacagcaagtgccccgaacattcttggatttcctcttcagggtacttgaggcatttttgtgaccattttgtccattgaatgtgctatgctattgattattaaaaatggtcattcaaagcctttgcatgtgaactaacatatatgatagatctggacaatattatatttattcaaacagcaagttgaatttcttattttatttcttttgtggtgtgtaaaagtagccttgaaggcagttatcaaaaaggggtaccttagaaacatcaaaatcaaagttagatttcactgatacatgtagttttcaaatagacaatactgaggccaatcatccaatgattgatttgtttgtgaacgcatatgagtatacacattactatgttgtgtgcaagtatgtgtgtatttctgagaatgagaggttcattattttatgccttataacaagtgttatatctatttttaaagaattctgatgtaccttgaggatacacacacacacacacacacatatatgtttatatgtatatatgtgaagcaacatacaagggaacctgagccactgtactgcaggcactgaaccgatatgatgtgacatgttaaacaaggagatttcttcctctggagactttaaagaaaatgatagatggatgtccatggaattttgggggctgtggtatcaccggaagtaaaaaaaaattatcaatattaataaagcaatttctacatctctaaactctctaaagg

SEQ ID NO: 63533 - DNA, 1753 bp, Bovine  19866880602937
  misc_feature (1)..(1): n is a, c, g, or t
nagagagctgatctaattagtttatgcagcccataagcagaggctccaaacatctttcttgtttgtatactccattatttaatcttacgtggttctctcttgtaaaaatctgtcttcagtgtagctgattttaactgacagtttgctcagagtttcctggactgaaacttagaatagggctgtatttaaatgtacctatctcctttatgtcagatcaaagcaagtatgccatttgttcctagctttcaagggccttcatttaattcagaatattttaaaggaaatactcagtccagggggttttatttccaaagatgacacacaatcaatatttgtggaaaaaaatcccatgatttcatttctgcttcactgtaatgtttttgttacctttgtgatccatgccacaaaagagtattatagggcaataagtcacagtacggtaggaatgatcattatcttgatatttgcaaaaacaggctctctttaagagggttactgataatctaactttgtcagtggagcactattttgtaacaataataagagtgcttggtaatattaattgagaacttacagtataccaggggcaattctaggctcttcacatatattaaattatttaataaatagtccaatgaactaatattcataaatccctcaaatttgtatgtgtgtttctgctttttgtaacttattttaattctccatcttctgttatggctttgaccttcattacatgcctgaaggatagacaagtaatgtgacaagaactttactacaaataaagagtatcttcataaatggattgaattactgtgcaaatcattatttattaatcaccaaagtgcattcctgactacattcaagtataggaagggctgtcagttcagttcagttcagttcaattgctcagttcagtcgtgtccgactctttgtgaccccatggactgcagcatgccaggcttccctgtccatcaccaactcccgaagcttgcttaaactcatgtccatcaagtcagtgatgccatccaaccatctcatccaatcccatgaacagtgtgaaaagtaagggctgtacttccagaagtatctaggagtcaagaagtctagaagtcaaggtggccacaggaattgctttggtcaatgacatataaacagaaatgatatgtgtcttcctggtggatgcatttaggagccagcacacactgtgtcatcttttcttctttgacattatattagggttctccagagaaacagaatatatatgactgatatctgttctctcttgcgtgcacgtacgtgtgagagagaaccaggagagtccatggcataaattctagtctaaaaatagcatactctacccaagaagagctgatatttcaatctgagtcccaaggctagagaaaaaaaaaaatgtcccagatcaagcagtcaggagttttctcatactcagtctttttgttctattcagtccatcaactgattggatgagaatcacccacattaaggaggccaatctgttttactcagttgactgattaaaatattaatcccaaccaaaaacatcctcatagacaaacccagaataatggttatgggaacaagaagcaaacatgtttttatgcgtcagcaggagcaatagcagtgccagttgaattttcattccttgattcttgatgtctcgatttctgtgaattctggctatcatggaaacagcaccatatgttgaatattgattcagagcaaatactgt

SEQ ID NO: 63534 - DNA, 2069 bp, Bovine  19866880931843
  misc_feature (1)..(1): n is a, c, g, or t
ncacattttatgggagtgaagataatattgctcattaaagacagagcaggcatatggcaaggtactttattaaatacatattaacggtagcaaaatggaatgaggggttgcatttttctcttgaaaattgttttaaagtaatgtggtagtttcattggtgtcaactctgaatctcatgctcccattgatatataactcagtttagagatgcaatagtagtagaaaatatgaacaaagtaatacaggaaaggtggaagagaaatttgagtaaggagacagggttaaaatggaaaaactgtaaaatgtataatgtcattctcaaaaatgaaataaaaattgtaatataattaattgcaaaactcctttgtagcattaaaatctactataagagcaacttagaatcatgatttgcagcaataattatttccatctagtaatttctaatattattatgtattatataattgttataatttcttatattgctatatgacataataaatataataaatgtgtgtgagtatgtgtgtccagttgctcagtcatgtctgactctttgtgaccccatggactgtagcccaccagggtcctctgtccatgagattttccagggaagaaaactggagcaggttgccatttctttctctgggagaccttatcgacccagggatcgaacccatgtctcttatgtctcctgcattggcaagtggattctttatccctgcaccacttcggaactccaatataatgaatatattataatatgtaataaaatatattaattattataattagaaataataattctaaattattttcatctaaaatttcagctaataatttccatcatgctttagaaaaaggttcactaaaccatctatgatatatatggacacattctaagttcactgggttggctaaaggaatgatcatttaacagcatactgttcacattatctgtgcctttgtctatgtgcagacaaacactctggaaagtcatacattaatgcatgtgggtgtgggcaatagttccttcacaggacagctggatgcatcccataaagacgttcagccaaatgtttattctaaagccttctggtgtgaagcacagggaggcctgcagcacagttagttggaagcagcccctaatgcagaaaggagagctcagtgtactgataacaggttctcactcctgctcgttctttgagcaagagggtaaaaggctacatacgtcatgtcatttgccaatctaccaattatcccttggaaaagggaggcaaaagcacaatctgatagtagcagtgtaaattatcaacaagcttaaataatattcattttgcctctgcattcttgtctttttaaaacctgatctctacacatagaactggaagggttaaacacacacacactcatcccacgtattttgaataataaaatagagttgtgcatattttcttacaacaataatagttcttgacgaaaggcaatttcccctcaggtgacgtttggcaaaatctggaagtatttttaattttcacaacttgagtggtaatactggcatctaatgggatgtgtaccaaggatgctactaaacatcctaaaatacacaagacagtcacccacagacaaaagaattatctggtccaaaataccaatagtgctgaggctgaaaaatcctctgctagatatagtcaaacgtgttgagttcagttcaggtcagttgctcggtcgtgtccgactctttgcgaccccatggactgcaccacgccaggcctccctgtccatcaccaactcttggagcctactcaaactcatgtccatcatgtcagtgatgccatcaactatctcatcctctgtcatccccttctcctcccaccttccatctttcccagcatcagggtttttccaatgagtcagttcttcacatcaggtggccaaaatattggagtgtcagcttcagcatcagtccttccaatgaatattcagtactgatttcctctaggattgatcggttggatctcctttcagtccaagagactctcaagagtcttctccatcaccaaagttca

SEQ ID NO: 63535 - DNA, 1678 bp, Bovine  19866881170324
  misc_feature (1)..(1): n is a, c, g, or t
ncatcatcccagagtaatacatctgaatttgatacattgattggttcattgaaattgagctcttcagtagatgatatttaaatatcaatcaccttatgaatatttaaattcaagaaatgtcaaattaaaggtttgctcatcttatttacttttaagagttcttcagaaatatcagataaaatgagatcatacttggtggcagtttaaaactcttaaaaggctgatctttgcatagtaatactccaaaatattcaaggggaacctattcaaatataatgtaacctttgggtttattaaaagaaagttgcttcaatctcagaaaaacctgttatatttacctttaacaacattttccaattaactcttgatttaatatactggatttaattctaagctgatgcattggaatgaaaaatcaattgtattaagcagttttatttgtgtgatttaagtatctatcaatatagtggtaatttttgttacattctgttcctgactgattacatttaacttttagagaatcccaaaggtactttttcatatattttccacttcttttcagacaaatatttaataatttgaattttgaaacactaaatgaaatctgtaatctaaataatgtccatatacaatttagcttaacagataaaattttatttcataaatatattcttcttaaaaagaaatctagcatgttctttggaaaagcaatttatttgtctttaaatgttatttagttcactaacatgtcatatatatatatatatatatgaagttatttacagagtttatccattgactataagaatatcaatgttcactgaatagtgtatatgtatcccttctactttctgagcatagattgagggatggatacatataagataacaaaataattgccataaaggatcttattgtaagttcatatctgtagcatatttatatatatatcagacacacatttatttgtagtatatcaggtatgatacatacatacctgataaatgccatgtatatatacatatgtatcgcttcccaagtggctcaatggctaaaggatctgcctgcagtgcagaagaggcgggctcaatccctgagttgggaacatcccctggaggagggcatggcaactcatcccagtattcttgcctggagaatcccatggactgaggagcctggcaaggatacataccacagggttgcagagtcagatgcgactgaagccactgagcacccttgaacatctctctctctctctctttttctatctctgcatttgaaaggggtcagaagcagtctgaccaaactcagagaaaaatttagggtcacagtgttttcaagaggcagtttgattttctttatgaagtatgggtggagagttaacttctttaggggcagtttagcagtctaggacagttcatctatccaaattcacatctacatgttctctacctactatttccctttccttctcccacagtctggaattagcttcagcttttgactctgtttctctgtttgactctggtttctaatcttgcatatcatctccttgacattcacagataatttgacttattttgccataggtctttgatcctagacttcataaaggatattcatgtcatccgtcttgcttgattttttctgcctctcacctttacaaatcaaaatccat

SEQ ID NO: 63536 - DNA, 1195 bp, Bovine  19866881732867
  misc_feature (1)..(1): n is a, c, g, or t
naatgttctctattgtcgcgttgcattaaacagccacgacgtggcccagactgagtgggctgtgtaaatggttaggtgttctgttttcatcttttgtttgtgttattttcctggctgataaatggtgctgtaagccttaaatagctactttgcattcctatggggatattgtgtgcatctttatgcatccattttggtttacttatattgtgattccacctctttatattaaaaatttatattttttgttagatgtttcaagtatgtggcttttaagcatcagtacttcttgtgttcattgtataaggaatgaccttcattacagaatgcaactatggggaatattggtgagcaaaggaccagcttgaccagaacaagctgcatcaggtttaggactctggtctagacttaggattcctggtctagctcccagttttcaagagaatccatttgaccttcaatcttgcggaggcaacagaagccttaacacaccaacatagtaagataagaaaaaaaagaaaataaaagtcatctttttttaaatttcaaaaaaaaaaaaaaaatcatgtgaagaattcatcccctttaaaaagcaacaggattctttccatgcattatctttcccttcatttgcagcgtttcgcattttatatttgagtaagaagaaaagagaacagtgagcattaaatagcaaagatagaagccttagagcttggatgttgtagcagatgacaatacaggcattactaaagataaaatgagtttggggctgatattaatatagtgatgagtttggttacagtgtgtgatattatcataaattaaaacatggagattgtccaaggcaagctttttggcacacttttatttcctagatttgataacatggttcacctagctctcagctgataaaaatatggaggcatgatcggatattctgatttatctctttgtgttgttgttgctctcttcttatcccttccactccagtgctcctgtcctttggtatatttcatagcctgacatgcagctgtaatggttctattagctgccacagatgtgctgagcttgctttttgaagcgagcatgtcgtcaccggcacttttttgcagttccttattagtatgtgccctttcccgactctgcaggagccatcacctagaattaaacattttatgctagacctgtccttact

SEQ ID NO: 63537 - DNA, 721 bp, Bovine  19866881977905
  misc_feature (1)..(1): n is a, c, g, or t
ncatctttgcttaaaaaaaaaaataaaaaaggagagagagagaggtaggcctatgaggctttaatttaaattaatgggaagtatttatttttcctaaaaatattttaaaatatatattaaacaaatattgaaataaataagaaaaaataaacttttaaggagataaaactcctgttcctgtgtatttttttgtatgacacaaagcagatgctacttcagtggataaagaactttgttagaaattctatgcagagattttctattgagctgttctaatagtgatttcactgtttttcagtgaatcacaactatgatacttctgtgtcctgtaacatttatgtatattctacatattgctttaaaactgcatgaagatctggttattgagactattttaattaagctctttatatatacagtcctttgcaatgtaaacattttatagaaaacttaaaagtttattttctttctctttcttgtgttgttgtttttctgtacgactgtggttgatgataacttccacagtacagaccattctaggaaacaacacatactatctcttttttactggctattttgctgaagttagttaaaatttagatttcttcaactattcctaggtattacatcttgctaagaagttaaaagttatcctaaactgtaatatgcttaaggacattccattcaatattttatgagtcaatctaatatattaagagta

SEQ ID NO: 63538 - DNA, 987 bp, Bovine  19866881259656
  misc_feature (1)..(1): n is a, c, g, or t
ngatgattcacgtcctgggaggattggaactggacctgagtaattctgttgcattactcagaatggtgtgcaattgaaaacttacaaactgtttatttctggtatttttttccatataatgttttcagactgtggttgatcaagggtaactggaactgtggaaagcaaagccagggatgaacagggactattgtaattttttagcacttgcgatctgtcagcactgttcttcatgtgttaactatttatgtactattcagagctattgatttaaaagcactaactttatccactcatttagaatttctcccctcagcaagtgtttcaggcagagtatttcaaagaattagaggataaataaaattccacaaagcaaatctgtgtattaggctgaccagagaaagagtacatgacacagtcagcctggtgattattgaggatcgtgtgtagctagttaagaggactgaaactgaaaaacacaccctgctgttatcatgatgcccaagcggtcactgtgacgcagatccaatctatgataatgaagctgaactcaaacttgctcttctgttcagaggagccatttctcatttattcttccctctgccctccggaaaaagagagctcaggagaatttctgtgtcaagaaatgaaaaatgcgctgaaatttcctgtggattgaaagatatttctttatctaacccatggttaacatctagatggtcaatctggacttctggagaatgtgaaagtgttagtcgctcagttgtatccgactctttgcaaccccatggactacatatagctcatcaagttccttggtccatggaattttctaggcaagaataccggactgggttgccattcctttctccagaggatcttcccaacccagggatcaaaggcatttgaaggcagattctggcattgaaggcagattcttttatttttttaagagcacaaaatacatattcacataacacatttcat

SEQ ID NO: 63539 - DNA, 1207 bp, Bovine  19866881286074
  misc_feature (1)..(1): n is a, c, g, or t
ncattaaaggtggaatttgttctaatgaggtttcaagatttggggcttactttgggccctgttcatcctagtcagtcgtagagatgaccttccttctcagagattctgcagttccagacctaggcatcccctgagaaagccaggtgccatccactgcctgggaagcaacgctcccttggagttggagaggctgaatgtggggcttttcacttttgcatcaactgtagctttggaacatgagccgcaggaggtttactaggttctgtgataacatcgtggacctgaattcgagcaaactctggaagatagtggaggacggaggagcctggtgggccatagtccatggggttacagagttggacacaacttagtgatcgaacaacacaaatacctcactctctcgtaatcttgaatgtgggtatctcagataatatggtcataaaatattctatgatcaaatcccttgagcaccttgctctccttccttccattgtggtcctttacagactaaatgaccactttcatctttccctacttgagatagatgaggcatcacggttagtagaaaggcaatagatctggttgtcagctaggttttctagtctcgtctctaccagttgtgtcagttcagctgctctgagcctgtttttaggattgggtcttcaagtcccatctagcctttgaaggcctatggatttgatgagaatagaattacctgctcagcctacccaaatgggttgttgtgggaattaaaggagatcatatttatgaaaccactttgtaaatcctctacaaaagattaaggaatgtgatactattaattccttctgaagaatcaaaatagcttgcaatttatttctaatcttcaagactgtgtatatatcttttgtatttggtctttaatgatgtgcaccataatgcaagacaaatgaacagactaatctctttccccctagatgttactccaagtcattctaaagcaagaggttggagggaggaacttttttttttttttttttttttaaacagaggtcaaattaatcgcaggtacacagggttctggacttttttcctactcctttcaaagttctgagaagcaggtgagtttactgtttcactccagagattgcttaaacagagctggggactcaacatagtatctcacccatgtggagagaaaagtgctgtagttcaggacaacccataa

SEQ ID NO: 63540 - DNA, 2342 bp, Bovine  19866881408336
  misc_feature (1)..(1): n is a, c, g, or t
ncttcttggaggaaagaatcattagctatgttaactgtatgttattatttgatcagtataggagtgcctcggtataaaactagttcagtatcgaacacatacgtgtatgaaaaactaaaaacataacacatcctagctgagagtcatttttcttttaataattgagcctttaggaacatttgcacagaaggcattgtctctgtaccataagtcattgaatcgaaggaaagctttttgtcagctcagcagagccctggcatgtaggaaagccaaaactctgtctcggagtcggagagcaaaccatcagggtctccagagaaccttgttgtacataaaccatcatttcattttctaaagcaactcttttggatgatttctgatctgagcatgaggaggggaccctgttcacacaccccatgaaaaggaagcaggaggaacaagtgtggctccctcaactctcccctgcaggttattccctgtctcagcccccttggcttctccttagccaagatcacaatttgaaactattttacttatgtgtcagcttgtttgtgatttattagtgataatcatccttcatccaccaaactctaggaaggtagggctcacaccactttagttctttatgtccaatgcctagcacagttcccagtccataagaggagttaatcttttttaattaaaaaacgaaagttttgccaaagcaaatcaatactgaaacagcgaggctgcacccccaatctcacatcacctgtgtctcagtccttctgctggccaagactcacacttgttgtcagggtttctgaaaaatgagacagacgctatctccactccctaatgagatgcttgtttgtaaccctgaaatatcactgcagtgaaagctgagaagccagaaagtttccaacaggaatgacacctcaaaaagatagcattaccaaatgcacttcttacacatttacagcgagtagcacttcttttgtggtttgggaagagcaaggaaagagcagccttaggtatcattctaaaactcacagcattcctttccctaaagagcctgtgtcatccaccttgcagatggtgagccaggctagatttccaaagtaaaccctgaagttgtgcactgaagcaaggtacccccatttgctcatggctcaagcagctggaccagcacccagcacagagggcatccagggacacttgactgttgatgagcaaaaagaaagcatttccctaatacttgactacgtaattaacttgtaaatgcctagaagtgaaaataatatcgggaaaagctacaatttaatacatccagtaaaaagtttttaatacaaagtatttgtggcaagaaaaacattgagtcaaaaaattgggggagcagatccaaaaaaaataaactcatggatttttaaaaatcttgtaagaataaatggtatataaggacttaccaaagattatatgaatgtatacattatcatgggcttccctggtggctcagtgataaagaaattgcctgcaatgcaggtgacaaaggagacccaggtttgatccccaagtttggaagatcccctggaggagggcatgacaacccactccagtattattgcctggagaatcccatggacagaagagtctggcgggctacagtccatagggtcgcagagtcggacatgactgaagcaacttagcacacatgcatatgttatctatcatatattcctttggagtcttgatttttctttatataaaatactgagagtaatttctcacactggaccagactagctgtgttttcttttctagtttctaaatggaattgaatgcttcaggaattcatttttgtttttctgctctaccttggccctggatctctggttctctttgggtcaagttacttctgtagccaaagggaagctcgtcatgttctataaagcaaagggataagtattgcagatagaatggctggatgcaataatttattggatgtaaaagtatatgagtcttttgataatgcatttaagtgacatcctaccagtgtgctgaaaggaaaaatatactactagatgaacaaaagcatcactaagaaagaaaagaaaagaaaaatggcgagtggtagacctgactctcttgttcccaggtagaaaaatggacaaaacagtccagaaaaatacctgattggctaggccactgaactggggagtaaccaacagaatcccactagtattctgtggtcatcccatcgactgtggagatggtcctcctctctgtgacttagaaagcagataagtgccctgacaagaagttaaaacctcttaaacatagtcacatcctccagtacatggatt

SEQ ID NO: 63541 - DNA, 2457 bp, Bovine  19866880538229
  misc_feature (1)..(1): n is a, c, g, or t
nccccaggtcattaggtgcccaatatgctactggagatcagtggagaaataactccagaaagagtgaagggatgaagccaaagcaaaaagaataccccactgtggatgtgactggtgatagaagcaaggtccaatgctgtaaagagactcattggaaaagactctgatgctggagggattgggggcaggaggagaaggggacgacagaggatgagatggctggatggcatcactgactcgagggacgtgagtctcagtgaactccgggagttgctgatggagagggaggcctggcgtgctgcgattcatggggtctcaaagagtcagacacgactgagcgactgatctgatctgatcggtgttccaggacattctactaggaaagaacagacaaagcttaatgatatacagcaatcagtgtaagcaaatgaaatgtcatgtaatagcattagataagacagaagtcagttcctgcttagtttgaaatagtctgattttttcctatgaagacagttttccctcctaataattatgtaaatgagtttgcatttagtgagcacatgccaactgctctgtgagacagtaagaaaatgtggcaggtagaaggaagaggtgagaataaagcttataaaataaataaatatgtgtgtgtgtgagtgtgtgtatatacatacatatatatatgtatacacacacttcataagcaataggtaattgaagcttcagcatcagtccttccaatagaatattctgggttgatttcctttagaattgactggtttgatcttcttgctgtccaaggcactctcaagagtcttctccaggaccacaatttgaaagtaccataagcaacttaaaaaaaaaaaaaaaaaaaaagaaacttctccccatgcttacctatgatcttgaaataaaagctaaaaataggaacaacagtatcctaccagttttttggagcaaattgctgagataatgaataaccctgatgtaaaagtaccttcactctccagaaacagaacaggaatatcagagatctacttaacacgaaaatatactcagttccacacagttagaaaaacattcacatccataagtggaatttcagtgtttggtacagttagtgggtgaaaaagaaaagggagtttttctacacaattattaatgataatacaacttgaaactggatttgtatcattacccagaagcccgcagtcaagcaggaatgccaacgccacagatattccctgatgggacccaagtcacagggcagcacctggcctgtctcccgaggtggtcaacacaaacagtggatttacctcgtttcctttgggtccttcctgtaatctgaacacggcacagaaaggcccgccattaattgagaagggaagggaggaagagagccccttgtttcctcaggccagcagtgcctcaggcacaactcgaaaaacaagaaaataaatatttttcaaagcgccaactttctgtctcagaaaaacgtgttgctgtctaataatttaaaaactataaccacaggcacagatggtggggatgggctataacagcttcctagtctctcctttgacctcttccattctcacatctaatgcaaaatggctttttcaccatgtctcatctaactggctcatgtttagaagacttttcctcaggacagaaaaagggtccagaggcttccctgacagcaccagggtcaacggtgtccctcccagggaaccaaaaccagcttgaaagaatagactggcctccaaggaaggcgccagggtgttcagtaaatgacagcatctgcatcctgagttttccctacgaagggcacattcctggacctggacagaagagaaacttgaacaaaatgcacctgctctcaggaacaagacacaagaacaaataagagtttcaacaaccagcccatgaataggagcaaaggacaggccggctgcaagtgtttcactccaagagacagtgatgagggagagaactcagacactccagtgggggctttgccatccaggaggcttgttgacatgggatcagaccttcccccagatggtccacgggacagacatagagttctaggacactgtaccactgatcgcaaggtctttttggtgaggtccttataggggctgctgtgcacaccattttggagaaggcgatggcaccccactccagtactcttgcctggaaaaccccatggatggaggagcctggtgggctgcagtccatggggtcgtgaagagttggacatgactgaatgacttcactttcgcttttcactttcatgcattggagaaggaaatggcaacccactgcagtgttcttgcctggagaatcccagggacggtggagcctggtgggctgccatctatggggtcgcacagagttggacacgactgaagcgacttagcagcagcagcagcagcagcagtgcacaccatttaa

SEQ ID NO: 63542 - DNA, 1297 bp, Bovine  19866880685441
  misc_feature (1)..(1): n is a, c, g, or t
ntgttcttgctggtatattaaaaagatgacttttgtacattaatattatatcttgtaaccttgatataattgcttcttagttccactagtgcttttgtcaattctttttgtgattttctacgtagacaatcatgtcatctgtgaagagacagctttatttcctctttctcgatgtgtatgaattttatttcatcttcctcagtttgtatgaattttattccctttttagtcttatttcattagcagggacttccagtacagtattgagtaggagtggtggagattactggcttggtctcagttttaaggataaaagcttctagtttctcaccattaagtataatgttagctgtgggaagtttgtagaggttcttatcaagttgaagaatttctctatattcctagcttgctgatagttttctttatcatgaatgggtgttggattttgtcaagtgctttttctgaagattagattttttttgttgttctctgtttctatctacaattactcctccaagtttcttggggaaaaagaactattcattgaaaagtattctggaagtccagtaagtctctcttcttgtcaccagaagctaaagataaccagatcactctttattcaccaaagctattgtcagcagcacacaggctctctcctatgtcttcagaacacagtgggtaaaccatccaacttcatagtctcctaatccacccacttcttcacattctaaaacttgtcaccaccctaaactcctcaaatcccaaatgactgactgtaagccactcacttcctatacctcctctctgagtttatatgttggataacatctactgttccctcatcatcaatctccagtttgatctgccttcatctcagtgcatcagatctttcgtatttcggctgcactcttttcagcttagatttcatgggtcataatttcaattacactcttgccaagaacttaatatcctttgcccttcttatttcttcacttccatctggcaagaccccaactggatgaatacaattcaactgccttattcttcctgcacctgagcaaatatagcaagagaaaaaaacaagagggtagatgatgacactgtaaatttataatcagaaaaatcaaatttattctcaggaccatttagcaatttgagtatatcttttgttccattctttctagtcttctccacagtatttcaaaacttctccactttcctagatgtaggacaccttccttaatttcccccattgtcttcgtatatttctgattcacttcacaaagcaaagagaaaa

SEQ ID NO: 63543 - DNA, 1119 bp, Bovine  19866880713501
  misc_feature (1)..(1): n is a, c, g, or t
naagcccccagcagaggagttttgactggagctgggatgcttagaggttgataaccagataggttgggaagatgtagccaggacccagcaagtagaagaaggtgctgcagaagagaactgagagaagaaaggaacatgagattcagttctctgtaatattgttggacttaatatacacacacacacacaaaatataatacatacatacacacaaaattttctttttttaatttaatttttttaactccaaaaacattttgttttggggtatagctgtttaacaatgtcgtgatagtttcaggtgaacagtgaagggactcagccatatacatacgtgtatcccttctcccccaaagcccctcccatccaggctgccacataacattgagcagggatccctgagctgtaaggtaggtcttggttggtgatccattacatgcaacatttttctctgagaatatcaaattgaccctgcaaatcagccatggactctcaactagagtttggcaaaaaaggaagaaagaaagaaaggagagagtgagggaaggaaggaaggaagtcttgctgtgtccattccaagagatcacctcagcctttcttctaatttttttttcctttaattttcatgaacatgagaacaagtttccttattttaaaatgtaacaaaacctagatttgcataattgaaacatttctgaaagtgtaatttagaatttggcaggacgtagatttcagggaggggcgaaactttatcgttggaatttttatatcttaaagaccgcatggtgaagtattgcctgtcatttcaaaaactgttttcttaaggagaatttttagctaaacacattgctttttttttttctttttttaaagacatgggtagcattaaacatcattattacattactgagtttgaaagataaaagaattaaataattagaactgccattatcatagtcaaattatattttctgaagtttaaaaattcaacctgtatgttctcagtatattctagttgatcataagtgggtggtgtttttggcagaacttcagtacttcgtttatagaacttctgtacttcgtttataggtaaacatcacattctgtcaatcctcacca

SEQ ID NO: 63544 - DNA, 1913 bp, Bovine  19866880726129
  misc_feature (1)..(1): n is a, c, g, or t
naagaggagcaccccagtgatcaccactgcctactcggtgcatagaagtcttttggaggaatttaagggaatgagttgactttgaccttcatagaacatctaacattttcctttacaattccaaactgaattttttttgcttcttcctttgtctgtatttcagatgtgttctgcttgatgtcaaatctctaaaagctaattaaatgatagatttttttttcattgagtacaccatatatctttcaaggttaagcaagaataaaacactttgcctggatttgccatcgtgaaattgttgggcggggggaggtgggtagtagaaggaaggatatttttaaagtgatgcactccagtagaggaaaaaaaaaatcctgtcagttaaaacgactagatacagccagtcttataaatgttttataatcattgtaaaaactcaaagtgaattaatgatattttcaaaatttcctgggagaatgacttcttttctcactgaattatcttggcaacattcccaccttttgagctcactggagggtgaagagaatagcattcttcttgtcctgattttatggaaaacaaagcaatctgctgtgtttctgaggatgctgttattaccatttaaaataaatgatgatttaaaagaatctgttccttggtacctattcaggccattctaatttcattgacactattatgtacagacagttgaaagaattatggctattaagcagagtttaatattatagaaagtgaatacataatgactgtatttctgttacttcctgtttttattatgaagagttctatagtcaaccaaatttgaaattaggaaccatttctggactgacagtcaagtctagaaatggttgtaatcttaaatctcttgattttatgggaatggtatcaagaatgaatgctgaggaagaatttaagtgttaacccagcttcctcctcttttattcctttttgacctcttccaattctgtgaaagcaccttgctttctgctccaaagcgccctttgtagacatgtatgtatcactgaacgtaccaggatatgtggtaattagatgtgtatatttctgcatcctcactggcctatgaacttctttaagaagagtatcatgtacaattagtcaccagtacattctcaagagccttacacacagccttaatttagacagagactcatattttgtgttggggaggaagaacaggaagaagagaggaaggataggattattttctgggcaccgtgaatgatgaaaatattcctattaaattacatgagacctaaaagttttaaagtgtgttaaagtagaagcctttaaaacccatggcaaaaccaatggatattttagcagattaattaataatcacttctatattaaagatctgaaaatggaactagattctacctgttcctaaagtatttccctaagacaaatctgagccctttgaaaatgtttaatatttatgcaaaaatactataacaatttgaatgagaaaactaactcaaaacagagacaaccgataaacagaaaacctgtgggaagttactcaacgtttaattaagaaatgaagttagggttaatttctcatccattaaaaaaagctcacaattaaagtgaaaccaatcaactttgctaactagagtccaagctggttttagaaaagtcagaggaaccagagatcaaattgccaacatccactggatcatggaaaaagcaagagagttccagaaaaacatctatttatgctttattgactatgccaaagcctttgactgtgtggatcacaataaactgtggaaaattctgaaagagatgggaataccagaccacctgatctgccttttgagaaatctatatgcaggtcaggaagcaacagttagaactggacatggaacaacaga

SEQ ID NO: 63545 - DNA, 3713 bp, Bovine  19866880757747
  misc_feature (1)..(1): n is a, c, g, or t
natatatacatatatacacatgggtatgcatattttatatctgaatatctatatctatatatatatttaaaaatctgattaaaatattgggttctcccaaaagttcatttgggtttttcctaaaacctgaacaaacgttttggccaacccagtattcttgaaaaagcaaaattattaagaatcttctgttggcccctaggtgaatctttcctggggactatttcaatattaacactttctcacaaggagataatatacacatcaaaacgctaaactgataagtcataattgcttacatttctcctggtcatttgtccatttattctttacaatgctgtatagtttaatgatgtgaagcccagctaatcaactctcagaccactcagtacattgctcattctggtatctctcaaggattacatatcagcatcctttcaggaaaaggatatggttatctatctatggtagagttacctctaataatagccctagtattttagtgattcctacttcataaggtgtaacaattatgctattttaaaatcccgaactgcaaaacagttttcctgagatattgtaatatgaggaaaagatgcttgtctgagctatcttgaaggagaagggccagagacaatgagagccttctgacttgcaggctgtcatgatgatttctctaactctgttcagatatccattcatgttacagagagaatgtcaactcagtaatccaaacttcccattgttgctgaagtatactgcagcccctacagcgggaccgcaaggagagagtgtaagtctgacttaaggtcacgtcctcttctcccgctgaaaagtatttctttatacagaggataaagaatgtgctcacatatgtgtgtctcaatttcagttatctcgtggttcctccagctgcctcgtaagaacggaggacatctgtgtgcctggctgtgctacaggcccctgtacaatggatgatgaatattaaacaggttacatcgcttccgcgcagacattcagtgctgtggagccaagactccaaatctatgttttcccacagacgacttctttagaacaattctttagagcccagaaagctgcgtttttagtggaaatatgacttcattttttggcaaggtggaacttttctctttcatagattgagactggcttctcttaagcatgatctgtcctagacagttactgtagcaatcgtattagaaatcaacagtgttcatcttcattgtcatcatcattatcatcacttatctttacagttattttactgccagggaattacatgtaagtgttaattaactcagttaatcttctcaactctaagaggtgagtattattattacaccttgagttgacacaagaagagataaaggcaggggaatttaaataagttgcatgtggtcacagaattagtaatgctggcatcagaacttgggctctggagtaagtctgcttggattcaaactctggctcctgcacaataaacagtgtgactggaggaaggttaacttccctgaagctaaatttcatctgtaaaagtgggggagagaaatggatgatggagattaagatgcgatggggaacagggagagaatgagctgtaggaagaggaaagactgggccaatggggtggcactggcttgcattactagtcatcattttttacatttaggctgttacttctagatgcctaatgcaggtgacacaggagatgcggttcgatccttgggtcaggaagatcccctggagaaggaaatggcaactcactccaatattcctccctgaaaaatcccatggacagaggagcctggcaggctacagcctagagggtcacaaagagtcagacatgattgagtgactaagcacgcgcatgcacacacacacacacatacacatgtctaagtatccgggctctgaatccataatcaaattacacaaataaaagggttggcaaatgtcagtttctgatgcaaagtagatttgaaggtaaaaatctacacagatcctagaagacatagctgttcgtctgaagggaaaatggaattaagagttcgcactttggtaaggagagaatgaaggtattaacatgtcctgtcatcactaataaagcacattttcccagaaagaagatgaattcgttttaatcctccaacttcacactttcaaatcaggaaagtcaccttcaggcagtgctatctgaggataatgaagggcaacagaaaagaaagaagcaaatctaaaaatttctgatgagtgtttcaatgcataactcaaagtgacctttatcttaatgttagccagaaacaaactaaataagcaaagaggttttttacatacttagcaaactaaggaaacaacagaaattctagcaactgcctgtgaattattttctttcaacatcagttgcttaataagaaatagaaaaaagagagagaaaaactctgttgacactgggagaaagtgatatttagacactaacaatcattctattttggagctccttagagaagtcaatgaaagtcagattattggggggggagattttcttagttcacaatgtaaactctgataatttaaacaccgcatacaactaacctagtaagacttcctggagataaaatagagacaaaaagaatgaaataaaaatgttttcaaccagaaggtatacgacagtggtgaactcattgaagaacaaataagttctttctaacttactttcaagctgctatccttatttataggaatattttgaagaaaataagtgaaattcaccttttccttacaaccaatacttataaagcttgaaatacttactcatcaagagatacgctaaggacaccaaagcagaaacaaacagatgggacgtaatcaaacttaaaagcttttgcacaaacaaagccatcaacaaaatgaaaagacagcctactaaggaaaaaaatctgtttataatatgaatatataaacagctcagacatcaataaagtaaacccaattaaaaactggacagaagatctgaacagagatttttccaaagaagatattcaaatggccaacagatacatgaaaagctgttcaacattgctaatcatcaggaaaacgcaaaccaaaacttcactgagatattatttcatacctgtcagaagggctatcgtcaaaaagaccacagataacaaatgctggcaaggatgtggaggaaagggaacccttgtgccttgttggtgtgaacgtgcagctactgtggagaacattgtggaagcttctcaggaagactaaaaatagaaattccagaaattccagaactaaataccagaaattgcacttatctgtatgtctgaagaaaacgctaactaaaaaagagacatgcaccccaaagttcaaagcaacatcatttacaatagccaagatatggaaacaacctaagtgtctatgaatggataaagcagctgtggtatataatatacacaatgaaatactactcagtcatagaaaagaacaaaaccttcccatttgcaacaacatggatggagttggagggcattatgctaagtgaaataagtcagacagagaaaaacaaatactatatgattatcacttatatttggaataaaaaatacaacaaactagggaatataacaaaaaagaacagactcagcgataacaaactagtggttaccagtgaggaaaggggaaggtgaggg

SEQ ID NO: 63546 - DNA, 949 bp, Bovine  19866880820611
  misc_feature (1)..(1): n is a, c, g, or t
nattaggcacaagcatcctatttgattaaggaagtgctctccctctgggcaaaatccatctgcatctaggctcctgggcactaactattcagcattttattgtatcagctaaactttgacaaagacaaaatctttttaccctctaactcataaaacctcctaatttatgcctcagcctcacttttttagagtgcccactgggataattatagtggttgtttcacttctgtctgctttatttagataataagccctaaaggccagggatgcctttccagtttctatctatatcaccaaatacaatatatgagaacaacgtttgtgaaataataatattaggctttaatagcttttggtaacaagttctgaacaatgcaggcaccatattaaagtcaagttctgtttacttccttcttgagatttctacatagatcccaacataagaaattataggccattagtgtatcattcagaaatttttatccttgaacatttttagctgtgcattactggtacttaattctatttttgtatcatacatatggttttctctagatccaatgccaagaatttcattaaaatttttttctaagggatagctcagtaatgagtgttcttggtaccaacactttgtcaggcacttttaaaagtggtttacatataaaaaattgaaaaatatttaaaaacctgttcagtatcctacaactaagaggatgcagtctgggatttgcagacagattgactccagagtccgcggtctttaccaccacatttcacgtagtttcaactccaattttgaagaaaaaggagttgaacataatgggtcatcataattactaatctaacctcatactgcatttcatgatatactaaattctacatcaacatacagaattttttattatgtctagcgtttattaaaatataaatgcttttaaagtataataaa

SEQ ID NO: 63547 - DNA, 806 bp, Bovine  19866880833589
  misc_feature (1)..(1): n is a, c, g, or t
natatataattattatatggataatacaattataatataccccattatatggattaaaaagaaggaaggataacaatccattctatttgaatactttgtaccctacataacagtccccaaacaatcctgcttgatcctcatgagtaaatattcctttgaagtatgtgttttccttattttatgtctaggagtgcttagttttgtacaaatcctttctaagtttagaccccaggtcacttaactacctaccaagttttattgctggcacagcctcctgtcattaaaccagagagagatgtcttacattctaattttattagataatttttcaaactttaattatataagaaaaaacaccagtggaaacattagaatctccttagtatactgaatatttggagtttaagtacgtaatattttattccataataaatatgcctaactcattagaaaagaccctgatgctgggaaagattgaaggcaaaaggagaagggggcagcagaggatgagatagttagcattactgactcgatggacctgaatttgagcaaactccgggagatagtgaaggacagaggaccctgactgactacagtccgtggagtcttagagagtcagacgcaacttagtgaccaaataacaaaaatatgcttggaattttcaaagttaaaattccaaagataatgacctttcagttggatgaatattagaacatcattccccagatgatgttcactttgtgcttttgtgctgtctggaagatgatacttcattcctaggacaggagtctttgtaagaagagggg

SEQ ID NO: 63548 - DNA, 1990 bp, Bovine  19866880864751
  misc_feature (1)..(1): n is a, c, g, or t
natatatgagtcctactgattctaagtatatgaaaccaacattttctctttgtcggtttgaattcaatttataaatgttgatatagagacatttggaaaacatagttttcatttctaatacacttacaccataatatatcaatatagagaaatcggtagattctaaagcaaggaaaaccttctagaagagtatgaaaacaaatgaaaaacactgaatcatatctgatcatagaaaatatcaaatagctacataaaaccatcccaagcataaagaacacttggcatatataatggcattatttcaataagagtatgtggtccaaggcaataaccagctgttaatatcactgagctctcctatgcaacttaattagttttcagtacatctagcaattactgttggcacgcattcgagttccatatcttgttgtcttctatctcaagaggtttcaacccgattacatttttcctggtttaaaaccataactcctttattggcatccaagtatcaagagctgaattctgtgtctttcaccctctgcttttccctcatgtagacttatgctgttagaaatggttacttgaatttcagtagacactcaactgatgtatccctaccacaatctcagtcgataggaactctacagtccccatctgaggactctgatcttcatcatcacttatgaaggaatactcaccaacttaggaagtcttcgttttagccaagatagtatcaacgggaaactttccaagtcagaagagtaaatggtcttttgtcttcaaagtgtaatcaagcaggatcccacaggtcctctccagggaaggtcctattccccatcctctctgaagtacccaggtaacaaaatgtgatgcatatttcctgagttgttttgcagatgctattaataaaactcccaccaaatggaagaaattaacacaaccccctctgaagtctgaccaaactaggaactatttgcaatagctcatcatctttccacttcaccatcaaccgatcggagaattgtgcatgagctgatcacgtatcctggatgcccctttcttgccgcacctttaaaaatgttttgtggaaacccacagaggagttcaggctttttgagcactagctgtccctaactctttgcatagcaccctgcaataaacgctgcactttccttcagcacaacctgatgttagtggattggctttacttcaggtgaggcaacccaagttttggttcagtaacaaagggagagtttcacaacatagttagggtttatctgacagaagattcagagcacttggccagtaattcttagttagcaacatttctctcctttagtcctccgtggacatgaaataaattttctttaacagattcctcaagtgcttactggacacaaagaactttcctggattttttaggtgtctggagcctggcatgtgcttccgggcactgacaagatcatcccacaaccatccagagtacttaaaatactatttcttcaataagttaacttagattcttactgcttaggtcatttacagtgaacgtaacttttgtttgtttgtttgtttctggctgtgccacttggcttaacccctggagaaggaaatggcaacccactccagtatccttgcctggaaaatctcacggactgaagacagaggagcctgatgggctgcagtccattggctcacaaagagtcaggcacgactgagtgactaacacttacttaacggatcttagtcacccaactagggattgaacccaggcccttggcagtgaaatcaccaagtcctaaccactggaccaccagggaattcccaaagtgagtataagtttgatagagctttctaattccataaatttttactccatgtagtgagttattgggaggaactattcccttcctaacactgtatgtgtgtgtgtgtgtgtgtgtgtgtgtgtacatgtgctcagtcatgtctgattctttgcaaccccaag

SEQ ID NO: 63549 - DNA, 1527 bp, Bovine  19866881168634
  misc_feature (1)..(1): n is a, c, g, or t
nctctcagaccaagtaacagatttatttatttaaaagacctgtctttagggggaaagtgggagagggatctattaggggtatgagattaacaggtactgctgctgctgctaagtcgcttcagtcgtgtccgactctgtgtgaccccatagacggcagcccaccaggctcccccgtccctgggattctccaggcaagaacactggagtgggttgcccatttccctctccaatgcatgaaagtgaaaagtggaagtgaagctgcgcagtcgtgtacgactcttcgcgaccccatggactacagcctaccaggctcctctatccatgggattttccaagcaagagtactggagtggggtgccattgccttctccgattaacaggtacacaaactatataaacaacagagaggaaacaaagacctaccgtagggtataaggagctgctcaatgccttgtaataacctctaatggaaaaggatgtgaaaaagaatatacatgcacacacacacatatgtaaaactggagtactctgctgtatacctgacactaacagaatactgtaaatcaactatagttcgattttaaaagttttttaaaatttaaaagacctgtcttgttcagaaaagatttaaagatgatgaaatatatatcttattgataaagaagttgagaccagagataaagaatgttggaacagggtcagacatctcatatttgcatcctctctccagtggttccacgagctactccctgtgtgaccatggacaattccacacctcagtttccttatctgtaaaatgaggataataacattactacatcaatgattaactgtaagaattaaataaaaatacacatcaagcacatagtaaactatcatctccctcagacaaaataagatttcaatgaattttctaggtgttttaaaattgctatgttttccccttccatatgcactatctcttcaattagagctgaaatcacataaaaccaataaagtatgtttgggtaatttccagaacatcgagtagcagcgatcagaagggaaatatattataatgagaagggaaagatactaggttcaatgagaagtatacaaagtgtatttggttaggaagatcatttgtgattatgagatgattaacattactgcagattatagaactatcattgtagattttgagttactggaaatagaatgccttaatgtagtagatttggaaaactgtagttcatttggtgttacacctgaagtgcaggggaagtaggaagggaaagttttagagtttgtataatcttgtaaaagtaataacaaggtgagccacagacacagtcagagactaattagccaaatggagcagagagatggctttaccaggctcgcgataccatatggagcaaagccacatgcagaggaagcaaagacagagcaacaagcagatgggttaggtccaccttgggtgaaggttggtggtggagttaggagggagttatgcaattgatgaaggacagaaccccaagggacatc

SEQ ID NO: 63550 - DNA, 900 bp, Bovine  19866881209626
  misc_feature (1)..(1): n is a, c, g, or t
natcctttctcttcatcatggcatttttcccttgtgtccttgcgctatcaagaaggccttgcattcaagaccaccaatagtccagttgtattcatagctctctctgcttttcaaggaggatacattttcagtggtttatataatttcagtacttaagttctctcaagagagattgttaatacaatccaacttactttttcaaagctttaacataaaagacatgattgtaaaacgtaaaccttgtcagtcaagatgtgcatgcctcacactcactcattcactcacactcttcccctgagaattacaagctgaacaagtcagaggaaatttagcaaaacatactgaagtgaaatgaattcttttgaagtagcagaacttgtgtacaaatgtatgatttttatttgctaggattgtgtttgaggaggtgttgccacagggctggccagagggcagagcacccaatgctttgcttgagtaatgtggagagtcaggagttcagcttgcattagcgtctgcacgcttgtgcgttgccctgagttgtcagcgttctgtgctttcctgcagtccgtgttcctgcatgtgaacataaggtgagtgactgggtggcgcagtagaatctaatctttcattcttctgccaaagaaaccaaattagaatgattgatcttgagtttccttaggatttgttgaaaatttctagataaaaagtttacagcatttgaccttaaacttcatggtctttgtattttctttggcaacaaaaattgtttatatttagtttatttggggaaaagcttaatttatatcacctcaactgagatttaagcagtaacatctctcagccttggtttttaaatctggggcatatggaagtgatgtatataaaaggctcagactttag

SEQ ID NO: 63551 - DNA, 1307 bp, Bovine  19866881288747
  misc_feature (1)..(1): n is a, c, g, or t
ntccccatctatgtcaccatgacccatacaccctcttgcttaagctggaaacctaggagtcgtctgtgaaatcacttcttcccaccacttttggaaaatttaaatgaatttgtcgaatgaagttctatattacccatctaatgcccagctggtcgggtgattacagtcagagtgtggtgatgagacattatactcgtgttttctcacgtgtttgggtttctggccacactgttccatccccatgtacggggtttatgtttttgcattttgttactggtggtgtattgttggtgttctgtgtaacacatgcagggaacatccactatagaacagctgagagattctctcctctccatgaaggcattggatttgttgaaagttactgcgtatggcctttggcacacacagctctcagcagtattgccctctttaattatgtcccccaggaaaaaataatcacttccctggtgaggcagctttcctaatcaaagacttcctgggtcttaagtaataagaaactcaaaagtttcgaatggaaacttatagtggggcttaattgggcatgtattttaatctcctaggaagatgaagaaactctaaatgttacatacaagaaaatatttcatgagggatacatggatggtttcatatattttgttctgtttttatttaagagaagttactggcaaaataatgtgtgcattagtattaaaaagtttgagtaatgtatcttccttgacctgtaaattactgcttctttcccaatcattttattgtcattatttttcacttgaacctttttctaggtttgagaaattttgcttggttatcatatgaaggaaggtgcctcaggcaagtagactgaagacctgagtcccagtaggattttaacaataagaggaaccgtgccccctaacctcccaacccagggagacagttaacgaaaaaaagataattatagattgaactccaagggaaggccctcttgtaggggtcagaagaagaaattagctgggaagttaaaattagctagacagtggttaaagcaattaaaagtggattttattcaggactattgcagtagggccagacagacctcagtaacgaattggtttcaattccaaataaattatggacaagtaggaacttatataaattatggacaagtatgggtttctgttgtggctcagctggtaaatagtgcacctgccatgtgggagacctgggtttgatccctgggctagaaagatcctctggagaagggaaaggctacccactctagtattctgtcctggagaattcacagt

SEQ ID NO: 63552 - DNA, 933 bp, Bovine  19866881348930
  misc_feature (1)..(1): n is a, c, g, or t
nacagactaaatgctgtccttggggattttcaaaacgtcaacaaatactaaaaaaagatgtgagctgtgatcaattctattatactctgctttacaaagaaatgattctatcatacaatggagaacatgtgtccttcagatagtacttaatagatcttttaatagaaaaggccaattttggtaataattgatttatgcagaaattaaatacactactgtggatgactaggttgctaaatagacaccaccacgccatcatctccaccacgaccatcaccacacactgactgagtaggtggtatgctgacacatatacgtatctatctcccagagcttgaaacagcctcatcagtatgattttcatcttcgcggtgaaatgtctcagagacatgacaaataaacacaacgacccacaattagattttagttatcttataggcgtctaaagtaatcaatgtactcaaacagcaccagcaattcctggctctaaatcatttctcatgaaaaagcacagaggaataaaatatagtaagctttatctcaaaagacattaacttgcagaggatttataaaatattgatagagtaaagaagcccacagggttaaaccctctgctaagattgatgaaattgtccaccaaaactttattgatctattcctattaaggaggaagttctgaatttctgctgagaaaggactgaggttaaccagtatcaaagggacacttcaacctcaaaaaattaattaatgaaaagagcagaaaaatattccatagttgcatggatcctatggtaaacaaatcatctttgccccaaatgtaatttatctgggtacaaattggctataaacataaattttcagaggacaagaaagaaaaaagtaaggcataccttgaacttaccggaatcagatataatcaagagcacagcaaca

SEQ ID NO: 63553 - DNA, 1659 bp, Bovine  19866880449539
  misc_feature (1)..(1): n is a, c, g, or t
nccctgaatccccagtacaaccaagttaaagtccaattccttagccttgctctccccctgtaccacggacggcacccctgcctgggtcctcagctcctcataccacctactacccagcagcctcctgcctgcagcatcctctctgggctctgcttgtcttcccagacttcagtgccagttttggaagctccccaggtgccctccccctctgagctcccacagcctttaagttcccacccagtcagtctgccctcttcttccccaggtatggaagttctatacccccctccatcatatcgccctcctccatcccccccacccccccagccaggctgtgagcttcctgagaacctgctggtctcctcctctccatctgctcctggcaggggacctagaacagaggcaggcaggcaggggctgctgagtagtgggggggatgaaggaggggaccccagtgcaagcactgtgggaagtcccgcaggtggtgagcagctctgagtaggtgtctggaagctggtgacgcaggtggggagctttgctgtcagggcctgcagtgcaaaccaccgcccccaccattttcttcaccaagcacccaagcagaggtgggagaagagacttcacagaggatgaaagatgggcggaggggactccaggtggctgacacagagaagttggagagggacaggacaaggggtggggtgatgaagatggatctggagaggggaagatgtgggcagagaaagggagggaatgggcagtgctatcccaactttgccattttctgctctgtgaccttgggcaagtcactcagcctttctgggccttccgtctgaaagatggaagcttgacttacaggctggtgagaatcacatgcaaggcaaagtaccttgtcactccattcattcattccttcatttatccatccattttcccgagttctttaggcacaacagatgtattgtacatggtgggcttcttcccctatcccagacttagggttggctcaaatcccaactcagaaaggatggagctgggaggctgaagttaataatactgattctatcatcagggcctgaaaagctccatagactgagagatggagagggggtccaaggtcaccccctgtccctcactatacacctggcttgtgctatagatgggacagtggctgaaaagtcagagatcagaaaagttccacttctttggattagcccttaaaagcttcctggaggaggggatttcccagccatctgcttggtccgaggatggacttatcattgaggccacagactggagtgtgtatgtgttggtggggacaggtgtgtgtcaggcatagggagggcgctctggtagagacaagaggctaggggaggtcacagctggttcccctctctctcccctccaggtgcactgtggtcagctgagtgacaatgaggagtggagcctgcaagctgtggagaagcatgtaagtgggggtagggctggggtaggatgggggatgggggctgctgaagaccctcatcacagctgatgggaagatgatctggccagggagatggacagagctgggttccagggtcgcacttttgggctgtgtgaccttgagcaagtcacttaagctctctgagccacagttttacatctgagaatcaggataag

SEQ ID NO: 63554 - DNA, 1425 bp, Bovine  19866880462246
  misc_feature (1)..(1): n is a, c, g, or t
nagacagagcaatctgaccctgttcttgccttggaagagtctcggggctaggggtggagacaaaccccagtattttatctgatcatggaccgagggactctccggggaaaagagggagcccactggagtgtgggggtggagggcgatggcaccgcaggcagagggaacagctcaaaccaaggctagagtcccaaggtggcgagggcgataaaggtggggggtgtggcttgctgaccgctccgcccgccccagaccctggtggccctgaaaagggtgcaggccttgcagcagcgcgagtccagcgtggccccggaagcgacccagaatcctccggaggaggcagcgggagaccagaagggtggggtcgcatacacagaccaagaccgaaagatcctgcagctttgcggtgaggacctggccgctgcggggaggggcggggcgcgaacctgtgaaggcggagccacgggtgggaaggtccgtgggtgggcggggcctgcggctggggcgcggccggggactggctgggacagcaactgaagaagagatcctgaactgggtgggaggtggaattggagggtgcacgcccttgggggaaatctgtgggccctctgtctgactcctgccccgccatcgcaggggagctctacgacctggatgcatcttccctgcagctcaaagtcctccaatatgtgagtccctgtgcccctaccactgtgttcctcccggaacggaagtcctcttgagcttccatctcagtacagattcagatgtcctctcttctccacttacctgcgagcctcagaaaggcaaagggtggggagtggggatctcccagatgcgaggtcagcccctcgctgtgtccctccctctcagctgcaacaggagacccaggcatcccgctgctgcctgctgctggtatccgaggacaatcttcagctctcctgcaaggtgagggcccagagccactgtggggcagggagagggacctgggtctctgagaggaaaaaccttgtctgtcctttaaccagcccacgtcgttctgcccatcaggtcattggagataaagtactggaggaagagatcagctttccggtgagtcctgtgtctgtcccctgtgttggagtctgcagaagcagttaaagtggaccaggtattcctgggatctgcccattgagactggaatctactagaatctcttggaatctgatggaattatctggaccttcagatctacttagaaacgttatgagagatcacaacctctcatgatcaggatcccttaagagaaatcactcacaatctacagaaaggtttacttggggccaggtcacttctgttaagtatctctgggcttggctctcttagaatccattaggatcagtgagaatcctggattctgcttttttctctccagttagggaagac

SEQ ID NO: 63555 - DNA, 640 bp, Bovine  19866880495889
  misc_feature (1)..(1): n is a, c, g, or t
nagcctggaccagacttgtagcaccccgccccctgccccacacccccccaccccaccaaggccccgggtggtcccctcaagcgcttgaaatggaggctcagaggaggtggggactggctccgaggcagacagcaggtcaaggctgatgctgggccagatgctgtggccccagggctggatgaggcgcctctggctggcccctcccccaccaccctgcctggcccttggctgtaaacacagagagaacaagttccgtttcccgggaaatatttatctcaggccgtgtggggagcgtgcgctggcctccgcctgtccttcctgcgggctggcctggggcaggaggtgagggggcttggtggccttggggggcaatctgtggggctcccgaaggctgagccaggaagggtgtgccctgtggctcccaccagagctggagtctgaatgccggcacgcgcggggagaggaggcagctgataggagagaagccgccgcataaccttgcctctgtcatgttcctattttcatccctgtcacccgtctccgccggttcctgcctccaagcctctgctcctgtctgctgcccccacctgggatgccgtttcttccacttgcttgtatgtcccagctctcagctggcttc

SEQ ID NO: 63556 - DNA, 922 bp, Bovine  19866880521494
  misc_feature (1)..(1): n is a, c, g, or t
nggagtgagtgaatcggaggcagagttgaaagtggacctatgtcacatattcaaccctggctctctccctgtcctcgggtgagaaggccgaagatgcccattcggggcctggtgcccagtggggtcagcatgggctcactgctgggacacagagcccagccctgaggatgtgcctgcagctgggtgctaggcgagggagagaggggggacctggagagtcattattaatttatttctggccgtggcattccccgtggggcgggggctcccccgggagctgggacagatggtgttcctgggagccagcagtgtctcggcagccgctgctacccgccaggaaagactggatttgtcatcctcccaggaagctgagaggggagagggctttggagaaactgagcccatcttgagagatgggagcggggctgcaagagcaggagccgggcccaggcttctcgtttctttctctgtgcacagccccctttccctaggccctgctccctgcaagttcaagttctgcctccttcctcaccctccccacgaggcttccccagatcatccctatttgttcctgctgcctttccttcgccggggtcccactgccccctctctcagcccaaagatatgggctatgagcccccctgggtctcatttctttccccccagtcccacacccatcacggagatggcaggtgtctgcctggcttctgagcagcgcctgctgtgtttctgggttcacttagcaccccgttccgggtgcccgggcccatgctcagccctgctggaaagaggttgctgcccctggggatcccctaacacagaaaggctaggactggagagagtaggaaccctagggtgtggctcaaactattgggacacctggaggtaaagagggatggggagcctcctgtgaaggtggagc

SEQ ID NO: 63557 - DNA, 1705 bp, Bovine  19866880523387
  misc_feature (1)..(1): n is a, c, g, or t
ncaggcagtggaggtgtcctgagagctcagttggtgttgagactgcccagcagactcagggttcctgggagaagtctcaggagccacactgggtccatgggggcatcctaatggacctaactcctggcttctgcttaagccagagcacttcttcctcttatctgtggggctccatgcagattaaattagttctagcaccaaaataaaaacaaaggcactgggttagaaaattagttatcaaaatgcagtaaagaagtagttagcaaagtttatcaaaggcctgcacaggccagatactgtgttggccactgagtctctcacacagctacttctgcatatacattcgctgtgtgccagagacctgcccagtgcttcatatgcatcatctcacttaattctcaccagcatcccacaatgagtaccattgccatgctagagatgaggaactgaaattcagggagttgaattaactccccaaggtgagcttactgttaagtagatttgttgtttagtcactaagtcgtgtccaatcttttttgaccccatggactgtagccccccaggctcctctgtccatgggatttcccaggcaagaacactggagagggttgccattcccttctccagaggatcttccctacccagggatcaaacccatgtctcctgcattggcaggtggattctttaccactaagccacctgggaagcccaagtagattaggtgaggtttaaattcaggtctttctggggcaaagctggcttctttgtgccacacgatgtgcctcactatgagccagaaaggtatcaaacttcatatggggactgctgtaagaagtcagtaagacactacacagaaagttcggattaccatgcccggcacacagcagccatctcacagacggcagtcacctcattcacttggcagcacaaattgaatccttctgtgatccaggccctgtgctaggtgctggagttacagggatgaatagagcatggtctttgtcactacttcctcatgtgtggagtaaagagatagaaacaggcagttaaacaagtgctctggaggtgccagggcaacaggctctttagacaatttggtatttaagctaagatcacttagagatgggtgggaatagagaagacttatgtgctgagggagcagtgtggacaaaaggcccagaggtgggaatacccatccctgaggggaagtgacctaacagacagacctcacaaactctcggaggccaggttccttctgcatcctgcctgactgcaagcgggccaggccactggctggtgctataccggcctgtatgtgtgcatctctccatcagagcctttcagcccagtggacccaagtgctgagaggggctaggtggatagggaggaggaggaggcagatatatggctggagtcggcagagccaggtgatgtatgtggtgcctgagggagctgcacagtgacgtgctggattccaaccggcaagcgttgctccgctgggattggtgccgaattattgctccatatgaaaccccaggactgatgggagctttcagttacagactgatagcaacagccaaaattggattgtttgctatttattttttttaacttctgtcaaggtcactaccataacaggaaaacactgcccaagtagcaggtattcttcatccactctgcccgcaagagcaatctgcagccacca

SEQ ID NO: 63558 - DNA, 679 bp, Bovine  19866880551332
  misc_feature (1)..(1): n is a, c, g, or t
nacagaggagcagagaagagagaactaggtcagtacagctaagtctctcagccagtctgaggcagtgccacctcgacatgataaagtcccagtttggttgatttctaccacctttatgactctcacaaaggtggtcggtgctggcagataaaagccttaaagatctgcttgaagggaaaatgaaaattggcacctcccacgatcaatatctgcggctgctactgaaatgcccagtctgccttctttgaaagcatctttttctgctttttcagtcagttcttttgcacaatcacaactagagactcaaagcatccagcctgagcctgggatctggcagagggaggcagcattgagttacagtaaaacataaactctgcaggaagccagacgaggttctaaatgctatctgtgtgacctcagacaaatcactctgcctctctgggcttcagttgtctcagcggcaaaattaatacatatcatgtggatggctgtgagtagtagagctcactctctgtacaaagtagactatttcaaccttaacccaacagctgcatgctggggcactaggggagtgggcaggaaaatagcagagcctgcaatgagagggcagaacaccccaccttccctaatttctatcagaacttccaaaggaacagcccaaagaagtccttgctgggga

SEQ ID NO: 63559 - DNA, 662 bp, Bovine  19866880632153
  misc_feature (1)..(1): n is a, c, g, or t
nactggcctctgctgaagagtcccgtttaatttacaatactcagaaattgcatcgcatgttttagctaaacttggaagacgactctgggattcccaccttaactctaatgcccgggccctgctaggtgtttcccttcttgccacgcccccatgtccaaactccatttcccaatacgccccaggatgctgtaagtctgcagtcattatgacgcaagttctacagccttctgggcagtgtagtttatttctccccccgctacgtcaaggtctgcggttagggactaccactcccgtgaggtagtgcgtaattccactccgcggcgtcttcgaacgcgccgcggcagccatgttggaagtggtcagcacaggggccggcaccagagggttatcgaagcagctgtcacgatgctggggtccctggtgtcgaagagaacagcgccggcgccgcggctccttcttcagctgcttaggtccccatcgctccggagccacgaaagtgccaccggccagagtgtgaccaccgggggtcgcggggagcctcagtggctgagggcggccgtcggggggcgccatggaacgtcgccggccctactcaccggaggaggggcagccactggagggcgccagagaggacgtaccgagaccccctgccttcagctgcc

SEQ ID NO: 63560 - DNA, 1088 bp, Bovine  19866880640844
  misc_feature (1)..(1): n is a, c, g, or t
naaatatgagacaagggatcaggtacttgatgggtgttagagcctgagctcgctgtgattcacagtatttcacttgatgctcacagtaatcttagacacaggactgattagctttatttgaggcaatagctgaaacttggaggggtaaagcaacatgcctagggccagcagaacctgcgccaaggaatggctgactccagagcctggatcacccagcccactatctccaaggggagagggtggtaggcacttccgtctcctgggtgaagcatgcactgaaggatgccatcgtcagctttcaggacacccttcacaagttgaaatctgcctctcgtttagatgctccaactgaaaaaagacttgcatcgtccatcttttatcaagccctttctcctttctacaccagcaagtcagcagatactttccttctacttccactgtttatgaagacatattaagacagcttggataaggagattataatttgtaattaaatattaacctttctgacagtattaaaattaaaccactcagaattcttcatccctaatcaggtggttcctgcccgtaactacatcttctctaatagtctcactagtttatggccctttccagagtgctaattgtttcaatcgctgccaacctgatgaattggcctaaaaaagccgtttcagttggaacatattagcatgccgtgtgctgcttcttgcctgcctgcctgcctgtcgagtgggtctgccctggctttgggtgaggcagctcatagctactggcacagtcagcagaagggaccatggacatagctcaggaggacacagcctcagctaccttgttttctgtggctgccaggccctcagagaggtggtgaagggggagccaggccacaacaggacaggagttggccaggactctgttgctggcagagttctaggcagttccttattgcctcagctagggaggctttccacagaaattaggcaagggtacccagggttgtgggcaacctgcaacgcctccagactgggaagctaggaggaagagaaatgtctggttttaagttgaaatgtttctacagtctccaaggactg

SEQ ID NO: 63561 - DNA, 1473 bp, Bovine  19866880667081
  misc_feature (1)..(1): n is a, c, g, or t
ngtctggggggtgggcctgccctagggagtagctgggaaggggctagctagcccatgggtgtctatgaggtgcaggaccccaggtcccttctaagtctcctttcccttcccctcacagagtggatcagcattgataaggacgaggcaggagcaaagagcaaagccccctctgtgtcccgaggcagccaggatccccgggtgagctggggctctgtggggagtcacttgaagtggtgcctggggactcgtggccagctcctgctttatctccctcccctgtgcaccctgcaggtcagggagccgcaagccagcctccacagaggcctcctgccccctgtccaagttatttgaagaaccagagaagccaccaccaactgggaggcccccagccccgccccgagctgctccccgggaggagcccttgactcccaggtgagagaaggaaacttgtcattccaatcccttatccatcttgatccatcactgtgcgtggctctcagggttggcctggggatcatctgttgcttgggtctctgtggggccctacacccgtggccactggccagccaggcctcctgaaggtgtggttctctgagtcaaagggagcacagtcagcctctcctctcacttctgtcttaaaaaatagacttagaaatggtttctgcaacagctcccttagatacttaagttgagccttctgtttggagaaggcctgtgtctcagcagatttccctggggcgttctgtggaacactgtcctacaagatgccccattggaaaacgctttgttgtcaaatgagtttgggaaatggttgttactagattcttttcttagatattcccagtgcacaatagtatcagcaaaagctctgagcttgtggacaggaaggaaatcctttttcagctgtgttgaatatagtttcccaaacttaatgggccaggaaacttttccatgcaataactattaatatcctggggaactacagttgacccttgaacatggcacgggttaagggtgtataactcatagtcatccctctggatccccagttcctgtgacactgaagttccgcatggattcagcaaatgtggctcatatattgtgcaataccatagtacgagaaaaaaactgcatagagttggacccctgtagttcaagcccatgttgtttaagggtacaggtcaagtatagtgttccatggatcatactttgggaaagtgaggcttgcttttaacttatatccagttgtcatttgaacataaagactcctggtgcattttcagtcatcttcagacactatcaggcaccttggttttatcttcagccttgaataaaactaacctgaatctgtgaacaagattcctcagtagactgggctcaggtgcctccagggctttccacatctggctggtacctctcattgaaggcttttattgccctgccttctggcctctgttttcacccattttacag

SEQ ID NO: 63562 - DNA, 1977 bp, Bovine  19866880791969
  misc_feature (1)..(1): n is a, c, g, or t
nccacttaccgctatgagcggggttcccgggacacgtatgcctggcacaagcagaagccaactggggtgagtgagaatgggttaggcccaaggagaccccccaggactgtggtgaatcaagagtgtgtgtggggtcaagcctctgcacttaccattccagcctctatggccccttgaggccttgtgggtgatcctgggtgttggaggtggatgttggacccagtgtggtaggggcatgggcctcagctgagcaacccccagctgacccctgaccacactgctgaccctgccccaggtccggaccaacgtgccttcatggtgtgaccggattctctggaaatcctatcccgagacccacatcatctgcaattcctatggtcagagcctcccggacagggtgatgggcgatcccgggtggtccctgacctgactctgccttggctttgggagtcaggagcagagagtaaggagctttcccctgagcccccattcctactcccctcccccaggttgcacagatgacatcgtcaccagcgaccactcccccgtgtttgggacgtttgaggttggagttacctctcagttcatctccaagaaaggtggctattctggctgtgctgtgggtgcggcatccatctgggtgggtgcaggtgctagcctggggggtgtgcatagctttgaatatatctgagtgtgtgtgtgggtgggtgtgtaggggcgggtacatacatgcatgtgcaggaatgtgtctgaatatgtgatgtgtaaagctgtctgtgttcctgagtcaccgtgagaggtatatgcctgtgagcaggtgtgtgcgtatggaggtaattgtgtacatgtttctgcctgcctggggctcctcatgtacccgtgtgcctagtggcatggtggattgttggtgggcctatcctgcaggcactctggttcccagccccttctcagatggtctctgattcttgggttgtctgtctgtcccagcctcaggtccaagctttggggtctccctgggctgcttgggatggaggaggcccctcctggccttccctcctgctctgccagggctccagattccctgccccagtgctcagtgtctgtgtcctgttccttctgccaccctctcagccctcctgtctgcattcctccctttgcccctcagggctctcaaagacctcagaccaggcctacatcgaatttgagagcattgaggccattgtgaagacggccagccgcaccaagttcttcatcgagttctactctacctgtctggagggtctgaggcggggcccagggctgggtgtgggtcattggggatgggaggcctgaggtgcccagagtgggcagccccctagttagggggaagggaagctgagaggtggcactcagttgggtgtcccctcccccaccagaatataagaagagctttgaaaatgatgcccagagcagtgacaacatcaacttcctcaaggtgcagtggtcctcacgccagctgcccacggtgaggcttgggggtgagggcacagagggaagtgcagccagatgccacctggagcctgcctgggagggtgggaagagcccacagtgtgggcttgtgcgtggagtgggcatgagtgaggacgacggcatgtgctttacttgcggggggagggcggtttggagaccaagttgcagttcactcattcgttccatagatacttctcaaggcttcactaaacgtcagatgctgtgttggcaattgttgatgcagaaaatcagttagttacagggctcttgagtgctctgaaaggcccatggaaatctttccttcaggtggacgggagtgagcatggacaagcttgaggatgggatgagccacagtcatggcaggaagtggggtggggggtgctttattcctcactgggcctctctgctcccagctcaaccccattctggctgatatcgagtacctgcaagaccagcacctcttgctca

SEQ ID NO: 63563 - DNA, 925 bp, Bovine  19866880811675
  misc_feature (1)..(1): n is a, c, g, or t
ntgcagaatgatgagctgtccctagggaagggtgtttctgtatcccagatctgtggacgtagaggagtcgctgctttagttgagttagagatgagagtgcctgggcgccagagccccagctctccagagccacctgccaccaggcacccgcatttcatcaaggctttaatcggctccaggcagtcctcagatgagcctggctggtatccggcatgagctcatcaccaagagtggcagctggaggccaaggctcccttgggtgagggagaggtcagcgtttgttgggccaggtctgttctgtgttctcctccacctgcactgggcctggaaacatctgagtaggattccagtttcccatggcagggtcggctgccctttgtcagcccactcgtgcccatccagtgagtgtgctcttgggtagaatgcagagagaaagggcagcacgggttttaagaaggagaaccttagtccatagaggtcaggacctgcaaaatagcagcggaggtccatcccagggtaagatgggtcagaaccaaagttcccttcccaaaacgagttcacatctagctttcatatactctgctgtgttacacagaggcctagcagcgtcccacggagaacacagcagaaatgctctctgtaggctgatcccacagtcttctgcctgaacatcattttggaaatgaaaaattcttttaagtgcagccaaagaaaggagtctgccacttcaggaatccttcagaaactcccttagtaatgaaccctatgcagcactaatgtgacctacactaacttggccttgcagtggatggaaccttgagtaagtcccttcctcctcactgggcttcgttttccccacctataaagttagttggattgcagtctcaaagctccttttaattttcgtatttgtaattcgaagaat

SEQ ID NO: 63564 - DNA, 1138 bp, Bovine  19866880845983
  misc_feature (1)..(1): n is a, c, g, or t
nttgtgtgtcactgagtgtgtgggacatgccatgtgacggcagcgatcgtgtcctccctgttgtcaccctgagccaatgagtctgacacacagagtggatgctgcatgggatgagaggggtcacgggtgtgttgtgagtgatgggggtgtgtgattgtgtgggatcagccccagcctcggctgctgaccatcagacagaggacagacatcacagagtgggcaagcaggagcactcagcggggacagaaatggtgtctgggcccaagtatgagctggcgtgaggcctcctcctttcactgagctccccaggaaggcttcctggaggcagggtgggagcgcagtactgggatgctgcaggtacccagtaagagcaagggctatggtatctggctctgacatgtagcaggtcatttcatctcttaggcctcaattctctcaagaataaaatggggccggtgggaggattatgtgaaatggtgcttttaaaagaacacagtgcctggcactgagtgaatgctcagtggtcccctggggagaccatctcttgcatcccagtgtgtccaggcacctggtgtgatgtgagcaccagtgggtgtgcagaggggctgaagggaatgaatgctgtgtttgatgttcacagccctccactttccctctcccatcccttctgtcctctgctcagcgtcgtcaggacctccccatcccatattgctcccacaccctcctctccgtggctcctgccatccttacccgctgtcagcctccaacccaggctcctgcagcctcattcaattaggccgatgcaatttgctcaagaaaaaatgccataatgtggttatcacaccagtgggggatctggccagggttgcggggaggcagcggggctggtgggtagaagacccacactcacagctgagggctcaggtctggaagggcctttctcttggaaccccacccactcccttgggctccatttcggagcccacagagtccagagcttggatctccccagctccaggtacagagatcttgagacagaagcttgcaatgattaggttcattgtgtccatggagggtctctggttctctctctgtctcagtctccccatcggacaaggagagttgtcattggtggggg

SEQ ID NO: 63565 - DNA, 1786 bp, Bovine  19866880959347
  misc_feature (1)..(1): n is a, c, g, or t
ntgagtgggcagctgtggggaccttggatctggctctggctggcttggtacctggtgtgctatttggtccaggggtatccattcctgtatctcatcagcgaacctgtgagattttgagaagcaaacccctttccattttcccagggctggatggggctgagtggaaaggcgggctggactcggtctgcccatgtgctggctaacacagcctctgcatgggagcagaaggaaggcctcacctggaacaggtggatgtcagcccctcccctgacagtaagccctccctcccctgctcaagataaggagaggtagagcggggagacctgggctctgggaccagatgtatcttgagaccatttatggctcctctggccttgtgctctgtggccttgtgcaagtcatttacaacctcttgaacttgtttctacatctgttataaaaggttactaccttgcctggctattgtgatgattagcaataaagtctgtaacatctttagcacaagcctactgcatagactgctgaataaaaggaagctgttctcatctagagctcactcggtcagttgagagggagactgttctcgtttgtgatgagccgggagctgttcagaagaagaacactccataagccagggcaccaccattccatcatcactgcaatggtcacagacagcagtaacattactaacattttaaagaactggtgaagatgatggaaggaaggagcaggagccgtctgagtgagattcttggagcttactggatccagcctccctgtttttcacatgaggttcctagagatggagctgagctggaactaaaaattcaggtctcactctctcctggcacttctgccccattctctctttaaaagggacctgggcagccacaacatttcaacttttgggccctgcttgtttttcctagagtgcccagtctgggccctggtccagagaaggggtgaagccacatctgctaactgagaagcaggaacttgatgaacgactgactccggatccacaggtcctgctgctcatagccccctcatacctacaggtgtcccccagccaaacccagccccatgactcacctcatcaaacagctgcagcatgatggtgagcacatctgggtgggctttgtctacctcatcaaagagcaccacggcgttggggcactgcttcagcttcttggtcagctggccaccctcctcatggccaatgtagcctggtggggacccgatgaacttggctacctggcggaaggagagaattaagttaggcaggcctttccatcctttcagtttccaatacggggcatgcacggtaagctggctttgtatactgttaagactgcctgtttcaacaaggtgaggttatctcttggggtggaaggaatcttgctgtgataggagagcagttggatctcttctatgtttattcttcagagcaaatcctatgcaaaacagatggaccccactgtgtacatatgtccccaaaggacaaattccaaggctgctgtaattatctcaggcttgaatgacaagtcacatcaaaatacccaggcagagtcatgttgacaggctttccaaaccagacttccccaaggactctcactcacctcatgccgctcctggaactcagacatgtctagcctgatgaaaccctgtgtggaaacaagcacgagtccatttgaaggtaggaaggcagagggaagggcggaggaggagagcatctcaaatatcttctgggctttcaagccacaccaagccaagatcttctatcatg

SEQ ID NO: 63566 - DNA, 1424 bp, Bovine  19866880982254
  misc_feature (1)..(1): n is a, c, g, or t
naaaatgcccagtctgaagtagctgggcccctggatagcttagtgtgacctgtaaggtggagagatgaaaagaggtggctgtgggtctgggttaggcacccctaaaactgagcttcctcatggcagaggtgggcacagggctcagggcctgggagtacaggaccctgactgcattcttggggacaacaggagagctgggaaaattggattttctctcatgccattccttaagagacagcatgaatataaagcacagattggagccagatggcctaggtttgacttttggctctgctacttattaactctgtgactgtgggcaaattacttagtctctctgtgcctcagttttccttatctgttaaatatgactaataatgggtcctgccttctagtactgttgagaagacaaactatgaggctcagagtgagtgctcagcaaatcttaaagcccaagaggtgctggctgtgccaggccagggttggcccttgactctggagtctgagatatcctctcctgaagaacaaatagctctggcctgcggctgtaacagatgtctcctggataccttgtcctacctgcactgtctggagcccaggattgagttgataatagatgctcaggatttaccaagagatttgtgtactggtttcagactcagtccttataatagcccttacattggttaccctcttaacagagtaagaagctgaggccaaaaaaagagaatggaggccttccctttttggtcagaacctttgcacgtcttagcccgtgtaatattttctacagcattaataagtaggacaagttgcccccagtctgaagatgcagtaacaaacactgacttggcttggattacttggtgacaaaggagtttcccatccctccctgtgcccctagacatgactcctagtaaagatgcaagaagggggacccagaggactaaggtagcatccagggaaggcctactggaggaggtggcatccgactggcccctgaaagttaagcaggcccagagggcattagggttggggtggttgagtgaaggcccgaaagtgagaatgagtcagtcacccagctgaatagagaaggcagtataaatttaaggaatggtggtgagggggtcaaagccgaaacaagttggctgtaagttatagagggtctgccatgtcatactgagggtttgggctttactgtgctgccagcagggagtcactgaaggtgtgtgagcagggaaagaggcatgtccacagctggaccacagaaatagaggtgggagaactcttgtctccccctgagctggtggcacagccggggctctgcccagcctgtgtgcctggtgcctggactgtgtccaggactaggttcagtgactcaaccttgaggaaatcactccccagggagaaaggacccagatgaa

SEQ ID NO: 63567 - DNA, 961 bp, Bovine  19866881010107
  misc_feature (1)..(1): n is a, c, g, or t
ntagtatcagaaatgctgtctgcggagcaatgggaaatggaaggggcacatgggagactgcacagaaagagtgacgggtagggttggggctggtttttggaggagctggtagaaagaggtgcctgggaggaagaagaagggcaaagagaagatggaggaagctgggaggggagaaataacccttcacaatgggtataaagagaagaatggtccagaatgggaaagttgcggatcgatgaggatggagagagatgaggaagaggagagggggacacctggaggagaatgggatgtgaaatggggctgaggaaatgaggcctggggagaagaaggatgcagggtgaagatggccaaatttttaaatgtcagagagtccgtggcagggctgaaggtagacctaggcaggagagtctcagttatccagctgcagtccatgagactggttattggagagacagggtgttggcgagacctcacagacagcgcaggctaggaaggatagaacaggatcagaagtcaggtcgattgagggtcgcaggggtgggtagactggtgggaggtggaaggaacgctgcggagggcagcgacaggtcaagagtcttgacagagaatcagatttttggttccctagctgcagctgttgggtcccaggtctccccgcgccctgtccgccttcatccctgccggctctatccagcggtggtgaagcgatctgagattgagagggccaagcccaggggccaggtcagggggtaggggaccgtaagcgatccctcaggcgcagaacccagcgggccgggctcggctcctcacatccccaccctcgttgattcccccctcccgcacacatctgtagtgccctacaagttctttccggagccgtcgggcctgcacgagaagcgcaagcagcggcgcatccgcaccacgttcaccagcgcgcagctgaaggagctggaacgcg

SEQ ID NO: 63568 - DNA, 854 bp, Bovine  19866881029362
  misc_feature (1)..(1): n is a, c, g, or t
nctctggctgggccttcaagggcgggtgtggcgctcagttcgcagcttcaaaatgccaccgcggtcacttgctgagctgcagggtgtccagaaggaggcgcttgtgagccgggtcctgcaccccagcttcctccaggtcttcttcagtgatgtcgctgtaagggtaagagatgctgggagaagggccaggtggtcccgagagcccctagctccgcccccaaggccagtcccaccccatccacttccagccccgcccccacctgagaaactccaggtcgtcccagccattgtgcaccagtccctcctcatagcgttccaagccgatggccctcagccaggctcccatgcctgcctcacccagcccgccagcccgcccgacctgcgggcacggagcctgagggaacagagcaggttagaggcagcactgagggggcctgcacacacaggacttgcaggcagccatattctgccgcctgctctggggtggggagagaggcatagcaaggggctgattcctgtgaccttcagctccccagtgcccagcccagggcaggggacaccactgagtgctgagtggtgaagtaaagagatgcccccaccgcaggcaggcacactctgcaggcacacagccacccccggcccacacacctcttctgccaggtcctcctggatgctctcccggatgcgaggcggagggaagctgagaggccggccgtagtccgagggcagcccacggggcggctgtagctccagggggcctggcaggagcatggctcggccaggcccggcaggagcatagtccacctcactcagtgtcttggccatctgcagcactgagcaggagcgatcatccc

SEQ ID NO: 63569 - DNA, 1842 bp, Bovine  19866881039929
  misc_feature (1)..(1): n is a, c, g, or t
ntgattgcaatggaatgggtaatatatactgtaattgggagatgcctgaagtgctagggaagctcttgggaggaataactacctcaaacttagcaagaatcactggaggaagtgacttttaatcagaggcctaaaagtgaattgaagttagtcaattgatggcgtgagagagagggaaatgttccaggcagtggaatagtatttgcaaaagctcagaggctagaaagagcattaggaacgggatggtgagatgagacctcagaggggagcagggactctcttcatagacattccttattagctgggctgtgacactgccagtatgctgatgtttgtccctgaaccaaatagcccagctgtgccccttgagttcttgtgctttttatggtaagcatcccatgtataactctgtctcacacttatgatttgtccgttcagtggtctgattcttgcatcagatgttaacttcttagagtcaagaagggtatcttgttcattagtatatctccagaagcttccaccatgcatggtgttcattaagaatacaatttgaatggatgatatcttttctttgtaaaatgggttatacccttcctgctttcttgaaccaactatcccttttcctcatgttcatcactgtatctagcagttaatgtcctgtgtggcaattcagtggtgccctactggctcttgaggtactgtactctctggcttcctctttcaggtttttgttgtactgttattttccctccccgcctggtgagctctggactgtgatccacatacttgattctgaaaacttcttcccagccttctagtttgcttcgtctaatctgcagtaggctggaaacaaaatcccttgccatgatttgataagactgttctcaactaagagtttgagttaatctttgagttaggtcctaaagttaggtcctgcatgagaaacatgcagataccattgtacattggacatatatattagctaatcagaggccttcttcctgtttaccctactccaggaaaggtcagataacactccaggggtgggggtcatcagttgggagagcctctggtgcagaagagctgatggaccactgattcaccagaccataaggaagtatggtctgttctccagttacatactccaacaacttcattttgaccaaacatttgaaatactaccacctaagccatcttacctgggtgttatctacaaacctcaggccgatctctgttagggcaggttccatagagagtatgctggcaccttcacttgagcagggaaagaagagagagtgtaagccaaggctaggaccagaacatctgggctctgattccttcatttgcaaaatgagggtgaaagcatgatgtgatggggaaatagcgtgaggactcagattagacctgggctctaatcctcatgcaaccacttattaactgtataacctctgtactttagctttctcatctataaaacgagaattataatgcctgtttccctggtggctcagtcagtaaagaatctgcctgcaatgcaggagaccaaggttcaatccctggattgggaagatcccctggagaagaaaatggcaacccactccagtattcttctctggagaatcccatggacagaggagcctggcgggctacatccatggggtcataaggaatcaaacatgattgagcggataagcaacaagcactatataaagtagttaggggaattacatagattgtgtgaaatgaccatgtcagccaaagagcagagaaggtcagttgttgttcttcagttgttcatttgtgtccagctctttgcgacaccctggactgcagcacgccagg

SEQ ID NO: 63570 - DNA, 1587 bp, Bovine  19866881144094
  misc_feature (1)..(1): n is a, c, g, or t
nttagacctgatcctgtccttcctttccagtttcagctctcaattcttccccaccacaacaatcctgaacaattgcgcccagagtcaaccatgctggctcattccttcatgccacattcagatacacggctggctttgtcctgctccacctctatcctcaactacctggccaacttgaaagcaatcactctaggctcagatcaaatgttgctttctctgggagggcccaggtggaaagcaccaccaaaatcctaagagatctttgttagaccttccagtttcattctcccttgttttgttcattgaaatatctttctaaccattgagttggatgaatctcctaaataagactccaaaacacatgtgctgggaggtgggattcagacaaatccaagcagacagctaccctgaatgggatgggggaggctccatggtgggggagaattacagacccataattacaaggttatggattatgtgctgagatgtttattccctgttttatgccccctttgaggccagcctttgtggctgattcatccttgtggcttctacctctttcttccccagcacttagcacatgcctgatacaaaacaggtggtaaattttactggatgaatgagtaattttacccagctccctgctttgcagaggagaaaaaaagagactcattgaagatcaagaatctgctcaagtcacccagtaagacaatggcagattgcggatcttccttcactgtcttggaggtgcttcctggagcagaaggctagggaacactgacctttggcaggccccatgtggctcaggtactcgcagtggctgctccagtgatccagagtggtgaggatgtgaccagggtccccaggcagggcgtgggtgagcacgtagctgaaggcccgctcctccatccgcagccctgacaggcaatctcggaggctccggagcaagactgtgcgaaccaggagtcggaagtaatgccggtacctcaccaacaatgtcactaccaggggcaggaaggccagcgcgatggcaggggacatggtccctacctgggccctggggtggaggaagggagggaaaccacacatgtcatttgcctgtcatttgtgcagcccttaccagtggcaattatccccgtattttatacaccatggctcagaaaggctaagttcgttgtccagagtcacacagaagaactaggatttgaatccaagctggtctgattccaagcccacacactttcaaggactccatgccacctaagttcagcacccaatcccaaaccatctcttcccacttctggaccctgatacaccttcatcttgttcccttcatcagttttgtatcatctctgtagtctcccttttcaggacccctttcaccagttcctgcctgagttctcctcccaccttacccagcgcctgctcggtctctgacccattgctactgctaagtcacttcagtcatgtccgactctgtgcgaccccatagacggcagcccacgaggctcccccgtccctgggcttctccaggcaagaacactggagtgggttgccatttccttctccaatgcatgaaagtgaaaa

SEQ ID NO: 63571 - DNA, 843 bp, Bovine  19866881172002
  misc_feature (1)..(1): n is a, c, g, or t
ncggtcccagagcagagtgatgttgtgcctttgcttagcctgggacaagtcagacagcagcatgtctgcatgtggcccagggctttctagatgttccgcccccacccatgggcagtccctgctcttactcttttggcccagaaattcaactccttgttgacgagctggatgagctccgagtggcagaaggggaggaagtagacgatctcattgattcgtcccagaaactcatctctccggaagtgagcctgcagggccaggttagggatgtgagcttagtgacccagagtgggtaatggaattagtggaccctactggggaagatatggatgggagggcttccacatcttcacgatggctaaggtgatcccctccaactcgaggctccagcgggaaggacaaggaactcttacttttaggatggggcgaatcacgttttccttgaagttctttgagatggtgatcttgtcactgatctggacgtcccctatggagacagaaacataaactgcctgctccctacacctgggacctttgggagctgtgctgcaccttggctccatgacaagagcctgctcttgcccctgacagtctgtgtgatcctggtcaacatcttgcgccctctgggcttcggccttctcatcacctgcacaatcagaggactggactgcatacttcccaggcccttccagtgttcatgtgcagtaggaattgcatgaaggagcggaggggagaggagaagagtcaggactgagacttgagtcctgagttgtaagaagggggctggagagttcaatcctagacagaaggctgatagaagcagtgtccaccctgacacactcc

SEQ ID NO: 63572 - DNA, 1364 bp, Bovine  19866881210710
  misc_feature (1)..(1): n is a, c, g, or t
ntagcattatataggaccgggagacttggtttggtctcaggtcagttcaggggttgtggtgattggcacaggccggcagaaacaggactgctgacgctaaggaagccacgttcacaaaggtgtggcttggtgagggcgggagcagctccatgttcaggggaaggtactctgggagcaccgagttaggttctgggaatcccacgaaaagaggaaaggagagtgaatgcctgagagtagaaggggcctaccctcaggaagggacctttggatggcaggacccagagcctgcagccgggactcctgagataatatgaggaatggccatcgagaggatgagcttgctttcccttggggcccaaggccttgtctggcctcacagggcctctgggagcagacagtctgaccagagaggatctggtctcggggatcagaagggccatactcaggctcctgatttgtatcagtgtcccctctagaccccactgttttttccaccttctctggcttccagcctccaatatcctttctctaccaggtgctggactatttcctgcagctgcaaggctgtgactaaatacctacgttgtgcctctgtccatcttttcagggcctctaggactgcttggttccactttagctcatcctagaccaccaccagcctagctcccaaaagcaagcaggatcttggtcctggagcgaacgcttctatacagttgggcacttgggattttcctaatagaaatatttttggtgcttaaaggtcagagctgggctaagaggagagcccaatacaggtgggttggactaagggcctcggggctgatgtctcccctgtggtctctcctaggaccgagaggagcggaagctgctgctggaccctagcagcccacccaccaaagccctcaatggagccgagcccaactatcacagcctgccctctgctcgcaccgatgagcaggcgctgctctcctccatcctcgccaagacagccaggtgggcatcacaggactgggcctgggacagcgctcctccatccatgttaaagactgggatggggggccagacccaggatgcaggggacaggtcagtgggaagaggcactcctgggcccagtcgtgctcccgtgggcaggcaaggacacgattgtcagataggcttcgagttgtcacctggcagggagtctgttcagccctctcagaagcacttctcacgtgctgtctctcctttccccgaagcaacatcattgatgtgtctgctgcagactcccagggcatggagcagcacgagtacatggaccgggctcggcagtacaggtgagctcccggccgcttggagcctgaggccgctgggccctccctctgcct

SEQ ID NO: 63573 - DNA, 1706 bp, Bovine  19866881239334
  misc_feature (1)..(1): n is a, c, g, or t
ntgtctctctgcctctcctattagaaaactatttgagaatatgcttaaatgaaacaaatgaattgttcagcctaggcttcctgaaggcaaagcttgaagtaagggtttatagataaactgggagtgcaatccaagggggcagaagtgagtgacagataaaatgcaaaaagggaaacaggaaaaccaaggcaggattgcattatttatttttttaattgaagtatagttgatttacaatattatcttattaatactttctggtgtacagcaaagcttttcagatatatgtatgtgtgtgtgtgtgtatatatatatattatatatataattcttttccattatgatttattacaggatattgaatattgttccctgtactatacagtagaaccttgctgtttatctacttaatatatagtagtttgcgtctgctaatcccaaatttctaatttatcctctgcacccctttggtaaccagtttgttttctatgtctgtgggtctgttttatacatacattcgtctgtgtcatgttttagatcccacccataagtgatatcatgtgatatttgcctttctctaacttacttcacttacatgacagtctctaggtccatccatgttgctacaaatgacagtggtccattctttcttatggcccagtagtattccctattgtgcgtgagtgtgtgtgcgtcattgaggtggcagccataagtgcctagttactgtatcccatgtagagaaacctgatgaaatacaaataaattgtcgaaagaagagggaaagagaaagaggaagaaaggaaagaaagaaaggcaattatctactgaatcttctcttcaattggtcaaaaattcttccatggagcataaccttccttgctcttctgcttatcacattgagtcagcatatgggttcacacagcatgatatcaagccatgtattagacaggaattcagatcatgagctggaggtgaggtgctgtcagctttcaactacacaaagtcaatcagagtccacagcagaggctacagaaagagatgagaactagaatattggaaagagtatataaaatttcattgaacacttccaatatagccctttgagtcttctcatactttctgttaacagcagtccatcacagggtctttgcagctgccatctctgcaaagacaagctgcaagaggattacagaaagagctacagttcctggtgctgtagttggtccctgagccataattgataaccatcacctccctttaagatccaataatacagtgttataacattgttttatataatctgatgatagcttttagagatgttaaagaagagaattataatggctacccactccagtactcttgcttggaaactcccatggacagaggagcctggtaggctgcagtccatggggtcgcaaagagtaggacacgggacatgactgagcgacctccctttcacttttcactttcatgcattggagaaggaaatggcaacccattccagtgttcttgcctggagaatcccagggatgggggagcctggtgggctaccgtctgtggggtcgcacagagtcggacacgactgaagcgacttagcagcagcagcagtcttttttattaagctacatgtttaccatttctgatatgggcatacttcattttatttgtgctttgttttattgcactccacagattatgag

SEQ ID NO: 63574 - DNA, 1128 bp, Bovine  19866881263582
  misc_feature (1)..(1): n is a, c, g, or t
ncggctgaagtgtggaaacgcatgaacatcaaaccgaagaaggtccggataaagcacaatgcactctgaggttcccaggaccccagcagtcctaaaggcctgagggtggtccatttggtttgacaataaatgatttgaactgttcggcagatcaccttgtcccatgcaaagacgccccccaaatcaggtaaccagcatcatgttctggtcttacatcactgaaacaaggaggaaatggaaagaaaggcccactggcctcagctgatggcatagccctgggaaatgtatctaacctgtctgggacctttggcgttctttagttcagatatcctgaggttagagttgcttcgcagagcatcaaggttctgtagagatgccccagaggcctctgtgacaggaggccaggaagatgagctgtgacctctggacgccccacttcaatcagatcagagtagttcctcactcatgttttatgtgttatgattctgctaaagattccacttgataaaaacaatcctctacgtgttatgattctgcttaagattccacttgataaaaacaatcctctgcttgaaactgtgtgtctgctgaatccgttatcaggtgctcttggtctgtgtgcagacctccaccccctcactgggcttcctgggaattccactgagcctgaggcaatgcccacaaggatgatggctgcctcagagttcagcctgttcagctttgatagtgttcccatcgctggagaagggacaagcagtcttatccaatctgaggttagcacgggtcgagtctaagctaagacctgggaatctcctggattccatttagtgcccgtagaagataccccctccccctcgtccatcatgccgctcacagattggagtagccacaagtaaggagggtggtgggcaggacagaggggcgggaaccaacacacagatggatacatgtcctttatcgaggatgacaaaccaaaacaaaaccaaaaaaccccaaacatgtaaaaacccagggtgctagaaatacaaactcaactcgttcaaattcaagctcatccagaccctggtcacaagccctcgtgaggtgcatgtgagcaccaagtcagggacgggggacaggagtgagcca

SEQ ID NO: 63575 - DNA, 1229 bp, Bovine  19866881269179
  misc_feature (1)..(1): n is a, c, g, or t
ncttcccggaagccttccctgatacctgtagtacctccttctcttggttactcaccttggtgaagcatttgcagcaaagtgcaaggtatagggcagaactgtgtcctcatgttgatcaccgtctctggagccctcctttccacagtggctagcacatcagggtactatcgcaggtcttcccatatctgtttgttgaatgattcgtgaaggcaagactgaactctttgtgttggggagtcctgccttgtgtccaggaaaggaatcccatcccggactcccactccccactctttggaaagggatcaccctcccttcttcatcccctcactccccaaggacaggaaactccctccctctgggccagccttctgcctgggagaaagtccttcctcatctgaggaattttcaaggggccatatcccttccacaaggacaaagtagaagcaaaggggcaactgatgcgtgtgtgtagggaccagcagggacgcgaggccctggttccatctgtctccgtttccatgatccatccctgtcttgtctacactttggtcatggagccattaagttcctttttccctctaaaccgatttaagttgggcttctgacacagccaagagttcggaccaatataatccgtaaatgcttgacacctttacagggaatcaaacaaatggctgtagtgattggaagttttgtggtaacatgcctgttgctggctcagctgggcagaagctgcccttctcctgactcaggactctgcagttgaaggctcctgtctctgtgaggagctgtttgtgctgaggctggccctgacactgaggtgaagtccaagaaaatgtttgaaccctgtctgttgttgggttcaggtgtttcagatggtgtaggtggggcaactttggaggccaggctgcgtgtgtgtgagatatgctgagaactcagcataaaaggagacaggtagaatgaactgggctctgcaagggcctcaaaacagagaggctagtggttgtcatcggatgtggacgctgtttctaactgagaccctcctcccacaaatgtgtgcactcttggggaaataaaaatgctctgacatggaacattgtctcgctgagcatgtcttcacttccgtagctgatgatgggttctgggtcactgggttccagctctggcgctgccactttcaagcggatgacagggggagttactcagcctctctgtgcctacctttctca

SEQ ID NO: 63576 - DNA, 1712 bp, Bovine  19866881309172
  misc_feature (1)..(1): n is a, c, g, or t
ngaaatttgcctagaggtactgagcactaccctcatggggtactgacagaggctggctggctggctgcccatcagggattctgtaaagggtcattagattatattgcttccaggttcctgtcagccatgtgatttccaaggttctggaaactttaggcttatcttcagagcaagtaatgtactttgaagtaggatttgagccaggctttggatagtggagagaggagaaaaaaagaaaagatattctaagcagggatcacgcttgagcaaaggcacagaggggacacatgaaggggagcttggagatcacagctacttctctaccacttcatcccctgattctgaccacattctatgcggtgccttgagccccactctaggagagtcccacttgtagctggctgctgggtgtgggccccaatcctcaggtggaggaggcagtaaattagtggtaacagtaaacaagtcacccagtcagggatgcccctggctgcttgtaagtaactgttataaaccttgggtgtctggggctgtcaaaaatgcacgcgagcactctgagcgcctctcatatacacaattaaaacaataaaacatggcagaaacgtagccagagcaggctgtaaatcagcttctcttctcagctccaagtggcggctaaataaagatgagttgtgcagaagctgggttggcacagggcccttcctgggataggggcctgctttgccccgctggacctgccaaggccaaccctaaccccacccccagcccgggtggctctcttcccatagctccaagggctgcaggtcctggcctgctccagctgacctccccatctctgtgtcttcagatgggggacaggacgatgcaagctggcacatcacaaaccagtggacaagtgccctggagttcaggagatggctaggagtccccactggcggtaatggaactgctctctataatatttttccctctccccagaacattgctaagggagtagtcttaccttagctcatctattcaatataagttaacacccagcacccactgcatgcccagccctacccaggcacagcagagagaatctgtgcccttggagacaaattgaaatgggaataataatggttccaaggacataacggagaaggcagtggcaccccactccaggactcctgcctggaaaatcccatggacggaggagcctggtaggctgcagtccatggggtcactaagagtcggacacgactgaagtgacttagcagtaaggacataagaatcacctgtctcagagtccaaagagtggcttggccatcacctgtgtgaccttgggcaattctctatatctctgagccctgattttctcatctatagagaataagattttttacaccctagatgtagtgtgtcaaaaacagattcctgccccattcccagatcctgagattttaattcagtgtgtctggggttggacctgaaattttgcatttctaacaggctcgcactctttgagtaggtgatctaggctatttatgcttgaactgctttaaaaaaattcatctggaccttctccctggaagagactctttttttcacttgaagtttcattcttagagagtctgtgtgcttaagcatggtattatgggtgtacagaacacttaatagctgtgacacctagggcaattttctgtacctcttagaggctctgtctccttata

SEQ ID NO: 63577 - DNA, 690 bp, Bovine  19866881336456
  misc_feature (1)..(1): n is a, c, g, or t
nacccctggtaagtgctgggatattgatttgtgcaaagtaatacagtgaatttatcagtgtgatccccagctgcagggcttctagcaaggctggcgcacagttaccatcttacaaatgggggagatgaagcaccgaccccacagcccaggcccccatggcctctctggtcttctcgggtcactggagccaaagcagggccaacatgcagaccacaagccagagcactgacatcaagtgtgaggttcttcttccagaatcccaagctgttcttgatcatggggaaggggaggatgcctgttctagtgggagctcagaacctctgtgcccaccatcctcagaaaggcagccagctgtctgttcagatctagactctgctcccctcctccacctggtcacctcccatgttcctgtctcagtaaaggccccaccattccctggtctcctgagtagaagtgtagatatttccttggctcttccttccccttaaagcccttcaggttctatcattttacctcttaaatagatctcacacctagcctctccccccattcctaataccactgaggacctccagctcaggacctcagtgtcttctgtctgaacctagtggtggtctccttgttggtctctctgcctccttttcttcccctataaccacttctccctagctggagtcagctttgtacagt

SEQ ID NO: 63578 - DNA, 758 bp, Bovine  19866881357750
  misc_feature (1)..(1): n is a, c, g, or t
nacctgccccagtgcagccagtgtgcaccttggtctgggaatgaacacttcgaggggcagcactgctcacggatatggtgacagcatctaggatgactggtgcttttggagcaagaactcactgtttacaggagcagagacttagaaaacgtccccaagtaacatgctactcactttgtcctttggaaagctctccaaagagagacatttgtagctaagaattagaacgttcactatggggcttctctctgccatgccttaaaatcaatcaatacccccagctattgtccagtggtttacattccccacttcccatcagcccctaaatggacaagaaactcattctaaaaagagtccctctccccagccttgcagatcgaacacctttaaaatgaagaagcacgggccttttatgaaacaccccacccttaccccccaggccaaggctggccatttgagccgttccaggggcatggttcctgcctgttgacttggaacagatgcccttagcccccatctttacacttcacccacctgcctttttacccagaatccatttacaccccctgccctagcctcccagcctcaagggccaaaaccattaacccactgatttctccctttccgacctgaacaagtggccatccctcagggcctgcaggcttgccaacttctgacctccctccccccttgacctctcttggtctgcttgtgtgtgtgaccagccaaccgagagggcagggatcctgttcccttgt

SEQ ID NO: 63579 - DNA, 1307 bp, Bovine  19866881359164
  misc_feature (1)..(1): n is a, c, g, or t
ngaatgattgttgaaatttgaaagagggtggttgtattaagcctcattggaaggtggcttttcgagcagaggaggaaaggtgtgctgcatcacagcatgcagtaatatatgttgacatctctcaccttttaaacccctgggagtgcccacctcaatcctacccccaccccatcacaggggcaagtcctgtccaaatcctctgggtgtccacgtgcttctctgggcctcagtgtcctcctttgtatcaggtggaggagaacatcatctacccatatcgtgggacctctgggaatacgaaaccatgcacagaacacacatgacacctgggaggcgctcagtaagtgtttattccacgttgttgccaacatgggatcctattctgagcaggccacctctgaaattacatcaactgcaccccatcctgccttcatcttctcccacaatggtaactcaggatgtgagtgtataatggaagggcttgacccctcaacccctcccccaccaccctgacttcctcttccttgtctgaacaagccccctcccaacccagagccacactccatcctcacttggttgtgcagcttgtcctcagggccgggttctgccttgtggtgcttggcatccatgcagacgttgagcaggtctgtccgggtccgggcactgcacacagaggtcatccaacccagaaaaagcagaagtggtgtcagtttccagggcatgtctttcctttcctgcagagtcagctgtggaggagaccaaagtctgaagggagagagcccctcgcagggtccccgctttgcctcctgccccagtctccccaactccacggtgaaggatggggtcagatcctgttccttcagtgttggggtcctgaggctccttgaggctggagtagagaagattggcaagggcaccggctccctcactgtaagcttggggagctcaaaaggggatctgggattagattccctgggggaatcttcccaagttggaggagactccttgtgcccctaccttctctctggagtgacccaagaaaaataactaaataattcaggtccatgctccactctccagaagaggacacagcctcatcctgtgtccagcaagtgctctgccttcacacccttgatcaccctggtttccatgccagcttagaaaccctgttaccctggcatggcagtgacccagctctgctgagttctccggttcagcatgaggatcaagggaggtaccaaacaggatggtgatggttaaataatacagaaatgacgatggggggttgtttttaaacagctttgctttct

SEQ ID NO: 63580 - DNA, 1545 bp, Bovine  19866881407988
  misc_feature (1)..(1): n is a, c, g, or t
ntctgtagatttgtagaaaatagttctgtaatatctctaacctccctgaggttataatagttaatacaaattaactatttgtattggtttcaagagatccctgagtgcatatttaagactaaaataaagggattcaatgtctgggctggggttaaggcctcaagccacacctccattaatttaaatgtgctagctttttatgaaaagccctccaggatgaaagaaaaataaaaccttccaaactgcagaacaccatttttacaaagaggctgtaaattgcactctgtaatttatgttaatacatgtaaataaattaattagtcttcaaaagaatgagtcttttaacagtttttaagttagaaaaatgacttccaattgaaaaaaatgaaactactcaactgagtattaagacctttaggtaaaaggtaaattttatattcttaaagaattaaaacagagtatgtgtaaataaccttggaaaatgaactaggttattattacaacttcaaacactattcctgttttcaaacctaagccttttcttcaaaatgtttttggatgggaaccaggaaaatctaactttggtttaaaggcttcatggttcctgctgagttacaaaataaatatgcagatcaggaccagtgatatgcaaattcacaccaggccaaaaatgggtagtcacaaaggttttaagaactgcttcagtactaagatttctaataaggtaggttctgagaattccattactcggtaaaataaatataaggaggcccttgatcccctctgccaagcggcctgtccacagccacagcccaggtcctcccacagctgggaatcatgggatttccttttgctgctttcacagatgacaccaccacccagctgatattttactgaaaacaaagagattcagcatagtcttcatttgaattctcctgttgggaacccccaagctccctcatttcctttccagagtttcccattttctaaagtaatttgtcccttgttcagttatctggagcacattaccagtaaatgactatgtgtacataaatcactgacaatgttctttaacttcttagttttagtctcttcaagggtgttttccccttatttatgttgatgactcatcttttttctccccctccagtcaagggaaacaatctaccagcctgcctgagagtttcagatccatgttgaaaaacttgtgttggatgctctgggtgttgagaaaagacagagtaaatgtacacaccacgccccctggtggctgcacatgtctagggtttaaacccatagtggcaggttactgtattaaatgttaattaactagttctgttgccagcagaacctgcaagagctcctaagtgactggataagggctggatctctttcacttttcctcattcaactgaacaccctggtgaggcaggaggtaggtgaaccccaagctgagcaactggagtttgttccctgtggacagatactctaagataaagataatagcaagaggataatagcagagactgagagctatatattttt

SEQ ID NO: 63581 - DNA, 1113 bp, Bovine  19866881569665
  misc_feature (1)..(1): n is a, c, g, or t
ncacgtaggctgtttcttgcctagcctagtgctatacttacactgttccttttgcctagaatgcctttgccttctatttgctaaacactcctaatattttaagactctgatcaggcgtcatttcctctgggacattttctctggtccacccagtagatgagggccatatgctgggctcctgtctcagcactatgagtggagacagactaaggacctgcatagttactggagagcatggtgtctgtccatgaatcctccaggcaagaacactggagtgggtagccattcccttctccagaggatcttcccgaccaggaattgaacctgggtctcctgcacggcaggtggactcttcatcataagagccaccaaggaagccctcctgtctcagcacagatcatgctgcgttaccagtcttccccagactccttaattgagggcaggaagtgtgtctggtcagttgtccctgatgccaggtaaaccacccagcatgtggcaggtgctcagtaagctttcatcaaacaaacaaatgaatcctggagagaaagggcaggaagtctgaagttcaagactgataccaccatatttccttcatttaaaaaatgtttgtgccgatggaaacaactgagttaagcactcagcagagccctagctccctgctgggagaagggaagtaggcaggggtatagtctttcacccagatttgttcgaaaagaaatgtgatctctgcggcaagaataggaggcctcactactcccagccctgacagctcctcactcggctctgtccgatcctggacagatgtgccttcagactgccctgggccctaggtttcggttgagtggttcctgagtccaggagccaggcgtggggtgggctgagcccaggagcagggccacctgctcacgctgccgacaggtgggatggggcctcaggacccggctcccactcctgaagagccacagctggacctgcaaacgatgtttaagtgccttgggggaagaaggaaacagctgccacacaaagagaaaggagaggacgacgggaaggaaaagagatccagtctccttctgatatagccagctggagtttgaaaataagactctggactgt

SEQ ID NO: 63582 - DNA, 1956 bp, Bovine  19866880340789
  misc_feature (1)..(1): n is a, c, g, or t
ncccttctcctacctccaggatgaagtgtatcttactatcacccttcactggcagaccagctaccctgtggagaatgtttggaggcagattcagggaccattcccttaccacagttctgttcctggagtactttctcacagtctttgcctccagaagtgtcccatgagagtgagagcaagtgggaagacttcgaggaggctgaggacgcagatgagggccccctcaggtgggtagcactctgggtggaatacggctgggttaaattcttctagagggagtccgcgtctctactttggctgggtgatggtccatgggcattatagcattccccttgcttcccccctggggtcacacctcttcgtggtacgtatcatattccatgttccaaggcgacagccctatgccctgacacttcacgctattccgatggcacattcaggactttcccagggtcatcagtaagtaagtgatggagtcagaatccagccccaggcctcccacttcagggccccttcatggacctctgctgcccgcagcacgcggccaggccctctgtccctcctcagcgctgtctctcggtgggttactttgtgcgcttatgccttcccgtgggctaagtgtatttcagagaagagtcttggtgacatgtgatgtggcccctctcaagagcccctgtggttttaacacagtgagctctttcttgatcaagaaagccaaactgttcacacgaactgctactagaagctgggatgaccaggctggagtcagatcagactgatgaagacacgggaggagtaagtgtcacaaaaactgtcaggctgcaagtagagagggttaacctctcgaattctgttcacgtgcctacaacacaggtagttccagtatttgaaaaatgctgaacgttcaagaaagcgttcgcatcaacacattttcatgacacactgaaacttaccaaggcactggctgtgaagatttaggtataattgaaacacagcctttcactttcatttatattgtgtcccagctacattttcatcacaaatgactgaactggactctcaaaggacagtggcaggcaagctgataaggtgggtggatatttgaaattcaaatatgacaaatgggctggctcttatctgaaataggaagcaacacgttaatagagaggatgacatggaggctctgaagaccctgcatgccatttatgggaaagttggacactctggcaactttaggagtgatgtattatgctatgctatgctaagtcacttcagtcgtgtccgactctgtgtgaccccatgggttgcagcctaacaggctcctccgtccatgggattttccaggcaagagtactggagtggggtgccattgccttctctgaggagtgatgcattatgggttcacaaaagtgtaaagcaagcagagagcagcttatacatggagggcagtcttcctagagggggctcctcagggctggagagttaaagaaaatagggtgagcaatgctttggggatccatggggaaacagttaaggaccgaaagtgtcagtacttacggaatgtcctaggagatctgcagtgccctgaagggaggaggcagagatcagagtcgtgagagcgcggctccaagctaggctccaccactcactgactagatgacctgcagcaagagactttaaaccatctagtgaaatgaagtgaagtgaaagtcgctcagtcacgtccagctctttgcaaccccatggactgtagagtccatggaattctctaggccagaatactggagtgggtagtctttcccttctccaggggatcttcccaacccaggaatcgatcccaggtctcctgcattgcagacgaactctttaccagctgagccacaagggaagcccctttaaagcatctaagatgcagctagctgactgccacgtggagataatgaaatccaccgcgtg

SEQ ID NO: 63583 - DNA, 2198 bp, Bovine  19866880450252
  misc_feature (1)..(1): n is a, c, g, or t
nggaggcagccggatcccaccaccttggcattctcctcatctcctcaataggagttccaagccatttcttatctggagaaaggtgaggtggaatgtatttagggatcttcctttctgttctttgatgtttcatttcacattgttcttttctaagatcaaaacatatatattcaatcacaaaccactcactgtttaaattcacttagatacacaagtaaaaacacttacccagaagttattgtttaaaatgtgccaaacttgctctttctccttggtatttagaaaaaacaaaacaacaaaaaaccttataaggcttacagtaaaaccccagagcttattttcactagtctgtggaaggaatttccaaacacatgtaaatcaccttctgaaaaagcggccttgtaaaacaggtacactgccaaacgggtcatggttcagagtatcagctactccttaggactctagacaagaattttcaatgaagtgaacttactatggcatgcttgccataagagatcacaaaaattatggagtgggctttaagataatttttatacttacatttttttgtaatcatacaagctgggatttaaatcccagctttactccccacaagttacataatttcagtgaattgtctaaccaatttcagttttctcatttgtgaagtggtgcaataccacctgcctgctgtcagagcgttagagaaaatgcatatacagtagcctaagataacagtagttactatcgtatttatggtcgagtaattcccataaatctcagaaggaagttcatgaaactaaaatctgattatttacttcttttctgtttctgtgatttttagaatttaacatttgagtctaagtttaaattatgcattattaattaataagaaagacaattatttcttgccttcagtgcaaaccataactttgtgaaactccccctcacaaaattatataacacattaccctattgaagacactcttgatggtaaaaattaccttttgtcctctgctttgggcactctcatgaaatgatctgtgattttagaatcctttctcccatgttgcttagaatttctgcactctacattcaggctagaagtacttccaggtcgtttggcattcacatcattcattccagctcgactctctcctccttcaaattggaaatgtaatcgaatctcacctcccttagcagaggaccgcttcctcaactcagtgtcagcttctcttggttggaaccttgaaggtttatttgctgtttgagcagaactgctatcttcctgttcatcaaaacctggacttgtctcttcatctgcttctgaatcctgacaactatttttggaattatctacatccattggtgactcaggttcactttctttctcaaatggaggagaatttcctagactactttcttgtctattcaatctgttggcatttttcagtccagtaccaacatcctcagagccagtgtccgacaaggggctctcggacaccacgtctgtctcctcctgctgacaccctgcacaggcttctgcaggatggcaagccttgccacacttctggtggcttctggcttctctgccctgttcatcttccatcgtctgctttgcattcgcaagctttacatgtgtcaaaaactgctgattatctctactctcctcactatttgtgtcactgtgatcatcctttggggacgactgatcgacattagcattactgaactgctctggtaccagagttaccgctggaggttcactttccaaaagccgttctgagtgtggcccttcattctgccacttacacatagccgcagtctgatgctgcttcaaatactgtgtacctttttcaactggtgacttatcaaaacctagctgagaaacattttctaatttttccatgttatgttgataaaagttatctttttgtacagaactcatcatggattcttctcttgtattgttgttttctttactgtgcaaactgtaaaacagaaagaatgatacaacagaacttatgacacaatagaaagaatttacaacacaaaaaagtcacttacccaaacacattcctacaatatcatagcaataatgaaacctgtgattacctgagcatacagcatgccctttcatgactccacacctgtgcacagttgcctataaagcccttttcccaactgtgtgcctggca

SEQ ID NO: 63584 - DNA, 1006 bp, Bovine  19866881025033
  misc_feature (1)..(1): n is a, c, g, or t
ncggagggagttctctgggcccgcccctgggctgggcccgcctgcagcgcggggagggtggctcgtccgggccgctgtttgagtcccagaagagcctcaccctgtcccgcgcggaaactggggtctcagagctctttttctccacccacatccatagacttcccctactgtccttttataaatacttgggaatataaaagtttttactccaccatagtggctcaaaaaaaaagatggccttttagaaagattggtttaatcagatactcatttcttctcccttcctaggtttttgaacatgaatccttcactcctcctgacagccctttgcttgggaatagcctcagctgctccaaaatttgaccacagtttagatacacaatggaaattgtggaaggcagcacacaggaaaccatacgacttggttggtaacatctgaaactgtccatctgaaaccctgcagagaatggtccatgctgttgggagtttatggcagatagtagtctcttgaggctggctcttgtcagggcagtaacttcatggcacctgtcactgagtacactgtgggcatttgtcctgtcatgtgggcgctggagaacagctcccaagagtacagagccatctctggccatggtctctcttcctctttatatacaaatccacttggtgacggtatgtgctgtcgcttcagtcgtgtccaactctgtgaccaggctcctctgtccatgggattttccaggcaagaatattagagtgggttgccataccctccttcaggggatcatcccaacgcagggattgaatctgtgtttcttgcatctcctgccttggcacgggagttctttaccacttagcaccacctggtgaagcccttggtgagttggttttaaatagaataaaagaatataggctacctgtttgcttctagaatgaagaaggaggagaaaagcggtgggaagaagaatataaaagattagctgcatatcaggaatacagccaagggaaa

SEQ ID NO: 63585 - DNA, 780 bp, Bovine  19866881826601
  misc_feature (1)..(1): n is a, c, g, or t
naggcagactatattttgttttaaatcaccttatccagtgatgaagattatagactaaaaatacttaggataactgaattaatttttgtccggtacttaagtttttctagaatttgtatttaataagtccctttgcttctatataataaagcaataattctgaaatagggctaaaatttgttttgaatgactcgctttttcccccacatttccatcttgacgaggttcttacctacattaacatcttggattaactgagggaggcttaatacacatggaataaacaaagctactgcttgttagcaccacaggaatgctgacctttccttccagtacaattcagcaaggagttattcagcaacattcaaggctgagattctccccacttccttggaatgtcttatagatgaaatgtgaaaccttggtgattaaaagaataccataaaggtttctatttatttttctccctaccaatgccatgtatccccaggagatcagggaatattgtattgccgtgctctaaagctcctggtgtagcgtataaattacattatgctgaatggcaacaacaacaaaacctctctaaggagtgttatcatttctctcttttcatcaagttataattcagaaactaagtaagctgaacaagtagctttaaagtaaagtgagttggaaaaaggctaaaaataaagaaacactcatgtgcttgtttttcatgtactggaacaggtttctcacctataatagagagccgttaattaagaacttttttaagtagta

SEQ ID NO: 63586 - DNA, 1622 bp, Bovine  19866880845695
  misc_feature (1)..(1): n is a, c, g, or t
naacatgaggaaaatgttagcgtcgacttactagctagtttcttgctgttcagcacaacttctgttcttctgcctgttggacattttcttttaatacacttacttttcagttttcattttctctgaatatatctttctgtaatcatccatggtcatctcatacagttttagtttttaatattaaattgaaactcagagaatatcatacgcttggaacctgctgttcccggaacaatcacagccacgatttttatcaatttatgtggtttggaactgaaaagcttatgaagtgtcttttattaactgcagttttttaaacctttcaagagatgaaacgaataaagaggaagaggaagatgatgaagaagtagaggaggaggaggaggaggaggaagaggatgaagaggatgatgacaacaatgaggaagaggagtttgagtgctatccaccaggcatgaaagtccaagtgcggtatggacgagggaaaaatcaaaaaatgtatgaagctagtattaaagattctgatgtcgaaggtggagaggtcctttacttggtgcattactgcggatggaatgtgaggtaacttgagttttagctagtgattactacctaaaaaatcttgtacagtaattttctattttaaaatttaacgaattatagatttattagtattccaattgaggtcatagtataccatataaaaaacatggagttttggcttgtaaatacctctctcagtgacttcctacttactgttttcaatacttcaaagatatccttagtgtctagaaaacttaagtctgtgtagttgattttaatattatgcatgtagattaataggggcaacattgttggtaaaatgatagaaaactttctttaaaagttaaaagggatttgagcttcttgaggtctacaagccaattacgaggcttctggctcttgcattctcatctacctttccatggtaacctcttccttgttttcttcctaaatcatcacatttctttcctttagtaggcaggattttaaagctgcaatttctcaggaagctttagctatttcaggaaggccttatatcttgattagcagctcttgcattacatcttgttcatcttgttcagaagcctcagaaattaatttttatgtttgaaacaatgattgaaatatgagcaagtctgcttgactgaaatagggcgcatggtccaactctacttacctagggaactgaaaaagcaggactgagttttcttcttatacaagttttctttggtaatatctgaattttatccaaagtgggcaagctagttttggaatctgagcatctagatatctttaagaaaaaccttatttattttggaatgtctgatactatatttgcagtagcctatgataagagttgtagcttttgaaaaggttgccatagaagttttcaacggtggtgtcatggtgtgcctagtattttcaaggaggaaaacagttctcgtgatttatgtttacattgtattctttggtttggaatgtgattaagaaaacatcatctccagagtgtctgtttcttaaaaaaaaaaatacactctctgtttcctaaaagtacaatttgtgtgtctttttgcagcagtagg

SEQ ID NO: 63587 - DNA, 1230 bp, Bovine  19866880963514
  misc_feature (1)..(1): n is a, c, g, or t
nttcttgcctttcttagagtgattttctgcaacaaaatctgggacctgcgtcttaaggtcatttgtctgaccttcatttcctcttccattactcaacttgaaaaggtcttcattatggttctctgattgccatttaaaatttgtgcaaagataaataaggttatccttcccaggattcctgggactccattgttgcagtgatatatcactacctttgttttcttttaagaactgttaatccacataccagttaattggcctctagttattccaaaattgattatttttgacaccttcctttcatttatttatagtctgcttttaatcctaatgtattcagatatgtttgaaagattatcatcctgtagcttaattttttaaaagcaagttattgatccttttgataatgtataacttgagtgaatttttcccttataatttatattgtatgcagaagttttctttgattctacctaaagaatagaatgctgaaattatagaaatctttgtgctcctccaaaagttttttccagtaacgtggccaaagtgtatgtacagcactctttgtaggaaagcactctaggctgttatccttcagaaaaaggataaagcagaataaggcttgtaatgatacttgttaggtattatttgtgggtagtttctacccagtaacattgttaagatttacccaataaactagtgatttgtaccagatatttacaggtctgcagatcgatcttgaataatatttttattgagatataattcacaaagaaaattcacccttttaaagtatttagttttcttttttttttttttttcagtgcattcacaaaattttacaaccagcaccactacctgagtccaaaagttctttttattgttcactgctttattttgatatgagagcttgattctagtttccttcttgataaaaactgggaaaaaatgttttactggttaggttcatacattttgtatgatctctatattttaatctcttaagaggctacacatttttcctgataactaatacagattttgaatttgcaatacaaaatttgaagctgagttagttgtttgaaagagtagggatcactgaagtccaaattgcattttaaagatcgagcctctaaagtttctggctcagttttctatctgtacctcatcatatggtattctttggcacatgtcttaagttgccaaattcttacttgatttataattaat

SEQ ID NO: 63588 - DNA, 828 bp, Bovine  19866880234447
  misc_feature (1)..(1): n is a, c, g, or t
ntgaaactcatgtgcatcaagttgatgacgccatccaaccatctcatcctctgttgtccccttctcctcctgccctccatccttcccagcatcagggtcttttccaatgagtcagcttttcgcatcaggtacccaaagtattggagcttcagcctcaccatcagtccttccagtgaacacccaggactgatctccttgaggatggactgagtggatctccttgcagtccaagggactctcaagagtcttctccaacaccacagttcaaaagcatcaattcttcggcactcagctttctttatagtccaactctcacatccatacatgaccactggaaaaaccatagccttgactagacggacttttgttgacaaagtaatgtctctgctttttaatatgctgtctaggttgttcataactttccttccaaggagtaagcgtcttttaatttcattgctggaattgaaattttgatagttgtgtgctgtaaatcagacacttcatattcataggccaaaagactagaattagttgacaaaagataagtaaaactctaaagaaaattttaaaacgattataccaaaatttttaaagtagtaaaatttaagacctcttagaataatttagttgtttgttcataatttttgttgtaattgaacactgaagtttttagaatagtaaaaatagaataatgggtttctgtgcaatttgcctttttgtcggtgaatataaagaatgcccctttgttcccctcctttatcttttacctcatccagttcctgggaagttgcagtactcagtacagaagggacaggtccaagactttaa

SEQ ID NO: 63589 - DNA, 1313 bp, Bovine  19866880452138
  misc_feature (1)..(1): n is a, c, g, or t
ngaaaatataagtatataaatgcagaaaaagtaggtgcctttctcaaacccactttataagtaaatggaaggccaaacctagctcctggcatctcttctccttaatagtggtttcaaaacttataatggatgtgtcttcctacgatgatgaccttgagtttttgaaagttgatgaaactcgggtttgaatctcagcttttctttttactagctatgtggctacaagcaaacaatttaaactctttacaatattattttctgacatgtaaactggggtgataactgggtatttaggcttatgaaagattaaatgagataatatttgcacaacactcaacactaatcagaacctgaatattaactctagtaattgtcataagaaaacttgtgttcttttttataaataattctctacataagaaatattcagcatgtgataccaacagagatggttctaagaattaaaaaaaaaaaaactttactatttgtaaaaatgaaataaatttcttttcctggggtgcacaaaaaatgaaacacttatcaagttgcacttcaaatagtatagacttttccatcctctcaagaaagcatattttcacagaggcaacatatgccttttgtcattctaaaaaacccaggtgggatagtttcagtgaaggatcaggaaaaaaaagaaaaaaaaaaatatatatatatacatattttttaatgataaaaatagtttctgtaagatctaactattttatctttgtatctagactaactcccttatatagaaccccaatcaagaaaaacataaagctatatatcactatagaacttgctaaatggatttttttaattgatttttgaatggtttattgatttatcaaaattacttgatattttggcatcaggtagataggcacagcttcagagaaggcaagataaaaattacatttcatcaaagatagattatgggtaggaagatattagggtaaatgtttcaaatatttgttagtggctgctttttaaagttttctttatgcttatattcttaatattaatatgtacatattggcaaagtcaggagaataaatgaagtaattgcaagtcaaacaactcaatgtagcataaatatgaccataatgaaagtttttcactgtttctaataatgaaaaataaatcaaataatcatttggtttctagaaggtaaactaagggcaaaagttctcaaaattagctttagagattttaattgtgacttaatggggttcttggaaggagcaatcaggataaaatacacacatgattttctcaaattaaatgagggg

SEQ ID NO: 63590 - DNA, 1483 bp, Bovine  19866880506767
  misc_feature (1)..(1): n is a, c, g, or t
ngaaaggctacccactccagaattctggccgggagaattccatggactctacagaccatgggatctcaaagagtcagacacaactgagttactttcacttttcactttcatacctccattaaaataaaaagtaactaagaatggtaaggcaaagagaaaataaggattggaaagtaaaagagcaggaaaagtcaatagaggcaacatatgcctttatgtatgataaccttagatttgggcttccgaagtggcacagcagtgaagaatctacttgccagtgcaggagatgcagagacacgggtttgctccctgggttggcaagatcccctggagtaggaaatggcaacctactcctgtgtttttgcctgaaaaattccatagacagagaagcctggtgggctacaatccatgaggttgcagagttggacgtgactgagcacctccaccacttaaatttatgtttagtctttttagcagccccataaagagaaaagctgctataagattcccaatgctaagcaaatgtttgacctgatggggagactagagagaagcctgactgaatggtgaagttggtcaattacttgtccttccatctcttctctacttctggtccatgccctctcgaccctgtcttctctgctgttgagttgatacagttcgtctgctccatagatgtcttctttcttttctcttttgctctaacaacaataagacatctccacccccttacctctaccctgcaacggttagttttactttttcctgagccaagttacctagtgtattgtatgcacacttccaaaggctcattctggcaaattcttagtaggaagaaaggcaccaaaatcttggaaggacttgagggagtggagaaaaaggttcaagttcaaaatgaggaaggtgttccccatttctactgccaaccctgggaaacattgccttaaagcaactgacagaatataactaaattaaatgaattaactcttcctagcaaggaaactgataaactcagaagacagacgatggccctactgtatataactaagatatactatactattatttaacatgtgggttctgattcagggaatagtttacaattaatttttcaatatacctattttactgtagaccacagagtgaatttcagtgttagaaattatccccttattcatatattgtactactaagataataagctagacttcttggattatttggggatgtcttcttggatttaccattttgtttaatttttactggattttgttcaagagacaagggaagcaggataggagatgaacattagtcaagaaccatctttgtgtcagatatgaagacattttaatattgcttcattttaggtctctcattcagctggcaagacttggcaaggcttgctggaagtttatggccagcatctgttctgatctataggttcccaagcccaaccatttacacattactaaatattacagtt

SEQ ID NO: 63591 - DNA, 2266 bp, Bovine  19866880554859
  misc_feature (1)..(1): n is a, c, g, or t
ntatttttatcttgatataataaagtatgtgtaatatgataaatattacaagagtgataaatattacaatttcactagtcagtgattgcaaatcaccttggtgtactagaagcagtcaatactaatgatggtcttctaatggatgcaggcaattgttgatacagtggacaatcttctgagacctgaagctttggaatcatggaaacacatgaattcttctgaacaagcacatactgcaacgatgttgctggatacattggaagaaggagcgtttgtcctggctgacaacctcgtagaaccaaccagggtgtcaatgcccacagaaaatattggtgagtgaatctattgtcaagtttaatttttatttagaagatagatgtttaagagaattatgattccattgtgaatcttttgagttatttccaagtgctaagcttttcttttgtcaagttatgtttgtcccttaataagaaatataactgatcacattcataaaattaatgcaaaagccaaagtctatgtcttatgaaagttggtttgatgtactttttcccaactaaaaaatcattaaaggaaagaagggtttagagtacttaaatgccagaatatggattgcttaagtagtgataatgcttgctatggaactagggcaaatgcttttccatttatatgatatgttcctaatgaatttaaattactttctggaatgtgttctcccagtcaaatattttaggcacacagatatgtgagccaaatgttgatattaaacacaactgctttcaggtgaaaatgtggtcagtgatgtacatcccccatacagcagaatgttcatgctttacagattgcaaaatagctgcagatagttttgggggatcatttagaatttaaatgctggcagtgagaggcaagaattcacttttgatgatatttgaaagaagttccataagttcagtgaaattatactaatgaattagtataattctatactgattatactataatatataatgtatatatactaaatatataatgattatactataatcaatatagaattgacttgtcagtcagtatcggcttgactgatttagaattgttattcagtgtggttgggctcagatgaagtttatagtatcccttagtaaagtaaagaaatttccaaagcgtaaatgtgaaaaaaaaccaaaagggaacacagactactctgtcattgaaaaaatgtattggagcagcagatattgaatgaagttctgctatctaggatgccatatcttattgccttaacgtacctgctgaaacatgggactttatatttaaaaatgcagaaaagcaagttgtatgggaaaaatagagataaatctaattatgatacatggatttagatacaaaattttaaataagtgagtttttagaaagaggatattattaaaattgtatttttatttatgaggttttgaagtgataaataacttaattttaagtcaaaataatatggcttgctttgggagagcagcacaaggaaagtgatagtctaccattgcttagtacaaatagaaaataaaggttctcttttctgtctagagctgttatttctgagtttaatttatttagtagtctaatgaatttcctaagatacacattaaacaattcttctcagatgttttcagggatttgcctataaggttaaaggagtgtagacttgattatctcagaagataaatcataaaaagtatttgaagtgttgtgttgggacctccatttgttttttaaatcttttgaagactattttaaaagcaatgccccccccgcaaaaaaaaaaaccctaaaatttcccacttaagctgcttccaagagtgcaagaagttttgataggccaggttaattttttaattaaagaaagaacgttatgcatagatatctcatagtgtatatagtacatgttttaccgacttctgaaaaataatgccccgagagggaagtttgagggaaaatcagttcagttcagttgcacagtcgtgtctgactctttgcgaccccataaactgcagcatgccaggcctccctgtccatcaccaactcccagaatctacccagtccatcgagtcggtgatgccatccaaccatctcatcttctatcgtccccttctcctcctgccctcaatccttcccagcatcagggtcttttcaaatgagtcagttcttcacatcaggtggccatagtatggagtttcagcttcaacataagtccttccaataacacccagga

SEQ ID NO: 63592 - DNA, 2487 bp, Bovine  19866880562985
  misc_feature (1)..(1): n is a, c, g, or t
ncccctttcaaagagggggagttgtggtatccatggtgatgccctctccaaatggtccgttaggtgtatagttgcaaagatagtggtcttcatagttgggaagttttagttttaattgtaaggaaattaaaccattcagaagagatgtgtttatgcaacctcttaatggttagggccatgccttaattgtgtgatatactctaattgagtaataagatgactttttaatgaaaatatcaggacacttttcttatcctgagctacacttgttcttttctatccatgaacatcaagataactttggaaatttctggcttgaaggaaggagtagttaaatatgacccagattgggggcccaaatccatgccactcagaatcataagatgggtattgatgtattgggaaaaattaagcagcatattatttaagatttcctgaggaatattttatccaattgagctgaactctgagatgaatcaacacctacagaaggtgtaataaaccagcaggatctagccaaaggagtagctgacttgatggcttgatgaaaatctctaccagtgcctaacactatggagaaattttggagctaaaacagctagtattgttctacattgggtgggctgaaatgatctggcatttatataaaccctccatcatcaagtgatatggccactctcgtaagaggatgatgctggacaaggaagttctttgcaactgaagccactactaaaggtgctgtcaattgcagcttgcccttgaaggtggatttgtgcaacaagtacaccttaaaggaggatctggagagggtgtcaccatggctaccacaactcccgtttcttttgaaataaggccgtgttgggcaggaaaaaatgtgcatggaagggttgcatacaataattcactaagcacgatttatcatcatttccatgagtaccttagatttaatgtcaattcctacatagattttcttcttcataaaagaagactctccaagcttcaccagcaccccaccactgcccccacctccaaattgtagtagttaaatgccttgatcatagaatatgtcaataaatgttcctggagttgattttttcaaatctgagagttgtccattgagaaaacttctaatcaaaagaacctcatggcagttttaagtgtgaatgcacaacactagtaaatctaagggttcaaatttcacttaaagttttcacagttttaaagaaagctgtttcatgtcccagaatctaacatgaaggtgattttaatatgctgtagttataacttgtctggtagaagtgctactcctaaaagaacattcattatatataatttaatttataaaatattatatctttcaaaaaattattacaacgttttgacatttaagatcaaagatgatttaacaatatttcccaagaaaaacaccatcaagtacaaacattacaaaggatctctgagtgttattaagagtctaaatcatgttgtataccttaattttgtacagtttacgtatttttgtacatataagaaagggccattcactttaatagagttttctgagcatttttgtgctcgtgtggtagttgctgtttaggataccagttggaaaacagctctgcagacatactctttagatgaaaaacactatcttcctgaccagtggaaccaaatacttgtttagtgtagagatgcaggtaaagagtatctcttttcaggccctcccatccctgccccggggttaagatccatcacagagctctgctgtatccttgatgaccagaggtgaatccatgctgtttaagcctaggatcaacatctgggagaacagactgagttgatctcatccaggacaacccattctcctctttattaagtccttatttagctgaactataaatattattaaacatttgcttatgaactgccagagcaccatgctgttcaacagatgaagctggtgtgttttaattttatgcactctgaatgtgcttagtttagtttccattctgcactccacattttcctaagttccagttattggaaagaatttttacctacaatccaaggcacagattgtcttaatttttattttctgttgttggtggggtgggggttggtttgggggcatgtgtgagaagagaaggattatgggagtggaatgggttatgacacattttcatttgcagctgctacaactcccttgccttaatccagcccagatctcagcggaaacctaaaaccattccagtgaccctagaattgcaccagcacctcaaatggccaaataaggtaagtcgtttgttatctgagccataaatatttacattcactagtgacaaatgtataaaaagtgtggagtgactgtgtaatttcagctgccctcctcaagcctgtcaatagtttctgttatctcctgaaagccccaatgactgatgtgtgctagtttaataagaatgtgctcaccagcttgttaccctcccctaa

SEQ ID NO: 63593 - DNA, 1717 bp, Bovine  19866880619743
  misc_feature (1)..(1): n is a, c, g, or t
ntagtattaagaagtattcacataataaataattaaaatacactaatagtaaccccttaaaacatcctttactttttacacaaaggtttgaacactctagtagttcactattaaaagcataggacagattttcagcttcatttatattcagaggcaggcaaatcaccaaaactcatttacatcctttcattttccttaaagcatgttaacagcaggtgtctatccatcccacctttgaaataggtaggtggctgaaaatgcctctacttttcagtcaagaccctgaattaaaaataaacttgagctctaacttcatcattttctctacaagatgcggtaatacagaataaatatagtacttagtttgttcttattttaatccatactccacatactgttttcacaccacaaacttgcttattttaaccctgcatgttctctgaaaacttgagcattcaagctaataaagctgacaaatgatctagtaagaaactataaatgttccttatattctcattttatttttgcacaccatagactcgtcagcattcctttacactaatgaatgctaaaatattttttaaaccatcacaatgggaaagtcattattatattagctgtatactagccttacattgtacaaaatatatctatgtagatacacgtataaaaatatcttcgcatcttctgttggcaattttccagaaataaaaatacttaatatttaatataatttccagagacatatacctccttcaacctaacttgacataagtattccaagaaccagactgaaacacaaaactcagtcagaatgaatacttaatacaatgtgaataaattaagtctttgtgagagtctttgtcaacagaaaagaatacagaaaatattcaaatcatcagcatcacaagcattttcaaaataaaaatactaaatactaacctaacatgttttataagttgataaaaatcttttccgggagacgaggtgatttgaaaattttcagactaaatcagccttttaaaaaacactgtctccatatccatgaaaacctaaaattcagcagggtgtgatctgacttacgtttttctttacccctgtggccacctgcatttcctctgaagttacaaaaaagataggaaggaaacaaaccaatctacattctaatcttaaaaacagatgttacatatctaaacaattctaactcctctgggtatcagtgtccagggacaaattaatatttaaagttaatgggaaataaagtaagatctattgaaatgtaacttgaaaagtatagttttatgtatttttcaatctccatcaacaacatactcatttgttatcattcacctgatcagacaataaaaataatgccttctaaaaagattaagaagattatcatttactaatgctctaactagttaaggggttacaaagttttttgaaaggtagttttacataaatgccaaccaatataaacataaaaattttcatgagtagaaaaaggaaaaacaacacctccccaaatttaagtatgtttttggttgttttacctctgctaaaaaggaaagggcaacccactccagtatttttgcctgagaaattccagggacagaggagtctggtgggctacaatccatggggtctcaaaagagcccaacatggtttagcaactaaaccaccaccagcaccacaacaacaacaacaaaaaacagca

SEQ ID NO: 63594 - DNA, 1651 bp, Bovine  19866880676597
  misc_feature (1)..(1): n is a, c, g, or t
nattaaaatgaggtggatgaaactggagccctattatacagagtgaggtaagccagaaagaaaaacaccaatacagtatactaacgcatatatatggaatttagaaaatggtaatgataaccctgtatgcgagacagcaaaagagacacagatatatagaacagtctatggactctgtgggagagggagagggtgggatgattgggagaatggtattgaaacatgtttaatatcatgtaagaaagaattgccagtccaggttcaatgcaggatatgggatgcttggggctggtgcactgggatgacccagagggatggtacggggagggacgtgggagaggggttcaggatggggaacatgtgtatacccgtggcggatttatgttgatgtatggcaaaaccaatacaatattgtaaagtaattagcctccaattaaaataaataaatttaaattaaaaaaaaatctactgctatttttagattttaatgtcttacaaaaaatacagctaaatacaagattatctgtaaatctgtatctgaagttgcacattttatagccagagttttagaattatttttatttacaaaaagtagtctaatacttaaaatagtacactcatacataacactacatattttgttagaaataatagtttattaaatatacttgatgtcattattatgaaaaagaacactggaagatcttgctactgctcttatctttgaccctttagctcttccattttagcaccttcattactgtcaagatgccattagaatgtctgccacttatttacatcactacatcctggacaagaaaaaaatcttctgggttcaatcagtaatactttccttttgtattcaactaaaacgcagaatagcatcacacaaaggacaagatgacaaaagataaactttagaatgtaaaatgtcacgttttagacatgaattgggcatttttaaaatgtggtttaaactgttttagtttttaatcgtcagacttctttaatatctgtaaccaatagcactaataggacttgtttttataattactattactacctttcttaggttgggtaacacgggaagcaaaatttgagccacagtctctgagatgcttataatgtccttagaactatcagtgaagccttaactgaagcaggattaggtagtctgagaagtacaatttggctgcaaataaaggcttagcaaattcctcgggggtgggagctctgagcttgggacagctcttcaggaatgtgttaaaatgcagcaaaaatgaggaggccaacctttggcactctggcattcagtggaattcctctagggagaaggatttatatccctttagcccatggcagttcctgggcagggactcactttgagcccctcctcaggtaactcccttggcagctgagggggaaaatggcctggtctgaagtgggaatctggggggcataccataatatccactgcaatgctataactgtaaagagtttaatggactgtttgcaaaaacagttcttttactaccacttctcattttcatggtttttattggattttatcttcttgtacacactaatatgtcaatcctgtttactaagcgatattcaatgggtttcctatggagcaatgaaccttaacagg

SEQ ID NO: 63595 - DNA, 1134 bp, Bovine  19866880790844
  misc_feature (1)..(1): n is a, c, g, or t
naggattagagtttgaaataatgcaaaagaacatgcaactaaaaggagttttagagggcaaaattgagtaaactagatttctgttgttcctattttaaattccccttaaagataacacccttggtttagatgtgattttgacaaacaggaaaattataccataaatattttttttctgcctcccaagatgtttcatgagatgtcatttattcagtctaatataaatctctgcatataaaagaaattcatctctagtctaattgacagctaataaatttcttcttttacagacctcactttgattacagtacagcagctaatgttcacacaacttcctatgtaatcaaaatgaaagcacagaaacaaattcataagacttttggtgatgtggctttaaaaaatctactatctaggcaaaagtaatgtcaaaaaaatacaatttttgttcaagtgttttaaattgactcaggaaatttttttttgctttttattaaaatgactacattctgtatgtgctcattttttttttttaatcaagaggcaagaaagcactgctgttctttacccaaaatgaattctttcagtaagaaatctttcacaacttttagtacattctttcctcatcaaacttgtttttcagttaaatgcactttttattacttttattttacagtaatttattttcctcatgcaacttataaagcttataaaaagtatatagaaatgttttgtgtaaaagggagacgaaaaagcaaaagtgagcagtatcttaataatatgaactgaactgatacattaatgctggaggacagggaaatacatagtgttaatggtcaacaaagggataactctcggaaaacaaaatgctatgcaattattctgcaagtcatgaatcttttttattaattatgtggtttaactttgtgcctcataaaaaacataatgttgttatccttatgttattctaatttaaaaagatgcatctgaattctcacagaaaacactatctatacacttcttgagctatttttcccttatggaagaaccatttgaagaatcttttctctgagggtagagcatttttgaactgaggacaccagactaatagtctgagcatctcctatattccaactc

SEQ ID NO: 63596 - DNA, 947 bp, Bovine  19866880915891
  misc_feature (1)..(1): n is a, c, g, or t
ncaaacgctgaattcaaggcctttccttttctatatagagacagtaattaactagtaagcagcagtatatttctaccaagctttagataacaataacatgtctccatggcatgttttagtagctgtgtgtgtagaaactttgtactaactgatttactgtcacaagatctgtttgtgaaccagcaatcattaatgtcttagaggtaaacacaaatttttaatccctttgaaaataaagatcaaatattacatttaataagacaaatatttacatttaagcattaatatttataaaagaaatattataaataaaacagtaaaagcagtgccaaatatgtattatcagctaaaatgggttacttaactttctcctccttctattttcatatatcggtcatttttagtaactattataaaataaaatcctgaagtaaatgggcagttttatgtctctaattctatacgctgcttctattgctttctattaattattttgacttccttaactgtattttattatcaccatttgttttctaatataattctcatgtgctttcaaatatatttcttgaattcaaattgctatgtattctggaatgctcaattagatcactcaattttgaagctttctctactcacttcaactattaaatggtataaaagtaaaattacctgtgtactttttaatgctatcagtctacactgaaatgaaaattatcttatcagcaggaaaacttccaaaattcaatgtacacattcattcttttctcttttatttatttaaactcaatattgactcacaaaccatgtttctctagagcttgtcacacttaactagcaataaagataataacactgactatacagtagtatatgaaagaatgcacacataatgtttagctctggtcaataactgtttactcagaaagcatttaattaaattttag

SEQ ID NO: 63597 - DNA, 1504 bp, Bovine  19866881115608
  misc_feature (1)..(1): n is a, c, g, or t
ntgggtgtcacaaagagccagacacgacagtacacacatacttatgtcttagacatggatgctgagtcagaaaattctagaagagaggagttaataagctgagaatgccagatattacggtatatggtgttggaaatattcaattattgctatggtaaaagaaacaaatatgttgtttttcatggtttcactggaaaccatggtgaaagggaaaagatggctggatttaaaaagaaaatctaaatgacaattatagtaatgtgtgttgaatacttactaacatgcccagccagcacggtggtcagcacgtcccagaaaagaggtcatttaatggtctccaaaaagctaatgaggcagaaactgtatcatccctactctaaagttaaggaaactgaaactcaaagagagcaaacaagttatccagatagatatagaaataacagagctaggatttgaattcatgactgcctgactccaacacgcttgctctctattgtctcaataatatgtgtgtattaatttgagtaagatccaaaatctgcctgttctaaattgaattgtcttctgatatctacaaagagcagcacttttgaatctagaacagaaagctgccttttcattttggcttaactatgggctgtaaaattttaattaccttttgtttagaaagtgctatagaacctgaacttgtaatcagtgctggaagtaggcacaccaaggggttgttgatttccctagtgaatttgagtatcatttatggaaatgtaattacagtggaatcctattataacgatcaatttgggcaacccccatttgatcattacatccaaatgatcaccacacacagaccataaaacagtgagcctctcaaaccagacaggctaaacagtaaaatatccatcttgcaaaaacagtattattatcactaagtacctcagaaccagcacagggtcagtagaattatttgctctaattagctcttctaaagcctatacattctttagctaaattgtaatggctcatatgaaaggtttggaattcaactaagtcaactagtatttattttgtacctgctgtgtactctgaatgaggctagtcactgaggagaatataaaataaataggacttctttctgaagcttactatccactttcagaaacaagttgcataaactccttgggcaactctgcctaaaatgagagcctaaaaggaccccatattataataacagtcagtttcagacgtgaaaactttggcaccagtgaaaaacaggttaggagtatattcttttgtcacaaaaaatgattgcaaaagaaaatgcaataggaaatgaaaataaataggtccttcctgcagaggcagcacctgaagtcagagacagcaaagggggttcatctcacattccaacttcaatgaattggtacttaagcagggagagcaatgggattttctctctctcatatcaatatcaataaacagttaaatggctgactgcatagctggg

SEQ ID NO: 63598 - DNA, 1228 bp, Bovine  19866881127909
  misc_feature (1)..(1): n is a, c, g, or t
ntgtctttgtaataagcttcaaaatgttaccagttttctgttctagcccctactttcaatatattgatataacttaatataatttagataaataccaagttgagaaaaatttttaaataagaacttttgtgttcaggaagtaaataatgctcacctgggtttaagtcacacatgaaagttgaaaatgggttagtattttattttcagaagatattgctctttacatcagaattgaaagatacatcaaatctaacattaaaatgtagtgtctgaatgaatagtactgtaatgataaacaatgagcagaaactgagttaatatcaatctctggcttgaaattatgaaaatcttgtgtgtcatgtataattttgcatctgtttttggaggggggacactaaactgaattcgtgctgttatatttgaatgttttcatacatttaaaaagtgtggatcagtggctcattagtccacataataaaaaaatttccaatcaaaatagagaccactttactgacacagttggttaacttagcagggggctagcaaactagtgactttttcatgagatactgcagttttatttctagtgtcacctattaggtcaggattcatatctgctgttaagagaatttcattttttggcacatgaggccagggggtgttacttttgaagcagttccctcctacaggtaaaaagaacctgggaggaacccatactgctagctgcgagagcacacacagttactgcgcaccgcactgttaacaacattgttcaggcgtcacgtggttttgtcttagaaaaagttttatgtgacgtgatagacctgttttgccagccagcagataatgctctatgaacacctatagagaaaacctatcaaagttaggtatgagagcacaggaaagaagatataaaattaaccttttagccattgagtttctttgggtcccttatgtgattgttacctttttagatcttacagaaatgagcactttttgtgtcagctcctgaatctttgctgataaactcagataaggcttttaggtggtttctttcctccttcctcatttattgcgtgactaaatttgagccagttgtttagggttcagacatatgcaaggcacggtcccttctcttgaggagttcgtggtcttgtgcgggggtctaaacctcaaataactcctggaggtctgcagtaggcaggaaagtgcttgcggggggacccat

SEQ ID NO: 63599 - DNA, 1686 bp, Bovine  19866881222265
  misc_feature (1)..(1): n is a, c, g, or t
ngccgcaggtatatcaaggggtttctgaggatgggactggttgtctgcattatttagaatccctcttattaagatgttctgggtcagaagctctaagaagctgaaattcatttcagcaatcctgtagttgacctagaaaagggatagtaactggggacccaggtcttttaactaaggtgttattacctcttgtggtgtttccctgtgctcaggtcactcatccactgttgcacttggaatccttggggtcattctgttggcctttctcatcgcaaccctcttgtggattcagaggcgaagacagagacagcggcttgcaggtctgagccaaattatcgtgtctctaacatttctatggcataaaaaatttcttggaataatacaacaacaacaaaaattagattcaagtatcaaatggccacaaagaggaaacctagaagagatttaagcagtttccccaaaagaagaaacaaaaattcagagaagaaaaggggtactgcttgtattgatgattattataatgtagctatgggcttccctggtggctcagtggtaaagaatccacctgccaatgcaggagatgagggttcaggccctgggtcaggaagatcccctggagagggaaacgcaatccactccaatattcttgcctggaaaattcaatggacagaggagcctagcaggctatagtccatggagttgcaagagtcaggtacaacctagcaactaaaaacaacagcaaatagtctatctacatctttaattgaatgttacagaatcgatcatttagaatgagtatgcttttgtgatgcatgatgaatcctttattgtccaaacatttgtttgctcttactctatgctgctaagtcactttagtcatgtccgactctgtacgaccccatagacggcagcccaacaggctcccccgtccctgggattctccaggcaagaacactggagtgggttgccatttccttctctgcatgaaagtgaaaagtgcaagtgaagtcgctcagtcgtgtccgacttctagcgaccccatggtctgcagcctaccaggctcctccatccatgggattttccaagcaagagttctggagcggggtgccatccccttctccgcaaaactgtatagaggtgcggattaatcatctaccatacatccatcactcggttaggtttgggaacctgtgagccacaaatattatgttccaacaagtaggatgtgacaggcaggcatgaaaataaaaggcagtcatggttctgagtattacaggtgatcagaagtcaggtcccaaacggtcacacgattgaaaatgattagagagtattccctctggtaaagtttcagggcaccagatgcgactgaatctagcaaaggcaactttttctacaatagctaagagaaagttagaaggacctaagtaatagaaaatagccaagactgatttggaagcttccaatcacatgtaacaaagcacagtctttttcctggggattgtggtcaggtgggggataagcttatgaaggcagtctctacttgacataatttattgagggacccacaaactcactgacatgactctacatgatggcaagctggataagttatatggctttccaaaggagatgcatagtggatgagaaatggaaatgagattttatgatttaggaaacaaatcatag

SEQ ID NO: 63600 - DNA, 1526 bp, Bovine  19866881222274
  misc_feature (1)..(1): n is a, c, g, or t
ntttatggccggccccagactttgtaacttatgtggcagtaaagtggttaagtaaagttttcaatccaatcttggagccctttgaggctaagataactatgaattactaagacttaaagttttcttctggaacaaaaagctatttttgaaatattctgatgtgattatatttatcatcagggccttttgtttttggatcatggtaagaagtgacatgatcctttagctcatattttttagatacaatttccccggcagaacactttggtcattagctcactatattttctcattttctcaatccctacacttactctgttaatcttaggcattatgtttggcatggatcactgaaccgatttacttctccaggtctctttgaaggcaggcttaccatcctccaaactgtttaggagagtatgatcttcctaaaacacatttttggtcttggaactcccctgtttggaatccattaaatattttccatttcctttagcatcaaatccaagttcctcactttggatctggactttgctctttttcactttattcctattctgaattttaggtgccagacacagtgaagagttgcttacgctaactcttgcctataaggcttgggacatgcttgacttttgacataggagtctgctctctttatcctaactgtttagtctggcttaatttttacttatcttttggatattgccttttgcctcatttcccttggacatcttttctgggtctctataaaatgaaatatctgttcttatatctgttcacatatcatccaggtttactcctattttaggacttactattttgcactgaaatttcctttgtagactcctccatagacttgacagtcttcttgtaagttaggactgcatcttgtccactagggaaactcttgcaccaagatcagtgtacagacacgtgacaggtgcctcgggtatggatatgtttgcttaggtgagttcagttctgccagaggccttctctgagaggcttgcagttcccgggcttatgctaggctgttcagattgactcaggaaagcattggtaaaaaacataattttacgcctgaacttaggtctgtggaaaatcttgctcaaaacggacacacgggcctgttctatagtatatagcactctgcgtgtcagtaaaaacaaataaaaataattaaaccagttaacgcaaaagagagacatatatacaggtacctcttgaaaaatattggaaagtgtatattggccctcagtccagaagaaaattggaattaggaagtaaagttagaatcataaattagaaaagactgtatacctcgtatttgcctgtttgcattttcattgcagaattcttcctctgtaggcttttcttctgcttttcagaccacatggcggacactgagtctataacaccctgttaaaaacacaggaccaaactgagctagaattccttctgcataatttctatggaaaatacaattgctgtaacttgggaacaaatcaatataaataaagtca

SEQ ID NO: 63601 - DNA, 1012 bp, Bovine  19866881256154
  misc_feature (1)..(1): n is a, c, g, or t
ngtggggtatgccaaaaatcttaaaggagagaggaattaaaacgaaaccatttttttggcaacaccttgccccaagaatttgaaatggtttttaacctggcttttttttttcttcattgacaaggatccatcttatctctgtatacctgggcaaaggaacgtggcaaaaaaggagaatgtgtaaacagaaatctaaaacagattctaaaaaagatattatggagagataaagaaaatttttggaaagcaattgaatttctttttctttgtattgaattaatgaaaatacatttagttttcaaaagaagatattctctgggttaaatttatgaattattcttaaataaaaagaaaatgtggttgtaactgtagtttaaatacgattttttatctttgactgtgagtcagtcctaagaagccactttgggattgcttgctttgcatttagtagatgcaccaggtaaacgtcttgggcagctttggtttgggtgaattgccagtttcacactggtgctgtgtaagcaaggtaatgcttccttttccttgaaatacactgtgagagtacctctgggtgaaatatgaaaagtttgtgtatcctgactgctctagctgtgttcttaaccaagatgttgggcaagagtaatcatgctgaaccacagattttcaggagcagttatttatcaagtaattggtaaggaggaggaacaatgctagataatagtatttttatacaattatgttctgcatctttaccacacaattgcctacatgtttcaaatatttttgccaacctttgttattacctgtagagggagcttgcatatgagataaaataatcaaggcagtataaattgatcatttcccttttgaaaatgatattttattaacattatttttgtttgagaaaaattattctaaggaaaataaagcattttgagattaggcaaattctagtgaaatttacagtaataaatgccaggtttttatgattttctgtatttacagattacag

SEQ ID NO: 63602 - DNA, 845 bp, Bovine  19866881327448
  misc_feature (1)..(1): n is a, c, g, or t
ntccggagaggcagagagggcaattctactgcatgctttattaaactgtcttctccatttctccccaggctggactgcacagaagaaattcattagctccatttaaatgcacacccccagagcctaccttcagcttccagcagagcacaacacatttcacattggataaaccactatgactctagagaataaatttttttaaaacttaaatcagccttcatggaatactttatattgttatgattttttttccccttataagtgaagaactactctgtagacaaagactgggaaaagtcattataaaaaacaattcatagtagagaattttgttgtaatgagatcaacaagacactaatgctctaggtcattggcctgggcttagaagtaattttattattgcaaagattttttcaatattgtttcttgttaaaatagaatttaactctgcaaataaactttcatccatttacaactcacaagtgaagaccagtaacccatgcttgaaactttagaatcatttttaactcctcatgtgtgaccccccaccacatccaataaatgtccaagtcttttctctactgttttttctgttgtacctcttggatattccaacatatcctttcagagtattgtacctgagctgtctctaaaatgttgacaatcctttgcctcagatcttctcttgctgtaagctacagaggttaaattctccattctcatgactttaattaccatttatactatccattcaaagtatcagttcctgactatctcttaaattttgatagtcttttgcctcagatgttttcttattgcaaaattcagaggattaaattctccgt

SEQ ID NO: 63603 - DNA, 1241 bp, Bovine  19866881414129
  misc_feature (1)..(1): n is a, c, g, or t
nacctggacagtttgtttagggaaaagtatacactggttttctgataatcaaaagctcaactctatgataaaacagtcttctctaagattaagtgggtgttaaaaatcctcaaggatattctatgtcatttcaaacatctttcatttcatgaaagtcttccttacaaaattctgttacagctgggttgaggaacatttacagtgcatcaacttgttaaccgttaaatattcatacttgcactgccaagcaatattatattttaataccaattgcattttcaggaagaaaagagcttgaactcaatgaaacagattgcattcttgaaacttccaaacttccatcaaactcctctcagctgttttatttttcttcagcatacattctcacttttctgctttcattggcaccgtttgtatattagtcgatgtatgttgaggcaatgataattaaatttcacttgaagttaagagacggagtgattaaatttgaacttaaatctttctgaaataggtagctctcttgtatttcacagagggaaaattctacttgaatattgggaagaatataattatcttgttcaagatactaggtctttcaagaaacaatatggtattatcttgagtagaaagaggataatcagaaattcaaaggaggttttctgtagttattttacattttcaggaagaaattgtactttcctcttacccagacatttgccacaaaagataagagaaatgccaaggaaggctctgcttgcttccccaactgtaaaagaaaaaagggagaacatgtgatgtctctgtgtggcaggtggaaagataaggaagcaatctatgcagcaaaagctactccagtgatggccatgattcactttcttcggaagctgcaagcaacagaaaaggctcacagcagagttccccagtggcacgggccctctgggggtctagtcacgtgcagttaggttagactgtggggagaggaagatctacccagaattgggcctggtagataaggattgtaaaatttttacaacctggattgtaaaattcagctttgcctatcaggaatctagttcacctcctaaatagaagggctagtgagtttcctattgcactgggactttaattcagcagtttcccttatcctacatcctgcattgattaaggaatctgaatgcaaaagtcaaagctgcattacaagctcaggctgtacttcagtgccggattgacaatcatcccta

SEQ ID NO: 63604 - DNA, 1639 bp, Bovine  19866881469626
  misc_feature (1)..(1): n is a, c, g, or t
nttattgaagatacttttgtcaagagtcaaagtatggatcttattttctacaacatgtggattagggaaaaggggattaaaatatttcagtaacttactgtccaagagcatacagttattaaactagtacagccatgattcagatctaaacttattttttttgcagagtccatgttcttactaagtcatgctaatcttagaggaataggaaagaaatgttaccattgcatgtatttgccttctttctagagaagaacatggaacatactagactttctcttttgcttgaaagtcattcctgagcttgttgcgttattgagtattttctccttcttcaggccttagatctaattaatgtcaaccccgagagaggcttttcatagtcattttatgggaagcaacttccaagttacatcatcctatttattttctttcttaatagttctagtacctgtaaatagtttatttgtgtgttttgtttcctcaaattctgttttacagattagtacttgacacacgttgggtgttggcataaattaatagctgtttgtttagtgaatgaatacaactctttatgtatttggcttccttgtaaatatctagacataaacttaacaagtactatttcctcaaaaattttcttaaagaaataattaaaactgcacttaggttttaatttccagttgttacagtggcagtcaaaagttattttaaagaaataagttatatataaatttccatgaaaatcattgggaattcttaattgaaactggtttactgatactagtcatttctgtaattcttacattcatttcccacacaagacccacttttgcaagcatatcttaatgattgaattattaagtagattgtacctgacgcaaaaacatggtaatctctcactgatttggaggatttatatgattttagtttttgcatgaaataggttctgaggactgtgtatagtatgcattggaataatacatatgttaacattaaccaagggtgaagttaaagtacagaattgttagtggcaacaaaatgctttcagtgctagaatacaaaatgctatctgtggctataaatatacaaagttatttaagaactgaattatgcttccaggaagaagaatttgagattattttatataaaatagtgattacattttaaactttgagaagcagaaaaatattccactaatttaagtagtttttcttaagtaaatttaagtgggaactttctctcttttagactctcttatctattgtttgaaaggatagatgagagaaaataaacctagtaaaatatttctagtgatctagtagtagccaattgtttctgctttaacaattacagtatttactgtcagaattctaatttgtcttggcaataaataactattattattagtgtttgatgattactaaaagcacagtgttttaaaatgtctactttctaaaaataacaaaaaatagcctggatgtaatagtgttttgttttaatagtggacagggtagcattgttgctgagcccttgggaagaggggaactctcttttggggtctctaaaaacaaaccaaacttcttccctgggggttctgacttccctttactactgtgcatgtgggccagtgccatgt

SEQ ID NO: 63605 - DNA, 1576 bp, Bovine  19866881581431
  misc_feature (1)..(1): n is a, c, g, or t
nttatattgttgagaagttgagaatatgagagtatgtgaaagtatcaaattttgcttgccatacacagatactctagcaattcactttaattctcgaagctagctgcattcttcattgacgcacaagccaagtgatccaccactaagagttaaatgaggtgacgttcaggcgtagccctaggaggaacccggggccacaagtgcattcaaagtgtcgatgatcaatgcatcagatagtcttatgtgagtatttgatatatttccagatatcaataaattaaaactggacccattctatagttgagtgtctctatgtacaaattccttctgctagatatgcttgtagattcaaaattaaaatcacagggttcctgaactccaagatctcatagcctagtgagaaacaagagtaagtacatgcatgactaatgaaaggtaatgtatgttctgtggtgttcactgagctggtataaactaaaggctacaagagctatttggaggtagaagcaattaattcaaactgggggatcagaacatctcttcttaatactggttgaatttaagatataaaataaaattaaggaaaactctatcattgcatatttaatctgcttgggagggctttaattactcagaaaagagaaagagaatagtacagtagaaccttgattaaatggtacactctgaatttggataatgggattttctcattaattctctttaagacaaaaaaagaaaagaaaaaaaaaaaaaaactggtgccttgttgttgctattcctacttttaacaatgcctattcaagcagttctcactgaattaatatggagtaggcataggagcaaatatgagtgattcataatatataatccctgacttcactgagtttattattttgtgcatgaaaatagacataacataaaatataacattaacactgatatattgacataaataacaataatataaagaagtatgtaactagctagaaataagagttctagagggattaggtgatgaaaaaaatattttgaactagaataaattaacaggatttagtcagaatatattgatttgtatcagagagacgatataaaaaaagaatatcagaacttatcgataagttgatggtgtgcagaatggattgaatctgaagatatagaagcaaggagacaaatctggcaacttttaatgttaatcgtacctgaaaatgttgcttgatatgtcttagacaactgaattctggatttctatttttttaattaaaaaaaaaaatttactttatttttggctgtgctgtttcatttgctgtgcaggattttctctagttgtggcaagcagggcctactctctagttacagtacataggcttctcattgcaaaggcttctcttgctgcagagcaagggctctagggcgcatcagagtcattagttgcagcacgtgggctcagtagttgtggctcccagactctagagcataggctcaatagttgcatctcacaggtttactctgctgcaagtgggatattcctgggtcaggggatcaaactcaggtctcctgcaatagcaggcatatt

SEQ ID NO: 63606 - DNA, 720 bp, Bovine  19866881699013
  misc_feature (1)..(1): n is a, c, g, or t
nctaaggctttctttttttctctgacatgccccaaggtgttttaggacagtggttggatatgtcagagagaaaataggttttatgttatttggcttgaatttccattaggtacctatttgtctggacaaacaggcaggagtgcccatctttaaataatgagctcagagttacctggggaattacttaccaatgagtgttaccttcaggacgagaaaaaatagctgataaaatcattcctgagggttataaaacacccaggtgggtagtgtgtgcagcttcagcctggataaatcatgcctctctaatgtatttggaatttttgaaagagttaacgaaatagtgaagcttagagaagtagtgggtattaaatatttagacattcaaaagggttttgctcaagaacctacccagagacatttaggatccatttcagccttatgaagggcccaagatgtgagagctaaaatcttttcctataaaaattcagttaaaacaacaacaaaaaaaggttaacagtgaaaatgaaaggtaggaataaatgatgcagttagcctgaagggaggttaataagaaagtgccccagggaatgatactggaaccagaatttttatatatgttaacaccaatcaatctggaaacccttctaaataatgaggtttcaaaatatgtgggtagcagtgaactgttaaattagtcaggagtagggaacaatttgagga

SEQ ID NO: 63607 - DNA, 577 bp, Bovine  19866880352355
  misc_feature (1)..(1): n is a, c, g, or t
ngctgttgatgtgtgggccatcggctgtctggtaactgaaatgctcatgggggagcccctctttcctggagattctgatattgatcagttatatcatattatggtgtgtttaggtaagattatgcatctgtattttaaattttagtaattttttcctatgtgtttctttttgtattgattttgcaagttgttggtacactaaagatgatgtgtgtgttttgaatgaatatagggagcaaataggaaaacatctctccctctctctctctctctatatatatatatcagttcagttcagttcagtcgctcagtcgtgtccgactctttgtgaccccatgcatcgcagcatgccaggcctccctgtccatcaccaactcccggagttcactcagactcacgtccattgagtcagtgatgccatccagccatctcatcctctgtcgtcccctcctcctcctgcccccaatccctcccagcatcagggattccaatgagtcaactctttgcatgaggtggccaaagtactggagtttcagcttcagcatcagtccttccaaagaaatccaagggctgatct

SEQ ID NO: 63608 - DNA, 1112 bp, Bovine  19866880703403
  misc_feature (1)..(1): n is a, c, g, or t
nagttgatgactatctggatagcgaattattctacggttgtcagattcattctgttcaatatctcctctgcctgagaagaggaacagagcagatattaaagcttacaatgtcatataataaaaattagttcaaagcaatgaaagttaaaaaccctaacacttgatattcttgttttagtttaataagataataagctcctttgagttgtggaactgcctattattagtaggttagttagaaaacaacatgacactgaagtgttaaccgagggtactgactagactgctaaagtcccttcttcgagatctactggtctgatcatgtgaaagccaagtatcagaagtataagtatttctccttaaccaaactcttgcaatcacccaggcaccaaactgcttttagatagtgagatgtgtttgtactaaatatttgtttagtactttacagttcacaaattaatcttgtataaaagactgttgtataaaattatagccaaatcagtaaatttaacagcaataatgtcatttatataaccttttatacaccttagggtgctcatatatacatatataaaatcttatatgatcctcccactaacacaaggaacagaatgaggcatataaagaaaaggcatcacacagaaaaaatttgtgtagtaactgaatggtttaagagaatgtcacaatttaagggtcttacacaaaataacaaactcagtgacaaggctgggatgaatcccagctcccataactcctggtttaataacacacttttattaaaaaagtatattttctaaatatgatgtatactatctcccacctcctcccaaaagcaatctaaacatattcatagaattcaaatagaggttctacatatattagctaacaatggaaacaagtcaaaaatcatggcaacttacttaatacctaagacaatcaaaataagaagaatcagggtgtgcttattgtttatctgtgaagagataagagtgctaagtaagagagtaggttattggcagctcggttttgaattcttagaaccagtgacaataaccaaagaaaatgtgtctcaaaattctcttattattttcaaaatacatgtctctatggca

SEQ ID NO: 63609 - DNA, 775 bp, Bovine  19866880722220
  misc_feature (1)..(1): n is a, c, g, or t
ntaaaaaatatgaaaaagataagcaattggcaatgtaacaaggatacaatccaatgtgttcacagattggttacctgtgagactggtgctttaacatggggtggaattccagaggaagaaacagtgccactaggaggcaggtttttactggtcactgaagcccaggagaaagcctgcaggaaatgcaacaaacctagactactaatcatggaaaaccaccaacattcctatagggaaacttccaaatatatattttcttttcatttctgaactattgctctatattggaggactcctaaaaagaaaggcacacacacacatgccagtctatgtgccaggtttcaaaatctcattatgcaagattatgactgtctgaactactaaataaatccacaagcaagttcctatatactctaagtagatgagcaagtggcaagcaaaaccactaacaactacacatgctagaaaaataagaacctaatagaatcaatttatttccccttttgggggggaagataagggtgttgtgatggcgctaaggggagagaggaaggacaggaaagaagagagtactagctggaaactttaacagacattcacaaatagaacaagcaatctcctcctctcactacccaaatatacctactttacagaaagatagaagatgttttaggtaggtttaaacgaaacactatgggtatcactcatctttccaagacagtttggtgtagtaaggaaattgttcccatttaaaccagaaatagcacacatatca

SEQ ID NO: 63610 - DNA, 853 bp, Bovine  19866880804456
  misc_feature (1)..(1): n is a, c, g, or t
ntaggtctagtgttttgagaaactatattcgataaaatgttccaggataaattttttaaaggaatgctgcatttaaaatagaagccctttgttatcatcagctttatagagttcatgaactcttgccctttgggtaacctataaataattcttgatgttttatgatttataattgtaatcacttgaattatcttttaggagcgaatataagaattccttatgtaaatttgtctttttgtacatgttcctcttattatttatactgctttgtctggtttttctgttgtagataacctagaaaaggcatgcttatttatatttttatacctcaggcagaaataccataaactcagtgtaaaaagtcacaaatttttataatttataaaatttataattaaagttgataattttagtttataatttggaaactatatactgttagactttgaaatgctagcatttgtgataggttatttgttagacaagtttcagtatgatgccttgcttaaaagcatgtgcttttggaaaacaggaaatttcttagagaaagcatggagaatacatgaagcagtatattatgttggctaacttattagccattccattacataattgtaatggaaatagattatgttaggtttatggattgatctgaaaagagactgttgtttgactttgtaatcccccccacccactttaagattgaaacagttcagatcatctgaagataagtctggctcttgcttttttttttgtaaaatcttctcagtgatagaatttgttttaaaacaaatttctggctctttctgtaatcaaaaccagtaactttttatttcattaaaacaaatcaaat

SEQ ID NO: 63611 - DNA, 1042 bp, Bovine  19866881149176
  misc_feature (1)..(1): n is a, c, g, or t
ntaaataatccaattaaaatttacctgtgtaaatattctggagctttattcagcaaagtataatattgcctcacaaactcccgccctacaagcagcggactgggcttctccataaccatttctttgctgcacaatgtcaaatactagggaaacaaacataggaataataattcttaaaagtcatctttgttaaataccatgaagcaaattttcttagacattcaaatgaaaacaaaatatcacttattaaaaaataacagtaaaataataaattcccaataactacttataacctccaacatttgccatttcctctttatctctatgtctctatttcttgatctccctatgtctcaatacaaggggaagtggcatgtccagtgctgtctcagactaggtggcaccataataaagtctttttactcatagtatatttttcctttggggaacattatctcctacattcttagactctaatggtttgtttttggaaactaggcagagggcacaactcagggcttgggagatcatacttatagacagcactagcttttgtcttctttatgtaatactctagccttctagggattaattgcactgtttcaaaatgataacaattaccattaaaaatcagcaatactctaaatactcagataatggtgtttcacattttgtgtgtgtcttttcaacctttcttgctattaattatctaactacatgtcaggcactgttcataggaagtgggatacctcagtgaacaggactctagccctcggagtttataatctatcatggaatacagacaagcaaatagggaacagaatggcttaggtgtgacctaaacgtacctctaagccccaactctcaaagataaacaagtaaaaaataaaaatagaaacatactctttcatcatttaaagtaaataatttatgtctatagccctccaaacagtaaaagtcataacactaggaattaagagaaatgggaagaaaaaagagaaaatatgagtatcactagtttaaatacatatatacacacgtt

SEQ ID NO: 63612 - DNA, 1303 bp, Bovine  19866881219941
  misc_feature (1)..(1): n is a, c, g, or t
naaagcatattatttgtataacagctttttctcctcaacccctatattttctaataagccctttccagctcaggtcaaatttctttaacttggcatcattattctagaaagcctcattactctttggatttctaggttccaaagaaatgaggtcattctgtcaacccaaccgataaagggtatttcttcttctgtgtccgtcctacttcccaaaaagataaggtctgctacattattttgtaggtattggatcttttctccagctttagccataatttaccagttctaacctttcaagagttgaccgctcagcctgcgcttttccctttctcttttggtggctacttcctcacagtttttattcacttcttctcccttggggtagcaagctctggtctttttaatcctgtatttagtttccatgtccgtctttggcatatcacaaaaatcaagctaaaataaaactcccggcaagtaggagaatgcttgcacaataaatatttcttgaatgaccaagattattttttactatcataaaaagcaaaaagggtgctgaaaatatactattagagtttattagaaagtgaaagtgaaatcactcagtcctgtccgactctttgcgaccccatggactgtagcctatcaggttcctccgtccatgggattttccaggcaagagtgctggagtggattgccatttccttctccaggggatcttcgcgacccaggaatcgaacccaggtctcctgcattgcaggcagatgctttaccatctgagccaccagggaagtttattaattccacacttaaaaccaggagaagattaactagaattagactaatcattctaaaccatttggtttgaatcaaattgttttcttactcctcttaatttgctaaaaggaatcttgttgagtaaacaatattttacgcttggaacaacaatgtcatctggatccagtaaataatatcctggtcactatgtttgtttttatttgttttatattctagtcacttgtttgaaggtttctgggctcaaatacaaatactgatataatttgggagaagaatttcatccaattatcttctacccactggaatattctagagtagaaaggtcccgaatatgtcactgtagcataacacttattttgagcagaaggcatttgagttcttgaaatctcttgtctgggtaagagcagagcctccccaaagaactcaaagaacccaactgtcagaagtcaaccaaagaacattcttatcaccagagatcatggagaagtcaccacaccacaccaacaca

SEQ ID NO: 63613 - DNA, 1072 bp, Bovine  19866880494757
  misc_feature (1)..(1): n is a, c, g, or t
ntgggaagtgccctgtttatattacttttcctgatctcctgttggccaaagtcagtcacatgaccaagcctgcagccaacatgggaggagcccacacaagagtttgtataactggtggtgggattccgtgtgggcttaaagacaacgatccatcacatgtaatatctagctgtggactataataaacgccttcatgtctcaacatattcgagtccaatagctgcttcataacacacatttccacatgagctctgtgatgactgcctctcagatgcctcgtgactatggagacacagaatcacttggctcctagggtgaagaatgttatgtaacttattaactcactgagtttggcttagctactggagaaaaccctaaggcacgaatttcctcccaaacaaccctcatcccctcttgcaaacttgatgtgccaggctttaacaatgcttgtgctgactccttgctaccaaggccagggcttttcccgaccctccgcttggttccctattccctcctgcagctctcatctctcctcctccagacagacatgctctcttatctttcctgaagttcctaaaaccatcctgtaatcagccacctctccccatccctctctctaacctccagctctgccctttgtaattctgagcattcttattatagataaaggttatgaagtggaatgcttcaccatccttcatgcccaagtgtggttggctttatgtgctattcaggaaggcccgggtactttagtgatgaacggagcagaggacagttatgagcaactgcggaatagttaaagtgactgatggagaaatatgggtggtgtttcagcctccggtcaggtcacagaggagagaggaaggagtaattaagatggttgggtaatgcttctcgcagaggaggcctctgtcggctgtaagcaagtcagcagggatgggggtcaggaaagggaatggggtgattcagagatggctcattaacatagaaatgaaggaaggggtgagacactgaacatgcacaggaggaggcagccgggtcaagtgctgctactgaaaaaggttaccgcctg

SEQ ID NO: 63614 - DNA, 2141 bp, Bovine  19866880568338
  misc_feature (1)..(1): n is a, c, g, or t
naaacaacgactggtcttgggaaagtcacttccttactgtgcctctgtttacctgtctctgaaaaggggagtggacacagaggctcggaactcttgagtctctacagcttctccttaatttctttgccactctgcaggtgtctttctcagatgtctcttcctgggtttgcctctccatccctgcctctgggctcaagcttgggcgcagcagcctcacgcagaatcctagctgcaaacccaacttggcatcttttttatttttttctgccttgaccgtccgaccacatttgttaatcacacaatttagtgccttgtaagcatggccactgcttcatttccccacaaactcctgaaaatagcagccagggaagatttgtttctagtcatgaaccaaatatgaaggtcgcatgattttgtgattttttttcttactgaagaaatatgggaggcttaagcaggccaaccttccaattaatcctacgaacagctgccttcgaggtgggtgagcctgaatattattcactttcctagtcatttatcaaggaagggaaactgtccgctggcctccgatagctttaattcattgaaggctaaaatacagcacagtgagaaggtcctcgactcacaggcatgatgcagattgttacctgtgcccaactttgctctctagtggaaaggacttgactgattggactgtcaatgtgggtgcactgacccgtacactcaaacacacgcacacacacacacatacacacacacacagtgcaggagtcggcatcttcctgctggtcatagagctttggggtactcaggaccaccccccactcagtggccagcccagttgcccttgtcatctcttccgtttgtccttggtcacacctgcctcacttgcctaattcttagctccatgcagccgtaggcttttctagtaaaaaatgtgcttggttggtggcttaccttagaacaggggaaggagggcagactcaaagtgggaggaagccacagtatcaagagaaaaccagcaaaacggccatagttactaatggatttggggtcaagaagggggaggtgaggagactgaaggggcagagacatgggtcaggtcctgtttccagcgcttgacacctgtaacttcagtctgcttgataacacagagggaggcactattaaccctgtgttatctggtgacccttgcagtatggttgctgtgggtactgcctagcagggacttggttccaagtgggtactccgtacatgtctgctgaagagatgggtgggtagatggctaaaaggaggtgaccttgctgatctgcatactagtttaaaattgtatctctgttgcgatgtggtgttttcaagatcctgggagcacttcgctccgctgtctgagtgggcaagagatttctctgggtccaggttcccagaattccactgggccctgcctgatcagagtggacccaaagaagtcctttacctcagtaagaaatagattccatagagacaagttggcgaattattttccagaatggtgaaggtgatgaacttagatggtgacatattaatattaagggagctcaagttaaagtgaagtgaagttgctcagtcgtgtctgactctttgcaaccccatggactgtagcctacagtctgtctatccctctgtccatgggattctctgggcaagaatactggagtgggttgccatttccttctccaggggatcttccccacccagggattgaacccaggtctcccaccttgcaggcagatgctttaccctctgtgccaccagggaagccctaggcagctcaaaatcaagcaaaaaaagggagaaataatgcttcaaagggctgggcagacccaacagaatggtcagggagccacttaagagagctatgatgaggctgattcacagattctctccctggaaggcaactttgaaatttttgtgacagttctcagagagggaaatagagagaggtcttgtgtgcctggaacagacacatttagggtcacttttctgacggcatggtgtcactggcttcaggacaggcatggtgtcctaagtagagtgtctctgtcctaggccctcttcctcagtaattctagcccaggccctcaattcttacacacctcatgagg

SEQ ID NO: 63615 - DNA, 600 bp, Bovine  19866880763326
  misc_feature (1)..(1): n is a, c, g, or t
ntctgcccccgcaaaggaggaatgaggtctcaggggccttcagattcatttagatttgacgagatatgcaatagggagcaagcttcgaggagcaattttgtgcaggcgaaccttgatttgataaggaataggagatgatcaattgcattttctttgctatccctttctctccccagttcattctgattttatgatcctgtaattaatcagataattaaacaaatgtaaatagccatttcataatgcagcaccatgctttggtgctacctttatgttgaattctcattaacagcctgagttatttctcatttacatgcaagaaagtacaggaacctggtgctcacagagagctgcaaaaagtagtttaattttttacagaggtagaggaatgaaaccataccttaaaactgtgtgtgtgtgtggcaatattcttttgttaaaaacaccttcctgtgcttaagactgacccttttgcatccattttatgagtttttgttaaggatcatggcctgctattttattaaaattatcttattcctgggttttcctggtgactcagatggtaaagaatctgcctgcaatgcaggaggcctaagttca

SEQ ID NO: 63616 - DNA, 1670 bp, Bovine  19866880789916
  misc_feature (1)..(1): n is a, c, g, or t
ntgctgtgcctcttgattgtgacggtaagggttacacaaacctgcacgtgtgtgtgtgtggtgtgtgtgtgtgttagttgctcagtcatgtctgaatctttgtgaccccgtggactgtagcccacacaggctcctctgtccttggaattctccaggccagaatcccagagtgggtagccattcccttctccaggggatcttcccaacccagggattgaacccaggtctcctgcatggcacgtggattctttactgtctgagccaccagggaatccataggtattaaaattcatggaactgtaaaaaatgctactagtctaatcaggtgcctttcctgggtttatagaaagcacagtaactctgtgaggcaggtattatccatttttcccaaataaggatgcagacttaaggctcttgaggagagagcccaagtcatacaaacaagaaatgagagcagaggtgagctgcagggcacgggtggaggtgctagagccagctgcgtgtgtgcgtgctgctctgtttcagttcctggatttgaccccagtatattttattctgaaaagcaaacaaacaaaacccaaaaacaagctcatccaattctagaagtcatcgaatcatagaattcaaagatgagcgggacgtgttggggcttcgttgttgttactcatttagaatatgcctggtccatggggcttaagggactcttccaaagtcccatcttcagaaaacactagtgtcagtcctgactctgtcttccgaagttaaacccgaaaggcattatggggtttttctctcttcatggcaaagattgaaatacatgtaagaagagacacacatagtagctgtaatcagcgagtattcttttcccttcgctctctctcctcttcatctgtttagtttaaaaattcctacaattggttacaaattctcacatcacctctgccttcttatcagctttgtgcagttgggagataaagacccacattatcttcaaatcaagcaggcagttgctatgatgaatctttccttcctaatttaagctgaaaccacaaagtgggccccacgttataaccagtgatgggaaaggggaaaaccagaggggaaaagggccgtgtcgctgggctgattaactctacaggagagcctccaactcacccaggcccgccccttctgacctactttctccggccatcgaaaaaagagagaggttacacagagatgtttcaaagcgaggtcggatagcatcttgtctgttcccaccagataagcattcccaagcctgccttcgtcactcactgcttcggaggccaaggtgctgccgtaatcaattgaaacagtagcctactattagtgctgcctccgtccccagcatagtgcagggtttcttggtctggattgaaaggctgacattcttggtaatgaataggacattttaaatcactagtctatgtcccataggcattctgcccagggacaattgatgagggcaagaagaatgataataagggaacccaagacttcattcctaccagaatgctgctggtggttatggagaaaacaatctgacgtgtgttcttattaatcctctgcctgtgcatttgggactaggatggagatgctaaaattcgagccaggcttctctggttccctttggaaactgctggatctaa

SEQ ID NO: 63617 - DNA, 1962 bp, Bovine  19866880986840
  misc_feature (1)..(1): n is a, c, g, or t
naactgaacattggaacaacagacttgttccaaatcgggagaggaatacatcaaggctgtataccgtcaccctgcttatttaacttacatgtagattacatcatgcaaaatgctgggctggatgaagctcaagctggaatcaagattgccaggagaaatatcagtaacctcagatatgcagatgacaccacccttatggcagaaagtgaagaaatgaagagcctcttgatgaaagtgaaagaggacagtgaaaaaattggcttaaaactcaacattcataaaactaatatcatggcatctggtcccatcatgtcatggcaaatagatggggaaacaatggaaaaagtgacagactttattttggggggctccaaaattactgcagatggtgactgcagccatgaaatgaaaagaagcttgctccttggaagaaaagctatgaccaactctagacagcatattaaaaagcagagacattactttgccaacaaaggtccatctaatcatagctatggttttcccagtagtcatgtatggatgtgagggttggactgtaaagaaagctgagtgccaaagaattgatgcttttgaacttttggtgttggagaagactcttgagagtcccttggactgcaaggagaccagaccagttcatcctaaaggaaatcagtcctgaatattcattggaaggactgatgttgaagctgaaactccaatactttggccacctgatgagaagagctgactcattgaaaaaaaccctgatgctgggaaagattgaaggcaggaggagaaggggatgacacaggatgagatggttagatggcatcactgacttgacggacatgagtttgagcaagctctgggagttggtgatggatggagaagcctggtgtgctgcagtccacggggtcacaaagagtcggactcgactgagtgactgaactgaactgaatgtgtcccaggtcctgaggtaaggggtgaaggttcaaatgcagtgttaataattatcatgatatagttgccatttttagaggaccactgtgtatcaggaacgtgccagacagtaagattaagaagtgaggaacgacaacagcgataataattcctgcttgtgtttacacctcatataatgtagagaggatgaccttccagtcaggaattgaatgcattttctatctcttccctggtggttcaaaggtaaaaatctgcctgtcaatgcaggagacataggtttgatctctgggttgggaagattccctggagaaggaaatggcaacaactctggtattcttgcctgggaaatcccatggatagaaaagcctggtgggctataatccatggggtcaccaaagagttggacatgacttgatgattaatagcaacgacaacaacaagcaacagcaacagcaacaacctttatttgcttgtcacttttccaggaaaaaaatcattaaaataaatatttatttcaaaagataagtactcctcaactgctataaatctaccatctctctctggggacgtcctccagccgagagcttgttgactgaaagtcagggctccccatgccaatcccggcctctgccatgtgtccacgaggcagaggcagatggttttccggtcaggtggaactgagatatattttctcaacacagtctggcagacaagcccgtctccctcaatgcatatcgcatctcctaaagaaaccatgcatattgcatgagcctccaaatgtagaaacagatactcagaaaatacaagtctcaaaataaaaccgaaacatttcaaaacaacagcagttgcaatgccaccaaatgatttagttttttttttttttttcatcaagcatcaagatcttgaaaaaaaaaaaattcccacagtccccaagcagaacctgaacatctcagatgccatggtgagggtttgagatgagttcttagtttaagtgtgggaaagcag

SEQ ID NO: 63618 - DNA, 1393 bp, Bovine  19866880993093
  misc_feature (1)..(1): n is a, c, g, or t
nagtcccctgccccacctcccccctgcaacttccccaccaccacacccttctccactcccagccaggaacagcatccttattctgctgtttaagaactctcttccggactgtctgggctctttggactggagtgactgctccaatttctccccatagatgtggcttgctgtcatgagctggttattcagcccttggaatactgaacaaatgttttccatcagttattgcagtgaaatcctggccattgggaaggtaataaaatctctgacccaaggaaagaatgtttcacacatacctagcaaccagagagaactcataaaaagttcattacaaagcagccctgtccattcttgcgcatctccccatgaccattgctacaaaacttctctctagagcacatgtccctacagcttcatagggacaaaagttcccaaactgtgtgattaaaatacatttgggttaaagattctctcctcttttaaactatcatttgtccttccattttcctacctctcacttaaccctctattgaactttcttcctccccttttatttcctcttcattctaatcaagttgcaaagaagaaaagttaaaaagaaaccagttaggtcaagcagagcccaaagcagaaggagctgaactagccagtggaccgagatcacgtgatatttgagaagctgtgagttgaataactcgaatatttaaggagtatttgaagctttgaaatgtgatgtgctggacatggtaaaaataaactgaggtcagaaatgagggaagaaaaaaatcatttatgaggtgcataccccccttttaagtcttctcttacaacttggaagaaaacacagcaaagtgtacatcttttcccaatttactgtgaaacttaaaggagactgcttccccttagcaggaatgatatcaaggatgttcatcatgtataacattcatcctgaatgagagatagcctgttgaccaggtttagaaaagtctcttcaaaggaaatgccttgacagagaaatactgtggcggtattttaaattgatgtccaacaggaggagtttcagagaggaaggtttccaggaggaaataatacttgaaaatgtcattataaaaatgtaatgattaattttgtttctcctctacatggctttctaatttttgcctttttttgagaaaatgggtgaattgctgcagaccgcacaagagaaagggtcgcatctgatgatggttctagaatgagtgtatagttctagtcattattcaacccaaggtaaatatcttggatgtctgtatcaagagtatataaccaaggaatatatgacaatgagcagaaaggcactggcatctactcatttaaatctctgtaaacatcccttttctttaataaaatgatg

SEQ ID NO: 63619 - DNA, 1641 bp, Bovine  19866881100804
  misc_feature (1)..(1): n is a, c, g, or t
naatccattgcctgatggtttagtctcttggtcatgtccaactcttgcaaacctatggactgtagcctgccaggctcctttctccatgggattctccaggcaagaatactggagtgggttgccatttccttctccggggtaacttcctgacccagggatcaaacccaggtatcctgcactgcaggcagatttttttacctgactgaaccaccaaaaaaaaaaaaagcctcaagaaacttaaaaagatgagttatcaaactttcagaatttagaaagctggagttctgagatgtgagagcaatagtgatatgcatgccactgctcataaaggaggaactaaggcaaatccatcaaaaggcacgtaactcctggtccatccatgtccacactcaaccctgtgctgacgtgattaaccatggctcagagatgctaagagatgcacacaaggcctcaccaataataatgtgtgacacagccacaactggaactcacactcagatttccctaggctggaaaaatcgctctacctacaggatggtctctgtccctcggcactcacctctgcctcttgctggagtggccctgccacgacactccgtgtaattccttcagattttcaggaaaatgccatcctttcgggggaagcccactcctctccactcccccactgtgactcagagtccatggctccctgctctgtgtccttccccaagactgtgaccttcccaggggccaagaccaagcctgatcgcataggctttcctcctaacctagtgcctggaatataataaaattttaatatccatttttcatatcctctgtgaatgagggaagaaaggaaagaggaaggagggaaagaagaaagtagggaggaaggaaggctcgctctccactcctgagagaagagccagcaaaactaacagcgatgaagttaactgctcggaaaattaggtttaagaggtcacaacgaaatgacacccccctaggtaactatagcttttcaaagtaccttgaaaatcaagaagtgatccatagacagtcaaaaatagttattatttattcattcagtatttactgagttattatttattcattcagtattttcctttgcaccagggaaaattacataccatattccatttaatcaaccctcaaagccaaatttgtaattatacttatatattaattatatatttatatataaattatatattttatataattaaatatattaattatattgattatattgattaggaaactgaggctcagagaagttaagtatattacccaatgtcacacagctagccagcccagaaccaggatttgaattcaggcctctctgatttgaacagtgtgcttattccattgcattgctccattcccctcctctccccttttacttctggtatcttcccctttccttccatcttctgcttattcaaaagttaacctcggcacaatgcatttaagtacagaacacaacagaatcctcgttcttaaaaggtaaaaagcacagcaacttaattgaaacaagacaatccaaacactggcttcacttaaagtttataaattccatttcattgacttgtattttcacaaatgactgccctgtcaaagttattttatttctacaaaagt

SEQ ID NO: 63620 - DNA, 2650 bp, Bovine  19866880452784
  misc_feature (1)..(1): n is a, c, g, or t
ntgtttttctccctgtggattttttaatgccttcgaagagagctgggccaaaagaatacttagagcatgttttacatacatatgttgtctctcctgtgtgacgtcttttgtgtttctctaaggaactcaaataatggaaggctttaccacactgcttacattcatagggcttctctgccctgtgaattctttcacgttttttaatactttcaggacctttaaaggcttttccacattgtttacattgatatggtttctctacattgtgactccatttatgcttttgaagatcacaggaaaaaaatgaatcctttctcacatttctgacatttgaaaggtaaatcaccagtgtgtgttaccatgtgtctttgaaaagttactttccacatgaaggcgttcccacattctttacattcataaggtttctctccagtgtgagttcttttgtgttcttggaaagagtttcaatatggaaaaacttttccacattgtaaacattcatagggtttctctccagtgtgactcctttcatgtattttaagagaattgaaattaatgaatgctctctcacactccttacatttataagggccatctccagtgtgtgttatcatgtgtttctggaggctttccttaaatctgaagactttcccacattgtatgcactcatatggttttttccactgtggattgcttcatgtatttgaagagcactggcacaagtcaatacttgagaatatattttacatacatattgtgtctctcctgtgtgaactcttttgtgtgcctttaaggaactcaagttattgaaggttttcccacactggttacattcatagggtttccctcccctatgaattctttcatgtactggaacactctcaggacttttaaaggcttttccacagtgcttaccttgactgggtttctctctattgtgtttcctttcatgacttctaagccaactgggagtaaggaatgctttctcacacttctgacatttgtaaggtaaatctccgtgtgtattaacatgtgattctggtaagttattctccacaagaaggctttcccacatttcttacattcatagggtttctcccctgtgtgagttcttttgtgttgttgcaaagagtttcgatatgaaaaaacttttccacattgtaaacattcacagcatttctctccagtgtgattcctttcatgtgatatgagagcactgggagaaaagaatgctttcccacattctttgaatttacataccttctcagcgtacttttcgatgttctcttgatttgtcttcaatgtgacatttcatgtatctagtaagggatgaaccactcatgatggtattttcatatgcactgcattcccatggttttaaatcaggagtttcccccctcattttgagagttttaataagattgaagttttctccaaaggaactaatgtctttactttcagagagtttctctatcattggcgttctgtaaataataagaacaacattctaaatacctttattattttacatttttgtatttattatgatttataggaatagtgaggctttctatcttgtgtgaattgtaacaagttgaatatacaaaatgctttcaacagaatttcaacctttctgttaaaaagtgatattgagggcttccctggtggcttagtggtaaagaatccacctgccaatgctggagacacagggtcaatcctgggtcttggaagattccatacgctgtggataaactaagctcttgtaccacaactatttagcctaaactctacggcctgagaccaaacgtaccaaagcccacactctacaataagaaatacataaatattaaaattatttaaaaaaaacccttatattcaaatgtagagtttatgaatatgaactataaacaaattacattggaaacatggaacatttcttccatatttaagaaaatattttggagagacattttcaagaataaataaatttgaagatggggctatttcttttctttgattcctataaaattttcattatacaccaaaatttggacagagacatgctgggtatcatgaatatggctcaccttaattttttcccatggtttttctcctgttcatcaatgtcatgatgatctggccgttttgccactgaaatgcagaaccagaaaaaaaatatgacccaaagtactagaaattaaagaaaaattcattggattttaggtccatgatgaattctgaccctgcccagtttgtatttttctttcttttttttttttttcctgccatgttgtgcagcttgtgggatattacttcctgaaccagggattgaacccaggccagagaggtcaaagagtcaagtcctaacttttggactgcaggagaactgccctttcttcccgcatagtttctctaccaatgtattgtctttccacactccacatctttgaacactacagacaggtaagaaacacctctaatagatcaatatagggaattttgtcattcttacctactgatgccagattcctgatgttttccaacatcatgtctctgtggagtttcttctgtgaggaatccagtaaaagccactcctctcaggtgaaattcacagccacatcctcaaaggccaagagtcctaaaacatcca

SEQ ID NO: 63621 - DNA, 1264 bp, Bovine  19866880405664
  misc_feature (1)..(1): n is a, c, g, or t
nattttgtagaaaaggtacaaacttgaacttaaattaggctacctgtgctgctttgaccaagttatttaagttttgggggctttggtttccttatctgaattctacctgttttggaactgtctttgagtatacactaaacagtaacagatgtaaaatgccaagcaccaaatcatgtaaagtccactgcgttccatttactaaggctgggaattgtgtaattcgcttcccaaagacagccatcacaaagtgttgaaaaatgccttgtgcttaaagagttaacctgcaaataactagagcatgttattcgccaatcttgcagatataatactgcccacttagacctggaagtgaaggcaatgtcattcattgcaacaaccaagataaccgagaaagagcattgtctgaagagatcaacacctataggaaccaatataacaacattagaattactaacttttctttggctcatagaccaaaaaaaggaagtcaattgctccaggaaagttgactttcactgttaaatcgtttgtgtcttcttaaatgatttacatgctggtggaacacagaagtccctgaactctctctcccgtgcttcctccactttcttctctgcatgcccttcacagcacagcttcgtaaaatctctcctagtatccctggttaccagtattatatataacaaagccacacagactaaacctgacatggaaaaatcaaccttgcctaaaactaaatataagcacaatttaattaacttgcattccacagtcatagctgccaacttactgagactagaagacttgggtacacagtacccaagagctcagagggagggggaaaacatgaaagttttctccaaaatcttcatatgttcctttgtaaacagtaaacaggaataatgtctcctgtacacaagatacagtgatccagtcaatggtggagagtggggagtagtggaatgagccaaggcagaagagaatagagtttgagagaggctgaaatttcaggagagacaaacagaactagaaatgaatgacaatctgacaacaaggtcagacctaagtcaattaaagaaaggtctactttacccctaaaggaggaaagatgttgctgcagataatggaaagtcaaaaactacgtgcctgtcactttaaactctcaatactgcaaaccgagtagtggatgtagtctcctctaaaaatactccactgaccaaccttctgtgcttaaggtaatactgggggaatggtgcaacacatgcaa

SEQ ID NO: 63622 - DNA, 1671 bp, Bovine  19866880353168
  misc_feature (1)..(1): n is a, c, g, or t
naaccttgtgaatacactgagtccactccatatataattttagcttgctgaatggaaggtataacgttctacacacatataaaaatgtgctactgtgctttccatagtaaataaaggatgcaaatcagcctcaccattaagtcagagcattatcagaaagaagcctgtcgaagaaatccatatcctaattctgaaaatatcaagaaagtttgattctcttccagattagtccactaactgctgagcacaagcaggtgtagagatgagaacacctgctcgggaggcaggcctgcgttcaatcctggtgctaccacttgccagctgtatagcggaggtataaacctccttaagcctcgtctggataatgttttgctgtgaggatgaaataagataatttatgtaagatgcctgcttcctggtgccagtgagtagtcaatgaatgcttgctctcagtgtctcagtgtggatgcttactctgtggtcttagggacgcaactgacccctcccttgggcatcagctgctagatgtttaagtagcagaaagttggactctgatccctaagatcattctccattctaaagatttttaggtagtaggaagagacagctggatgtctgtgaattctggctttcaggttctagaatttatgttggcctctgacttatgcaatgaaagctcctgaggggctgaataaaaaatgttaaccgtggcacatgcattattgacaccattaaccagtcaggcagattaatgataatctgagctagagtaatttgcctgacaaggccatcgcaaatctgaggcgaatgttaaatccactacgttttaaaaagctgttgtgttaaggggctaaataaacctatacgggcaaataagcatcccagctaatcgctcagacacatggctcatgtttgttctagttgagagccagaaaacagaaaatgaaccaagatagtagaatcaaatttcaaaatcaactttttgtttctcaatttaaaaagtttctgttgaattgcagtcagcattttcatcgtctcagtaacacagtttgctttattggttgaggaaaaatctattaagaatatcacatctgcctctctgccacttttatcttatcagttccgatcagtaaacatctgcagaagtcaggaaactagacacttggatacagaattataaataagatcctgtctcaattgctggggagagaaatacacatatagtcgaacaaacacaaaaccagatgcaaggtgccaaatacttaccataatcacataatcaaagtgaaaggggcagataaaggagaaattgatgacttctgacctataagaccctggagagtttcacatggtgactgacatttcaattggaacttcaatttaacaactattccgtggggttttactctaagctaggcattgctctgggtgctgagaatagcttaatgaataaaactgataaaaacatccttgcccacataatgcatatattctggtggtaagaaacccttttcaggaaaccataattaaaaggtaataactcagtggtgaaaaataagaatgaataaggacacggggaaggttagcagtcaggtaaaacttccaagagaggataccatctctgcaaagacttaatgacagacagacatgacccatgtccaatgtttgagg

SEQ ID NO: 63623 - DNA, 1530 bp, Bovine  19866880455211
  misc_feature (1)..(1): n is a, c, g, or t
ntttttttaagtcttttccagacaacaaactttctcccttataagggtatgaaatctgtagggtatggataagtttagcaccctaacctgagaattgggtataatttaataaaagagctgctttaaacagaagaggcaacacctgggaaatgagtacaaagtccctgggctaaatagttcattggcacctctagcagaggtcaagtgagggccgggttatgcaacctgaagggagcattttgttgctacctgacaagagattttggtagagagagataaccaaccggctgtgccttagaagctagggaacagggtgacaagaaaacatcctgtccttattcccattcttctctctcctgtgtgttcctcaccttgctttaaccttagaagtctgagagaaagaccgtctgttgagaccatccataaaggtcagcttcctggagcacagagcagacatggtcagatccactctgaagaggtaaagaaggaatactcagctcagtggccatcttctctctttacatgaagagttctcttaacctttgaaattgtaatgtcttccaaagccaaaaacacagtaatgtaggccatgaattggaaggcttttctgtgaaagcagttgaagtgaatgagctatgagtgaacacttgtgcagagagcatcaaatgtgtctgttaatgactgctgttgtatcttgttctattaagtgtctggtgagctgcgaagtcaagggagggtgacagacgcagggaaactgaaatggtctcccccttacagcgttcttggagaggaagggctgagccaacaactgctattctgaaaaaaacgtgcatggatctgcctctaaggaaggatttccatagagaaaaggagaaaaagtaatatgctgcagtttttcccagtactgggcttgactaattttgaagttcaattgattgctttaatcagaccatgttcttgtaggtgttaccgtaatcgaggggaataaagcactttgccattaattctacttgaagcctggcctgataaggaaaataaacttgtatgacttgatgaatattgcaggattctggaaaaccataattactgttttgggaaaagcaagcagttggatagtggctacatttgtttttttctggactttccttaaaagccctgtttttaagtaaaacatacctatacataaatgaatggaatagatgtctttgggctgaaatttccaaatttggtttcagcagttaagctgcagttaaaatattgggaaaggtacattgttttcaactgtttcctagttatagaaatagaaatattttctttttatatgcaccttaatgtttcagcatataaattcatctaaatggcttttcagctcaaaatctctatttattgaaagcatacatttgaaaatatccttttggtaaaataaacacaattaaatgttaaggatctatcctgagtatacatttataataatgggcttttaaaaaagattaatctaaaattagatattcttagtcaaaataggttaag

SEQ ID NO: 63624 - DNA, 1128 bp, Bovine  19866880466248
  misc_feature (1)..(1): n is a, c, g, or t
ntgcctggaaaattccatgggcaaaggagcctggtgggctgtagtccatggagtcacaaagagtccaacatgattgaagtgactgagcacaagcaagaacaaaatgctgcagactggctgccttgcaaaaagaaatataatttttacagttctggaggttggaaatctgaaatcagagttccaacacagtcttaagttttgctaagaagattcttccaggtttcagactatgggcattctgtgtcctcacatggtcaaagtgaactagggagttctagacatggggtaggaggggggtctctttaataagggcgctaacaccattcgtgagggctccaccatcatgacctaagtacctcccaaataccttacttcataatggcatcatactgagcattagggttttgacatatgaatttgggggatgcaaacgttcagaccacagcaattccctgcaatgccctgcatgttccagctcctgctttcctttccagtctcaaccctcacaggatttcctctcgctcttggttctccaggcccacaaccttctttcatgttccctgaatatacaaggattcctcccatcccgttgtcttgttcctgagcctggaaagcatttgcctccaaaccctttaaactcatgcctgtttctcccagtgaatgctctgtttcctcacagcagaattgttggctgttgttgttctgctcacttttgcatcaccagtaactggtctatagagtgaatgtcagtttgataggacgttcctatttatttatgttctaaataggtaatgtgctcccttattgaattaaaatccaacaatgtttcattctcattgatgggctcatatttggaagtgcctgggtgagtaaattggttaaagttaggcagtccataaactgccacaaatggaaaccccattagcaaattgccctgtctgtgctgatagcagcgacaagtttggggtgcatttcacagagttaaatgcttttagtgcaaattgagttaccagtttctcaaagcctctagcatatgccattaattaaaacattaattcaccctctggatttaagtgagataaaattaggcttgaaataatagaaatgccataataacagcatttttgt

SEQ ID NO: 63625 - DNA, 2347 bp, Bovine  19866880476624
  misc_feature (1)..(1): n is a, c, g, or t
nattgacagtaacagttagtagatgtatggggaaaataaaacatgccgtcattatcaggaagacagggaaataagaactaaaatacacctgttgaccccagccagatatactgaattataacattactggtatagatttgggttttaataaacaattctgtatatgactgctttacattgacctagactgtaatagagctgcatgtctggaaaattctgctgaaagactgtaaacaaagggaaaagataaatagcaacctatctagttgtgggcagacgcatgtggtgaggctgggcttcctccagcatcttgcttagtgagaactacaaagagggtaggtagtcacaggagaacatttagagatggaaactgagatgggtataagcctgaagcctgtggcaggatggcattagtgatttcacaggcacctggccttcagggagaatcactgggcatttagggtcaaggctcagaaggatacagtttttccctccggatagatgtcaccccaaaatgtaaacaattcagtaagaattcagagagagtggaaaggccatggcactaggagtatatagacctgagttagaaatgaacttgactacttaagagacactcttaagcaattttggtcacttttctcagttctatccttgtctgttttaaaatctggaaatgtgaatgatattatcttcatttaaaatatatgttgaaattggtatagccactatggagaacatgacggttccttaaaaactaagagtagagttactgtatgatccagcaatcctctccggggcatatattcagcaagagccccactgcaaaaagacatgtgcaccccggcgtccatggcagcactgtttatgataaccaagacatggcagcaacctacgtttcccatcagcagacaaatggataaggaagatgcattgtgtctacccccccccccccacacacacacacaaacatacagtggaatattattcagccattaaaagaatgaaataatgccatttgaagcaatgtgaagggaccctagcggttatcatactaagtgacgtaaatcagaggaatacaattaacatatgatatcacttagacacagaatctaaaaaaaatgataaaagtggacttacttacaaaaccaaaacagactcacagatatggattaaaaacttatggtatcaaaggggaaagaaagggaggaggatttaaattaggaatttgggataacgtacacatactattatttaaattaaaaacacttgctccttggaagaaagggttacgaccaacctagacatcatattaaaaaagcagagacattactttgccaacaaaggtctgtctagtcaaggttatggtttttccagtagtcatgtatagatgtgagagttggactataaagaaagctgagcgccaaagaattgatgcttttaaactgtggtgttagagaagactcttgagagtcccttggactgcaaggagatccaaccagtccattctaaaggagatcagtcctgaatattcattggaaggactgatgctgaagctgaaactccaatactttggccacttgatgagaagaattgactcattggaaaagaccatgatgctgggaaagactgaagacaggagaaggtggcaacagaggatgagctggttggatggcatcaccaactagatggacatgcgtttgagcaagctacgggagttggtaatggatagggcatgctgcagtccatgaggtcgaaaagagtcggatacaactgagtgactgaactgaactgaatgagtcttgttttcagcctcagacttctgaacacttgactgctatggaaattatgaaactgaagcctattttgattctacaaagtaaaattgattaaaaaaaaaaaaaagccagactaaagaatggtatgaacagatccttgcatttgtacaaggtacaatagcatagaaagagctcctattattccaatttctgctcagctaaaacacaatattgaagttgtctgcgaatacatagtaaagaaatttccagtgcccccaagagacttcacttaagaaccccaacttactgttattagatcctttgatgtcaacaaatctggatgtgaagttgatgaccttaaggagaatgtagctggtggtagtgttctaaaaggagtattaaatgtgggtcaggagatggaagtcagacccagtgttgtttccaaagatactgaaggaaaattcatgttttcatcactttttgcagagcataacgatcttcagtatgctgctctgtgtgtgtgctgagccgcttccgttgtgcctgactcgttgcaaccctgtgactgtagc

SEQ ID NO: 63626 - DNA, 831 bp, Bovine  19866880489927
  misc_feature (1)..(1): n is a, c, g, or t
ncaactcttgctgtccgactcacaattgacccagcgtcccctaaagacgcctcgcattggtaaagtccctcgtccggcttatggtgcctggagtgaagtatgttttgtatcaacagagacccatttggaagttgctgcttccgttcgtccattcccaaggcgaggtggatgccgtctttcttccacttgatgacggggactccccggtcagactccgcggagcagttcaggaggacgttccctccgcgcatagtgacggcatccgagggctccgacaggaagcgcagggatgtgaaagacttgatctggaaagctggaacgtcaaagcacagagaaatacgttcacttcttgtaaaagatctcacgaggcaagccctggccttcacaaaacttttcccaaacaatctgggtctttgaaaaacgtgcaagaaaaagtgaaacttaaaaacaaagggggacttgcttcttgatccagtgactaaaccttcactttccaatgcagggggcgcaagttcactctctctcggggaactaagatcccacatgccttgcggccaaaaaaccgaaacgtaaaacaaaagcaatattgtaacaaattcaataaagacttaaaaaagtaaataaaagcaaggatgttgtattaaagaaggggaaaagtgtccaactgagataaccacagctaaagaaactattggtcccaaaagtaataataagaaaaattaagaatttacagaaatctaggcaaggctatcatcacataccaatccatacttgaaaatttagaagagatcaataaaatttccaaattcaaactaggtatcttaaagcagt

SEQ ID NO: 63627 - DNA, 3336 bp, Bovine  19866880518749
  misc_feature (1)..(1): n is a, c, g, or t
nagtttcccagatggtgctggtgataaagaatctgcctgccaatgcaagagatgcaggttcgatccctgggttgggaagatcccctggaagagggcatggcaaccctctcccagtatccttgtctggagattcctatgtacagaggagtctggcgagctacagtgcatagcatcgcaaagagttggatacaactgaagtgacttaggatgcatgtcagttatttcttaaataattgaaaaaaattggaaacaaacaaatatgataaaagataattaattaaaagttacctttttatgctgaaagccagcatgccaaagaaatatctattatattattacattttctgtcatcaacacaaagcagacatatttaacttgactttttttccattatactccttttggaattttgtattggtttcatatatatgggctctattcacaatataataaaacactttaaccattgtatctaagggataaaaattaaaaagcattttattgcatgaactgcatgcatactatctactaccaagtttaagtatttcctttcaggaactagtgttcttattaaaagaaattttgatatggcaagacagaaaatctcaaacaaaattaattttttttaaggacacagagtagcaacatgaaaaaaaatgtcttgcatcatgattactagaagaaaactctacatgcttacaagtataaaaatcactgctcaatctaaggatagttgtatgtttatacagtaaaataaaaggcctgagattatagtgactacttcataatgaccttcatataagttctttctgttttagagcacagcatttttttttttttttttttttggaggatgaatgatttcaagagcctctattatttagcaattgaaaataattcagatgttccatagttgatatataaacatgtacatttaaggtattatatgtgttattgtcgctaagtcatgtccaactctttgccactccgtgaactgcagcccactaggctcctctgtccatggaatttcccaggcaggactactggagtgagttgccatttccttctcaggggatctttttaacccagggatcaaacttatgtctactgcttggcagacagattccttaccatctgagccaccagggaagccttttaagaaggatacttggtttttaaatcccttaccaccttatgcccatatatctgtctgaaaccttaacaaaacatgatggcaaacaactgacaaattagaaagatgtatctgagttgacatttttacccatttacttggacaaactaaagaagagacttagaataactagatagcccatttctcagttctcctaggaaaaaatactctaataaacagtagacatttggatgctggtgattgagctgttcaaaagctagatttggtagcagctaatctgaaagtttgccaagaacatgcaaataagcattcagcctaagcctacatgacagctctttcacgacagagtagaagttggaaggaaggcaagaggaaaatgagccagtcttcgcctatccaggtttttaggacttcatgtctaaatcagatttaactccaaatgagcaattgaaaggaaactggtcattcattttgtgcgagcatgaaatgtaactagataatgtttcacaaatgattcatctttatctatagacaagtgccaaactaatttcatgcttacaatgtatgccaactagagatctcacagagggtttaagataacttaagacatccaaatgtattaagcagcagagagatgagttatctcaggatttataggctcatattgatcaccatcctgtggattatttaatgaacttcatatcccatttggtactatttactctaagtgccctgaactcatccatgagatatttaagagtaagaacaaattcaagatatgttatatgtcacaatagtccataagggttatttctaatatcatgatatgaatatttaagtttatctaccctaagtatatcgtattcaattaatagacaattagatttttatgctgtctggtgctgtgcttagtcgctcagtcgtatcccattctttgcaaccccatggactatagcccaccagactcctctgtccatgaggattcaccaggcaagtatactgcagtgggttgccatgtactcctccagggaatcttcccaacccagggatcgaacccacgtctcccgcactgcaggcagattctttatcatctgagccatgaaggaagcccatggtcttacagtaaactaagttttggatgtcttaagtatgttttaaatgattcagacattgatgttgcctatctttatcaacaattaatattgcataggcacgaatcttgtatgtatgtcacatgacagatagtctaaggtaaataaattactcatcataagagatttgaagccacagtgaatcacatctacactaaagataaaatgctctctgatttaagattttctgtttccaaagctacttcaaaatataaggcctctgttcatcagaatgtaatgtctgacagacagaaaggctcccttattgtcctgaagctgaggaaactctcagtggtctatgagagttgcaaattgtgcattagtcagtcgttaagagcatcactggagaaggcaatggcaacccaccccagtactcttgcctggaaaatcccaatggacggaggagcctcgtacgctgcagtccatggggtcgctaggagtcggacacgactgagcgacttcactttcacttttcactttcatgcattggaaaaggaaatggcaacccactccagtgttgttgcctggagaatcccagggatgggggagctggtgggctgccgtctatggggttgcacagagtcggacacgactgaaggacttagcagcagcagcagcaggctctttaatgtaacaaaagtagtcagtacctcaatagttagtcagtagtcagtagtagcaacagttcttcataaatgcaacaaaggaaagcctgtagcatttcataaagctaaatctttaggattatgaaaaagcctgtagcatttcataagaaaaacctaattctaatcttgatactgtgactgttgaaatgaaaattttctagattaaacaccagatgcattccttttacatcactgttttcattttcaagtgtctttgtcattatttggtagctttactgatgatttagtttaaaaatgtgaaaatcatatttccttttcattcaaaatatcgatgggaacaaagttttgagaaaagaactgccgaggaccagccccggctgatccagggtattcgaaggggagacgg

SEQ ID NO: 63628 - DNA, 985 bp, Bovine  19866880544613
  misc_feature (1)..(1): n is a, c, g, or t
nctcctgcattgtaggcggattcttttccagctgagctcccaggtagctcagctggtaaagaatttacctgccgatgcaaggaggttcaggagatgcaggttcgatctctgggtcaggaagatcccctaaaggaggaaatggcaaccaactccagtattcttgcctggagaatcccatggacagaggagcctggtgagctacagtccatgaggtcacaaagagtcagacatgactgagcatgcacacacacacacacacacgtttcagacaacagatgcttgaattaaattaactctgcataggacatacttacagtaaaacattatttgttatttgttcaaatttcaaacttaactgggcatcctgttaattttaccccccatgaaactaacttccttgaggccatagcataagtggggaaatagtacatggattcatactatcccttctctgttctgacataggtgcagagaagagtgaattcttagaaaggtaccgtgattgaatcagaaaaagtgattttagcgtcaggacacttgctgacctagtccaacatcaccaaatatccacgtagaaaggttgttgaactcgatttgttcttaacacagtgatccttcttttttttccttcttccctttacaagtctgggagcaaaattcagatatataaatacagaatgtgaagttcaagaagcaactaagccggcagaaatctcttagtgatcccacacagaggctccccatcagacattctgagcacatggcctcttccctaaagcggtggaggctttgccaagagatctgagggcttccacagggcaaggagtgtgtgccccgggcaactgactgagtgtcctctggctaaatctaacggtaaagaaaaatgataagggccaagtgagagtgaagaggatctctctcagccctttgctgcttcaggagctaaatctctaaaccacagcctgatttttctgtgtgatactgg

SEQ ID NO: 63629 - DNA, 994 bp, Bovine  19866880554612
  misc_feature (1)..(1): n is a, c, g, or t
ntatgtgagtgttctagcatcgagcatttgttaaacatccactgatcgcagttaaccttactatttataatcataagctaaactgcagctcattggaaatgagccctcttgctagaattactcatttgcaaattagtcaaccacattcctctctgacataaaaaaggctgagaaaacagtgggtgattgctcaggaaatttatgagaccaacatgagtatctttcacattccacaaaagaaatacaacaaatcctttgctgacaaagctgtagtcattacagagtttatattccagtttacagagggagagcctctctcaagcagatggattgttttatcataggaactttcttgcaggaaaatcacttaggagaaaaacttcaaatagatctggatagaatcctgtctccaacagctagaagctgtttgaccttggcaaagataattgatccttttgagtatcaatttggtttaccttttgtaaaaacttctttttattttgtttacatctgtgtgagtacagttgctttacggagttacgttagtttttgctgtacagcaaagtggatcagccacacatatacatgcatgttctctttttggcatttccttcccatttcggtcaccacattataaaatcgattctcattagtatctgttttatacataatagtgtataaatgtccatctcagtctcccaattcatcccatcctccttttccctccttggcgtccatgtgtttgttctctacatctgtgtgtctgttcttccccggagatgggctcatctgtgctgttttcctacattccacatatatgtgttcatatatggtacttttctctttaggtctcacttcactctatgtcagtctctaggtccattcacatcttttttatcattcagcaaagagtcttgaagtgcttactgtctatcaggaactgtcgtaggcactgagaacgaaagtcactcagtagtgtctgagtctttgcgac

SEQ ID NO: 63630 - DNA, 1002 bp, Bovine  19866880595919
  misc_feature (1)..(1): n is a, c, g, or t
naagatgcaacattctacacatctcaacagggccaataaaactctctactgacatgtcttacttccttaggtcaagaatttaatgaggagatggtgggggagaaatatctgagaagctgttctgccttcattgacggaggaaagacatttacccagtatttagatggctctgtacctgtgtgcagtcattctatgcccttgtttcaattaaattaagggctgcatcatataaccacaataatagcaaagagattttacagttaggatttttgctttgaaacctttggaccactgaactggtttatggagcagatatgtgaccttaaaatatatagcctctccccagatttgctcaattcagaactgtagcaaagaggctttctctcttacatggagggctcaagcccgtagctgtctagacaagtctctccagactgattttcgaggcccattgcacctttggaaggaatccaggtttctcttccaccctctccttcctctcaaaataattctctggcttgaccatgcccaagattaagtttcctttctgtctttcctttaagaatttttattaacagcaaagcatgacaggttcacagtaaatgtcaaattagtctaccaggccataatgataaagcaacagtcccctgacacagccctactcaaataaaagttatagctttcaggggtgaccacactcaactcttattgatctttctgttattctaaataatcttcttattaaagtaggaaagttaagaaataagaaaatatccactttttggcttccgaaatgttgtcctcgcctatatatgctgttctttgctgcccttgagggtcatccaatctgtgtaccccattccatcacattagcatgagggagcagagctatacttgggtgtttcattcacaatgtttctagaagcccttagaaatcagtggagggaatatcagtggagggtaatcctgcaagcaggccaggccaggaggcatatattccag

SEQ ID NO: 63631 - DNA, 777 bp, Bovine  19866880607925
  misc_feature (1)..(1): n is a, c, g, or t
nccattgagttgtatgctgtgacaggcatactttccaaatccgtgtttcatgccaataaaatatttatgcaaagaaaagtgctcaccaagtcttagctgacttgatttaatttgactgggttgctggtcacaagtatgaaaattgactccattcttcagttgccgcagggattagggcagagataattgaataaaattatgtcactgagtaatatttctattatttctttcttgcaaaaattgaattaggtttaaggaagctggggcaagattttgtcagcatttaaaccacagtgttgccactttttgaagctgcttcttggaagctatagaggcacattgaagcttcagcaatcaactaatccgtgttaggcctcacatctgctgtgggttacaggacacatagacagattcccttaaagattctgcctccgtgaaacattgtgggagagtcagtttcttaacagagacgagggaatcatctggaagggatgctctgcagagggcattggtgttagggggagattgaacacaataacttatcataacttctttaaaatcctttgattctatttctggagctgctctatggatgtgtaaatgatggccaaatatgaattcttatccctgtgtcagcttcttgttcagtaattttatgaaaagaagtcacacaggttgcagaataaagctattgctcttaggacactgtgttagttttctaacgctgccataacaaatgatcctaaattgagtgacttaaaatgacacaaatttatt

SEQ ID NO: 63632 - DNA, 1904 bp, Bovine  19866880635326
  misc_feature (1)..(1): n is a, c, g, or t
naattgactttaggagatggaattgcattgagcttgagtattctggcaacaatagaaagaatttctccaagtcctacttggtgcttgtggagattcaaactcaaagggagagcaaaaggtaaaacaagaaaaaaaatcacaaaagctctatgaaaaagaatacccacttttaaaaattagtggctgggtgtacttggttaaacgttcatttaatatctgagtaaggaaagtggtgctcaggagagaacaaacatggagactcctgaatatctcatagcattcagatttaagtagggaaagactgttgacttgagctcaaaaagtagctatgaaagacgattttagtgctagctgataaaaatttaggatttcaaccctacatgtgtatagagtcaccacattggcagtgtagaacagttgaaagtgtatcaggaaatgttctcatgctgatattgtgagtagaaccagctagctctattctctgtctctccataggtcatttattatttcaggcttcagttttccaactgcaaaaagaagttgcaagtgtctatcagaatcacctagttcagttcagttcagtcgctcagtagtgtccgactctttgtgaccccatgaactgcaacacagcaggcctccctgttcatcaccaactcctggagtttactcaaactcatgtccagttgagtcagtgatgccatccaaccatctcatcctctgtcatccccttctcttcctgtcctcaatctttcccaggatcagggtcttttccaatgagtcagttcttcgaatcacatggcaaaagtattggagtttcagcttcagcatcagtcctttcaatgaatatccaagactgatttcctttaggatggactggttggatctccttgcagtccaagggactctcaggactcttctccaacactacagttcagaagcatcaattcttcagtgctcagccttctttatagtccaactctcacatccgtatgtgactaatggaaaaaccatagctttgactagacaaacctttgttggcaaagtaatgtctctgcttttgaatatgttctctaggttggtcatagcttttcttccaaggagcaagtgtcttttaatttcatggctgcagtcaccatctgcagtgattttggagctcaaaaaaataaagtctgtcactgtttccattgtttctccatctatttgccatgaagtgatgggaccagatgccatgatcttagttttttgaatgctgaaatttaagccaactttttcactctctactttcactttcatcaagaggctctttagttctttgctttctgccataagggtggtgtcatcaagggaacatttcatgcaaagatgggcacagtaaaggacagaaatggtatggacctaacagaagcagaagataataagaagaggtggcaagattacatagaactataccaaaaaaaaaaaaaaaaatgacccagataagcatgatggtgtgatcactcacctagagccagtcatcctggaatgtgaagtcaagtgggcctgaggaatcatcactacaaacaaagctcctggacgtgatggaattcccgttgagctatttcaaatcctaaaagatgatgttgtgaaagtgctgcactcaatacgccagaaaatttgaaaaactcaacagcgaccacaggactgcaaaagatcagttttcattccaatcccaaagaaaggcaatgtcaaagcatgctcaaactaccacacaattgcactcttctcactagtaatgctcaaaattctccaagccagacttcaacagtatgtgaactgtgaacttccagttagttggtcaagctggatttagaaaaggcagaggaccagagatcaaattgccaacatctgctgaatgatcaaaaaag

SEQ ID NO: 63633 - DNA, 4501 bp, Bovine  19866880636196
  misc_feature (1)..(1): n is a, c, g, or t
ncagcacatcaatccttgctctacgtgggaccctccttagcatggggccttgtgcagcttccttgtcacgtgccagcaaaggtggtcccgcttccaggtttctcttctaaagaatgttttgttgctctttgggtttaaatcactagataatgctgatttccacttcatagtgttaatggtcacatatgatttgagacatcaattttcccattgactctctctttatagatcatacatatatatagataatcaatgactttttttttcttttttttaattaattttattttatttttaaactttacataattgtattagttttgccaaatatcaaaatgaatccatcacaggtatacatgtgctccccatcctgataatcaatgacttttataaatatttggtatttttaatcaataaactgaataaaaacaaattaggtctatatatatatatatatatatatatatacatacatatatacatatatgtttaaatggtatatgccatattgtgtacacagactgatagttgaaaaacccataaaaattctctaaaaagatcttgttcagttttttcatggtagaacttaaactttaaaagcatgttcattttcagaagatccaatttctatggattgtctgaatcctttgcttcctaatccgactattatccccggaattgtttttgtgtacttttctgggctgactggctatgattacattacattgctgataaaaattctacagtcagcctcatttctaagactgagcaatgttctttatcttctatcaataccatttttcctaagtatccagcttgaaaatcaatttccagaatttgtttttaaaggccaacctttccaagtcaagagagaagaaagtcttccacttggaaactgactaatagtaatacctcatttcattaaaaaaaaataataaagtactcatgatacaatgtgtttggtataattaataataaaaaaatcagtctgtgattatttgtattacacacatatggcattagcttttataaagcgcaagcaatggtataattcaactgacaagtatagttaatgaatatccactgtgtttctaacactgttcacagtgactgagacacattaagaaagcatagctatgtaatgagtaatagcacttaaagttccaagaagcttcttaaggaagcaaatgttttaaatatgtaacaataataaaataggtaaggaaacttgcaagaatttgttcaatgaaatgtaagaactctgaatcgtagatttgcttatgagccccttacctgtgatggcctctggcatacgctcagcctctgtgtgtggtaccaaattgaatcttggagataagagttttgggtgagttaggaaagaatagctttattgctttgccagtcaaagggggacacagtgggctcctaccctcaaaaactacgtgtccccacccaggggagtttgctgaggagttttatgttcaagagtatagttgcttgccttcctttttatctcttctcttgatataatctttatgagctggttcctttagtctggtctcaagtggtctttgggcttcccaggtggcgctactggaaaagaactcgcctgccaatgcaggagatgccagttctatctctgagtcaggaagatcccctgcagcaggagggcatggcagtccactccagtattcttgcctggagaatcccatggacagaggagcctggcgggctacaatccatggggtggcaaagagctggacatgactgaagagacttagcacacacacatgcatgagtggtcttctccagttgaagaatgctgccatcttccatttgctgggttgtaattccataaagaacttagaggcattgttgcatgtagcccttgaggcagacccaggcccctgccccaaagctgcagtgttgtttcttagcccttccttccttgtctttgcatccctttccttcctggattagcaactgttcgaatctgctttttggaactccaggaaggtcatggaggctgcgatctgttccctacagggaacggggttgggggtggaatggaaaggatgggaaggcttctgtgtccatcatgtccaggagtcccacaggatcctgcttgctttcacatactatctaggcagtttttatgcctaaatcatcttgtcctcctcctcaaataagtgctttattacaaagacagccaccttgatcctttatatatcatccattcttcctccttcagaaagtagtctgagaatttttatagaaaaccacactgggcactggtctcagtaagcatttacttaaaatttaagcataaatgatactaaggcataaaataaaattaaaaactcgaatgaataaaatctgttgcttgttggtattatcatagcatgcaagttatgttttctccagaaaatgaaagtggaaaattatcctgtttttgacacatgaaggtgtcttaatttcttcactaagggtagtgatagtggccttagaatgctaaccacatgttggcctttaatgacaacaattgttttattaaatcacctctctttttacactatatggagtaagaattatttccttcgcagaccattgtttattggagggtgacctgattgtgtttcattgaggacttttcttgaataattaatctcttactgagcagctaggtagacaggagtagttcaggctagatacacagtacttttagaatagctttttacatgtgcaaaacagccacctccttcagttcatttagattaagagtcttgtggcgctcacttgctgcctttattacagatattaggatgaataaataatgttatcataactaataggtaggacatgtgtattttatcttctgtgttaacacaaaaatgccactttggcaatttaaaactatttctagggtaaggagcacttcatcttccccaagcctgttcaatgaaacaccgatttctgagtaagatccagcatcttagagatcccgtacttcgttgcccccttccctcctctcctgtgctgtttcttctctccctccctttcctcccctgtctttctcctcctctttctcttctctctcagcttcttataagctcatctttctatgtttttagagaaagttcaaaggctgagtttattacttggttagaatttcagaatctagaggcagaggcaggggggatgttttcatttttctctccctgacaaaatgatcttatcttttgaaaatgggtcccgtctgggtatgcaattgcttgctcattttatcacggtttttccaaatgtgatgtagtaattgtacactaaaatgacatagcttttatacaaattgaatttcaagtttttcatattatttgaaaatataaactctattatgaaaaccatattctcaaggaatcaaccctgatagaaaatatgtctgaaatatgaatcagccagcaagtgtttctgaaagtgcatacatactgcagtaatcatttaaagagatcaccagcccaagatccagtttatgaaataatcacccagaatacaaaggcttgatttataggcaggtttgtgtctcctgattctatcttccttgggctaactccttgctccttccctctgcctttatagtatgtaatttctccactgtattatcagccggatttaagtccctgcctgcttaagacttgtctaatcttttcatgccacatgtggaggatttttgaattattatttggggtcctttaagatgccgttaaggcagtttaatcttgaaggatattaaaatggaccacatactgtctggaggctcgagttagagtggggagcctatttgctagaccacaacccaattatccacaaaacccttttatagttaagtgttgtaagtaatattcttagtccattatattctttacactgaaaaggcgagtgaaagcaaccaccaaattgagtgactttaagatatattatctagaggaatagatatatttgccttttttgtccatccctggacatctttttttttctttctttctttatttttattctataaagactcttcttgtatagttgttacggaacttgaaaagtctctgaatattatgtctccaaatattactgcctatttcttaggagaattgtcttaatctttctttcttaagatttttttttttgtcatgtggatcattttaaaagtctttatggaatttgttacaattcactgcttctgtttcatgttttgatattttggtcatgaagcctgtgggatcttagcctgaacctcagatcaaacccgcactccctgcattggaaggtaaaatcttaacccccagaccaccaggagcatcccaagtttcttaatcctcgaaacctcattgtcctcaatcataagttggagatattatttactcctcttctttattctgaaagctcagcctctttggacacgggtgccaaaccaaacctggagataaagagttttggtaagtagaaacga

SEQ ID NO: 63634 - DNA, 822 bp, Bovine  19866880703815
  misc_feature (1)..(1): n is a, c, g, or t
nctgtaatttccccatgcttttagctgtggccatgctaaactgttagttgctgatgtcagcaccaactggaaaggtttcctgaacatatttatctgtgtcaaagcactgaacccaccactattaagcaaaagggcatagagttgtgagtcattgaatgtgatggagcaaggttctcgcctatgatcccagctctcatgcgtcattctgccgttattcttcatggtcaaagccagtggagttaatagtgtctaagtggttgcagtcctttctaccatgattcacatgtcatttttcacagtcattttgcagactgacagggaagtgggatagcttttgtttcacagtccccttcacaaagacccattgcatttttaatcactgggtttcaatttatttacagctataggccagtgtgatgaacccctagtcatgtctttccagttatgaccaggaagtattccaataaacattggccttttatccctatcagagacatttctattaaagagtaaccagcatttagatgctaatgattgaatgaagcaatcattctctttacatccaaatttaaaaatccagaagcgtgacagtatatcatgcactgtagaaatagaaatgtatatactatatttcaataaaattaattctgaatgcttccagtgcctgacacgacttctcactatcagataaaaataaacagtttccaaaaaagagtacaagtgtgaacatctgtgtcatctttaaaacagtgatagattggagaccatgcatcccaggttgctttcaacgattctagtttataagtgtggtcctgacataaa

SEQ ID NO: 63635 - DNA, 1391 bp, Bovine  19866880705384
  misc_feature (1)..(1): n is a, c, g, or t
natgaaaggaaatccgaatatggactttattaataataaagtatcaatagcagttcatatgctgcgataaatgtacacactaatgtaagatgttaaggtgggtaactagttgcaagttacatgggggatactctgtgcttactttattattattatataaatctaaagctattctaaaacaaaaaaggttatttttaaaaagtggataataaaaataacctagaatagaagacacgtatgtagaagttaagggcaaagacttctgtgtttttgtgactaaaatttttctcctttccaattcaggaataatcctgctgtgtatagtatgaaacaaggtcaaagaaaagagtgttatgaaattgttgaacggagagagaaggtggtcagtggtaaaagtaccagaactgcacaccagtgatggaggtcacgacagaacaggcataatggagacttagcagacatgttctcttagttgaaatgtcagctctgttggggacgatctatgtaggagagctcagaacagaaaaaaaataaaagtgggaagatggcatcatccttctgaaatattagttagtagcaatgtacttcagctggtcaatgaaatggataggagaggatacagaaaaggaagaagaacagggaaaatctgattgaagttctaccatccattatactattgatatgattatctttgaggaaatgcctaaactttggctcataaagttgtactatcaaaaatacaggctttaacaggtgataagttctcccttttccaagacaatgatctagttcaagagggaggaagatgttctagctacatttttaatagtagaactactaatgtttataggctcactttcaataatgaatgagctattcacattcataaagtaatgaattagaagagtttctgaaagatcatagagtctcccgtcacatcaccaaccctcatatctccactacacactcacactgtgtcatggtaggaatcgttgctcagtcgtgtccggctctttgagaccccacagacccctccaggctcctctgtccatggcattttccaggcaagaatactggagtgaattgccattcccttctccagaggatcttcctgacccaggaatcaaactgtggtctcctgcattgcaggagaactcttaaccgtttgagctacatggaagacctagtgcatattaatattcctaacagaagagctactgaaagagattcagcacgctgctttgctgacctagcctggcactcagctatcctggtaggtggtgtattctattccaaatgcttaagcgttcacatacagtctttatcttcatcttactatactaagttatgtactttggagccttgggaattttggttttgatgtgtagggt

SEQ ID NO: 63636 - DNA, 2745 bp, Bovine  19866880705740
  misc_feature (1)..(1): n is a, c, g, or t
ntgggtcaaatctggtccaggttctatttttgttgggcatcactgaactaacaatgctttttgtacttttgaagagttgtaagcaaatatagatgaatatgtggcagagactagttggactgcaaagctgtatggactgtcttggtctcttacagaaaagttggccaaaccctggtacacactaaaaattgtggcagtttgcgttccaagttttcaaaactattcctctctcctactttgatctggactttctcttcctttcatgtctgttgtttgacctactcataaattttaaatatattttcaatagtttgtcctcaaggtgaaccctgtcccagaaaggagagtttgtaggttagtttcaagggtttatatttaccattctcaaactggtctattgtactttctgttaatagcattacctggtagttattttagaattactctgttttcaggattgatgtttccctccaatttctctcccacagatactaataacgtgtgggttctaagggccttgggggtttgtccacatccattggtgttttaggatgtgaacatacagaccccatcacctcattttgtcataaaagtctgaatgcctttgtttctccatctagtttttctgtctctttttacctggagattcaagaagatcaaaaactatatttccaccactgctgcccttttcccagaatcaagctcactcatttttcaactgtttgcttaattgactatattcaatttgatttcaggaaaatgtttatcctgagtatttcagcacattaaataaacccacacgtacattttttttttctctgttttcctccagagtcaagttcccattatgtcatctccctaaaagcttttaacaatgcaggagaaggagttcctctttatgaaagtgctaccacccgatctatcacaggtaagctgaaatagttcatctttttttcacaaggcatttgagttgtgaaaacaacaaaccaaaatgaaacaaaacaaataatgaagaaaaaaatgtatgaagtcatgtccgaggcttatgtgtatatatacatgcacaatttattatttggggggttatcaaaattgtgagaggaattcagtctgtaaattagtacttggacataaagaatgtagatcccttattctctttatttgtttccagtagcttcatattttggtgtcttgacaccattgttcattcctttgggcaacttatttccaaatcagttcaatgtaggcaggagggtctctgcagaaggccaccaggtgcctgaatggacactagcttcattgcagagggtccttcaaggtggtattaacaagcatcaactgccctcatggggctggtttggactaggctgagtcatacaggagcttctttctgagctgggccaaagggtcaccccaacagtgcccaaggcctgtaggcactgaaagacttggttgcttcaagggcttatcacttctggaatttgttatgtgagttggaccttagaggaggcaaaggaggaaaacagggctcaaggaaatgagaaagagaaaagggtgggttagaaagtgagatcccgggtcatttatggagactatttgtgaataaggctggacctactcagaaacagaataagtaccataagtacccctgtgaggcttgctcatgacccagcacatgactcaagtcacgtgaccactcctaatagccttatgtctgaaatgtgaaagcaaaacccaggatcctactctatctttttaatgtatactttgatcctttcaaaacccacaatcctcaaagttcattcaacttatcagctgttttcaccttaatgacaacaaaggatctgatgcaaaggagcaggatttagtaggagcaccatggaaaatcactggggtgcctgagtatgagtcctggcagctaggaataaatgaacctccaggaaatgatgtggtcctgtgacttctgctaccacctaaatttatgtgaactttgtacagtttgttttccaaatcttgaagtttcattcagaaactgtcttgagaatatacagttgtaaaccagattttgcagttgtcatgtgatggttttcacagcataccatccctttattgatgtccaccaaatttccttttaaccctttgatattatcccagagtctccttgaatctttggctgttggatttaacatctgtgctcggtctgaagtggtatgcaaaagcttgggtgcatgtcagtatattaatttatccatggagacagtatatatcttgcattgcattatcagagggactctgactcccaaaaaaagggtaaataagaaatattacccagagaacatttactgtcaaaagtgttgtgtctaagtatagagatatgaggcaaatagaggccaggatagaaaccatgagataacatggtgaagggtgtctgggatttttacttcctcttattctcttattctgccaaaattcctttgagtgatagcaaccactttggctgagccagcgcttcccataatgtttattcattaagtccgctctttcctgccttgggtaaaagacagttaaaaaagtcctcactatgaatttgagctcatgatcaggccaaacaaaattgtaccatgatccgtctttaagaactcataattttttaccaaaactaaagaccacaaggaaggaacacaaagatgacctccaaaatccattttttgagcagaaactagttaaaatagagatagagttcag

SEQ ID NO: 63637 - DNA, 1322 bp, Bovine  19866880725092
  misc_feature (1)..(1): n is a, c, g, or t
naagagggcacaagcaaaaaggataaaaggcaaataaaattctaaaaaaaaaatattaagagctaagtttctgattttatgacactctcacacaatttgttgagtggcattgttctttaatttagttgtgagaacgtaattagaatacacttattaagtaaatccagtttatttttaaatcctcaaaacctgtttgcaaagtcagttttactttagaagaaataagcatgagggtgattagttcaactcaaaggctgaggacaaagatacaaactctccttcctgccccttaattcactatatacaaggaccaaactatgtaacatcatacctttagaatttttagacctaaatttaagtataattttaaatacttatatttattgttaataataagttatgctattaataacacatattatatattctctttatatgtattatcttattactaaaagaatgagacattgtttggaattttccccagttttcagcatagaggtatatatgaacttcacaatcgcaagacactggtcaaaagatgcttacttggtatcacacacagcttctgttcaatttcacctttcctaaaccatagggcttaataggtttcctggcagcagacgctaaacactttaaagaggcatttaatgtgaagcatttgtttacctgtggattcattattaatgaaaagccaagcgatgcacagttcaaatcaggcagacattaagtggatcagtcacctgcattattaaaatgtaccccaggggaatagggattattctccacattcaattattcctaaggaaaagagccccccgccccgcacctataccactctcaaaaagaaagcttgctcttcccgttgacctttctaaatgctcacaagtcttggtctgccaaggcttcaagcccccggggagttggaggtggtgcagaggcagccactatggagcgggcccagtcccccttccctcccctttaaaagaaagccccatgggtaatcatacagctcaaagcccttgactgcaggtcccttaactacaggaggtttggaagctctgacaccgtgtgtccccagagtctctgtctacattgccaggaggcagaattctgtcagggaacacgctttggctgtcaacagctcagacctcaggaatcaggtaaagacaggccccagctgccctgaaatctcgattagacagagttggaaaagtagagtggtgaaaaatgagacaggcaatgaaatgcttaagaccagcgattctgcctcttcctctcctcgattgcataatgcacggattcccacagggatctttccg

SEQ ID NO: 63638 - DNA, 1773 bp, Bovine  19866880781583
  misc_feature (1)..(1): n is a, c, g, or t
nataaagtgtagtgaatcatggggagtgattgttaaagatgactgaaggaaaacagaggagttttttaaatgggtaaaatacaaagagcagagaaggcatgccaattaggaaagaagagaaagaaggcctacgttaaaaatgcagaacttaaaccaggggcagacctagaagatgaaagttttaggactctaaacctatttctgctggcaacagaaagggtaatgatttacgtaatttcttacaaatgttaaacatttgtaagtacagggaaaggcttcatggatattcatttggtacaagttttccctccttaattttcactctctaatactatgggggatgtattatgtacaaaaactagaaacattcagaggtccgtgggcgtggggcctagggaaattgtaagcacctgtattatttataaggacatggatactgagattgagttgaaggcacgggtagggaggaaagaaatggaagagagttggacaaacacagttagtctccaagaacatgctttatttgaacatcattagagtctctcgggaacatccccttgaacaacagatgttctcttactaatattaaactttacatgtatatcctattcctgattaaagtcctagatagcaggaatgatgtgttttcatttttttgctgttactttttgaaaatttccttagtgtccagcataaagtcagtaaagactggatagagttcaagaatctgtacgcatacaatgcgagctgcagagaaggtgtacagctgcagcctaggattgagaatcattgccagaagtgccctagctaaaaatcttttttatcactcaatacttactaagagctctctgaaagtgtacagaggtcccgttgtaaatcttctgaaagtataccgatttcctttgtaaacgggatgcatagggaagccaacagatacatcttgttctgctcagtactcgttttatcatcactactataattaacaagcagtatttattcagtacctcccatttgccaggcagtggaattttttttttttttgtaattataccaagtgtttgcaaaaaattatagacaattttatcttccacgttaaaaacacttgagttcagagggctcaacaacctatctaagggcatgcagcaagtgaattcattagtttaagtgactttccatctcctgtgaaactggattaaagtgaggcatttttgtaggcaaggcttaaccatggatgctaagaaaggaaaaccagtttctagctacaaactttcttatttttatcgcgtctaatccagccaaccaaacaccaaaggcacaatccaaaaaagaaacaattgattagctgggcttaaattaaaaaacaaaacaaacttctgctttatgaaagacagtatgaagagaatgaaaagacagttcacagactgagataaaatgtagcaaaggacaactactgataaaagattgttatccaaaacacacaaagagctctagaaactcatcaataagaaaatgaacaactcaatataacatcagacacatcatagaagatatagaaatggcaagtaaacacacaaaaagacattcaacatcatatgtcactgcttgcatgctaagttgcttcagtcacgtccaactctttgagaccctatggactctagcctgccagactcttctctgtccattggattctccaggcaagaatactggagtgggttgccatgccctccttctgggtatcttcgcaacccagggatcaagcccccatcttttatg

SEQ ID NO: 63639 - DNA, 1380 bp, Bovine  19866880831773
  misc_feature (1)..(1): n is a, c, g, or t
nttttttagattctgtacactgaagtaattctttttctaatctttgtaataccaaaaaaaaaaaaaatcattacttgccaaactggatactgcactttatacttgtggatatgtaataatccttgaaaattgtattggggaaatatggatgtttggaaacaagtaacacatgtagtcagtacactagacaaagttgtgttcatttatttttgcagcttacatcttgttttacaccttggacaagaacattccaattgatgactggattatggaaacaatcagtggtgatcggcttactcatcaaatcatggatctcaacctggacactgtgtattactttcgaatccaagcacgaaatgccaaaggagtggggcctctctcagatcccatcctcttcaggactctgaaaggttggaatcatttcctgtcatttccttttctttcttttttttccccccctatggagcggttataaaataattttgaagtctgtttagggaattgacttaaaccatctctgttggcaccataactacagtggacattcaaaagaagttaaaatgcaaattaaaaccaaaatgcgatatcacctcaagcctgttaggatgagtgtcatccaaaagacaagagacgacaaacgctgccttgactgtgcaggagagagagcctagtgcaccgtctgggtgtgtaaattggtgcagccgctgcggaaaacagtatggaggtgcctcaaaaaattacaagtaaaaataccatatgatctagcaattccacttctgggaatatattcaaagaagacaataacattaactctctaagatacctgcatcctgatgttcatagaagtactatgcacaacagccaagacacggaaccagcataatgtccattgatgggtataacagaatatacatataatggaatattactcagccacacaaaaaagcatggaaatcctaccatctgtgacagtatggatggaccttgaaggtgttaacttcttcataagttaaagaaatcagagagaaagccaaatgctgtatggtttcactaatatatgggacctaaacaaacagataaacaccaaattcaggaaaagagatcagattggtggttatcaaaggtaggaggtgatgagggaaggatttggaggaaagtaattaaaaggtacaaactttcagttataagagatgtaggtactaggggaggtaataaacacatgataactatagttaacactgccgtctgatatcagggaaagttgttaagagagtagattccaatagttatcgtgaaaaaaattttttcctttttattgtattcatacaagataatggggtattaactaaagctattatgataatcatttcacaatatgtg

SEQ ID NO: 63640 - DNA, 2970 bp, Bovine  19866880837747
  misc_feature (1)..(1): n is a, c, g, or t
nattgtatttatctagtccaagactattcacagcctgagcagtttacatcacgttgatttagaggaaaaaaaaaaagaacagggaaaattaaagtgtcagtttgcttttcattctgtcactaagataatatttggatagcattaatgcattgtttaaaatgataagtacgatcctaagcatttcaaaaaatcacattaagtgactcaaaggcaggtcaagggtaattagttcaacgccttaccacaaaatgacagcattcccttcataccaacactaacagatggcttacttttaagattacttggtgaaagagtacttccagcattgattacattccaattttgagactttatctgcctttttcattcctgcattttggcctcaagagacctcagctatctccctacagataaggctaagctctatggtaatttcactgctttacaaacatggatttcagacaccatggagaaagtgtgtgtgtgtgtgtgcacgtgagcacatgtgtgtgagggtttacaaaatctcacgacatagacaatacatttataaatgactgacttcctgcatagtaaactaaaatgatcttttaagaattctgcctgatatttaaaaaacaagaaggaatgtttgtaaaatgtgtaattcatagtggcaaactggattaaaagatttagaactcagaaaattcattttagttaggaagaaacagcattgaattttaaaatgtagtatatgaaggacggagaaggcaatggcaccccactccagtacctcttgcttggaaaatcccatggatggaggagcctgttaggctgcaatccatggggtcgctaagagtgggacacgactgagcgacttcactttcacttttcactttcatgcattggagaaggaaatggcagcccactccagtgttcttgcctggagaatcccagggacgggggagcctggtgggctgctgtctatggggtcgcacagagtcggaaacgactgaagtgacttagcatagcatatgaaggacaactgataaaagcatgcatttgattaaaagacagtaaaatccactacaatagcttgcatgaacaggctcctctggtagctcagatggtaaagaatctggttgtaatgcaagagaccagggttcgatccctgggttggggagatgccctggagaaggaaatggcaacccactccagtattcttgcctggagcattccatggactaaagactattttggtgggctcaagtccctagcatcgcaaagagtcagaaagactttcacttccttacctgaaaatagatctaggatttttttgttgactgctaagaattccaattttacttacttttatttttttgtaaatggaataatatttaaaactaagtccataaatttctgctttattgactatgccaaagcctttgattgtgtggatcacaataaactatggaaaattcttcaaaagatggtaataccagaccacctgacctgcctcttgagaaacctgtatgcaggccaggaagcaacagttagaactggacatggaacaacagactggttccaaaccgggaaaggagtacgtcaaggctgtatattgtcaccctgcttatttaacttatatgcagagtacatcatgagaaactttgggctggaggaagcacaagctggaatcaagattgctgggtgaaatatcaataacctcagatgacagctgataacaccatccttatggcagaaaaagaagaagaactaaagagcatcttgataaaagtgaaagaggagagtgaaaaagttggcttaaagctcaacattcataaaactaagatcattgcaatcggtcccatcacttcatgacaaatagatggggaaatggtggaaacagtggctgactttatttgggggggctccaaaatcactgcagatagtgactgcagccatgaaattaaaagacgcttactccttggaagaaaagttatgaccaacctagatagcatattaaaaagcagagacattactttgtcaacacaggtccatttagtcaaggctatggttcttccagtagtcatgtatggatgtgaaagttggactgtgaagaaagctgagcgccgaagaattgatgcttttgaactgtggtgttggagaagactcttgagagtcccttggaatgcaaagagattcaaccagtccatcctaaaggagaccagtcctgggtgttcattggaaggactgatgctgaagctgaaactccaatactttggccacctgatgcaaagagctgactcatttgaaaagaccgtgatgctgggaaatattgagggcaggagtagaagggacgacagaggatgagatggttggatggcatcactggactcattggacataagtttgggtaggctccaggagttggtgatggacagggaggtctggcgtgctgcggttcatggggtcacaaagagttggacacgactgagcaactgaactgatatatacgtgtatatatatatgtgtgtgtgtgtgtgtgtatatatatatgcctttgtatgttgttatacccactaacatgcctgtaaaataagtgcaatctgcaacctgaacattctttctgtttttatgggcataaagctgatacaagatttctgagggttcaggatggggagcacatgtatacctgtgatggattcattttgatatttggcaaaactaatacaattatgtaaagtttaaaaataaaattaaattaaaaaaaaagatttctgcattgttgaaagaaaaataaatccaccaagttgcaagtcaagtcacaagttaaaaaggagccagtttttatttgcttttgctttttaaataaacatgaacttcaggtagagcagaaacataagctgagggtactttgaggatagacctgtgcctaattacttcttattatatatcctaaaacataagaatccgaataaatgccaattt

SEQ ID NO: 63641 - DNA, 1402 bp, Bovine  19866880849578
  misc_feature (1)..(1): n is a, c, g, or t
nggaatgattaatggaaaatttaaccctgggtggacatttctgtgtattgcatcatttcagttactgcctgtatgaagtgttggccatattctcttaagcagagggatgatataaggacccagagataaacctgaatacaggatcattaaatcaaatactgctcatgtagacaatctgctactgttagtgaaacaacattcagattcttagtatttgtcaacagttgaaaagtattcttgttgaaaagcatagtctacaccacgatgccttagagacatgatgatggtagggaggttacgttgacaataatgtctcaagcaggaaacaattatacaagctgtgagctctgaaccaatactcacaacaccaacagtcaccagttctgagcatttccaaacgcttgcttttggaagactacaacatcctataaaaatcaaatgcataaactattctttttttttcccctgtggcattctactaattatctttgtgcaaaaaaaatggaatcttaatacatcagtctacaaatcatggtaataaattcctatctacctgagaattgatggatttgatttatttccattttcctctgtgtaaaaccatctctgtttctctacacaaatcagcttttagcaaaagaatggaaggaggacaaaatactgcaagtaaaactccaccttattcttaaaatgaaaattttctggcttcaaaatgaacaaaagtattgccctaaaaaaagttgacctaactttgtttttctgtgtgaaaagcagctcattgtagaggaaaagcacacacaagttatgggtcttctctgtcgagctacagaactttaatccagagctcatgaaagggtgcaagagcagcttgaaaattatgctgagcttaattacacttaatgtgaattattcagaagtgcagacagagactaaaaatttatttcatacaaagaagcttgacattttaattggtccttcagaatggagacaaaacaatttcctctcaagaaaatttacatcctccctatcagagccgaaacctcagccaagcagaacttcattaactagattaattatcgcactagtgtctgcttcatcaggtgtatggcccaggtagaaagaagaaaatgaaataatgaccgacatttctaaaagacagcattgacccaaggagggaaaaatgacggatgaaaaccaccaaccttggtcattagccattgtgtcagggtgttccactgtggaggaaagagaaataatattattagattttggcagtttccatcaagaaaggtgacatttctagccaacggttttattagtgagttctcatatcaaggccaatgccctactgaaataaaattgataaggagttggttactgtgattatttccattaaattaaa

SEQ ID NO: 63642 - DNA, 1185 bp, Bovine  19866880849854
  misc_feature (1)..(1): n is a, c, g, or t
ntcttagctgcattcattcttactgaggcaagaattatctgaaattattgtgtaaaattccatcaaagtttcattgaacaatttatgagtttagttttgagctgatgctatgaatttgactgcaaatttaagaattcaacagggattctcagactttgacaatcctaggatgtgttgtcaaaaaataatacaaagcaagaatgctgatgaatctttcgatcatcagaatcagggctaaaagtgaaagattcctagaggaaaatacgacctgcaggtctatgatcttccagatctagtgccttcaaaagccagaccaccttcagaagaggaataagaaaaataaatagtacatatttcattacaaagttctttctgcctgtcaagacactctctgtacacattctcttccaccaactcattcaacgtctacaacaacacaagtcttattacaaaatgaacaggtttcatcctttaactcaaatagatacgcttaaatactctctttttggcctagcataccttgagaaaatccgagtattactacaaagtgaaaggggttaaaaaggaaagcacatcactgatgagtattattcatttcagttttaagcatttctcattgatagttctatgagtgatgtttttcattttctattattattattttttaattttagcaatgaatcccattaccaaggtattctcctgttaatgattctcttgtagtgactcagttactgttgccaaggaaacagccccgttgcaagagttaagcagactttttcatatggtgagaggatgatgggaacggatgagggagttgaggaaggtcaggcgtttaccactgaatacaaatccgtcatgcctaatagatgaagctctttagtttctgtgctgttcaggctactcccagcagccagggagaaaacacaaaagacactcaagcatgaatgccaacgagcctgcgctggcaacggtggtgcattcacatgtgccatcgcagctggaccaggcttggtgactaggcttggctatacacgaaaagataagttaaataggttgtcaataattatagaaggtcagaatctaaatcctgagggaatcttaataagatcagacagatgggatttggttgctctatcctgttcacgtgcccgagcttccttctctaggtcagagttcaaaatg

SEQ ID NO: 63643 - DNA, 1433 bp, Bovine  19866880856953
  misc_feature (1)..(1): n is a, c, g, or t
ntgccattgactgtcatggctgacacctgaaaactgtactgacttcctttctccagtcctgtgaaagaattttccacagaaggaaaaaaaaataagttactgaataacaagtatttttcatgggttttaaaagttttagcaaaatttcaacaatactaaacatgctttacattttgtgtgattgttgtggtaattactgttattttggccaaaagggttggaagattacagcaagaaatcaaattatttttcatatattctcatttatttttcccagtttacaaaaatgtttccttgaaaatagcctcagggcagatgcagaatacaaaatatgaacgatgaagaaataatcaaaaatagtaaggatcatttttcctcacagtccagaagaagcctgcctataaatcaagaacagtcaatctaaaaatttatgctccatcattcattcaaggtcagtgattcctttgggcaaagaaagagaactccaaagccactgtacttcagctgaaaatactaggttttcatctctcgaaaacatctcaaggcatatttgttttgcattaggttccacactacagcatgaagaaaacctgtctctgtgataacttggacacggattgcagtactcagtgatgacctatgagctgattttccggcacacagagagtacaggaaataagggaagccttgtgcatcatggccgagtgtgacatgtataaatttgtaatgtgaataactttccttttatctgagtttcaacatagctcatcaatgtgacacatgtttataaaacaaataacgcctctcagaagatcatatgacttttctgagacactgaggactcggtgtaaaccaacaagctcttaaaccttaaggagttgaacagcactgataacaattaaaatatcatctctcttttttccccattcatttgaaatggcacaaacatttggagccaaggacaaatcataaataaaatagcctcttagagaaatgatgcttctattaaatacaaaattatgtatttgtttatttttgtacagaaggatgaataattcttggtactgagaagaattctaacttgctactaatagatggcttttaagccatggttagaatgaatttggtacagttgaaggcagtcatcttcagtaactaggacttttagagaaggcaatttgataaactcacccacatacaatactggccacttaagatacgtctaattttataaaatacattggaaggcatgggttgagaatagtgttggtcctgttgtttctcttactgtgagtggcttcagtttacatccatagagtcaccacgatgcctgactcatggaaggcacaaacagaaacaactgttggaaggtttattagagcaagtcttagcactaaggagatactaggttataatacaatacccaacaccat

SEQ ID NO: 63644 - DNA, 2096 bp, Bovine  19866880870698
  misc_feature (1)..(1): n is a, c, g, or t
nctgtatgctggaagaataaactagatgatctatttacttttcatttgcactgtctatatttctatagtaatggaaataataagttacagactgagagcatgatttttttgatcccagcttttaatgatacacacaggaagcaaaagtattcaagttagctttttagtagagattttatttggtaatttgactctaaggagactttgattttttaaaaatatgttatcatttaattatatcaaactaaagggtagcatctggttttgattcatttaaccttaatgggaaagaacaagtcattacttaaagagtgtcttatagcctattatttcttgtatttttagaaaccatttattcctcttcaaattgtgctgtaattattcattaataattcttcttgatgtctctggagtcattccattacccacagtcattacgcatcatttcgtcaatgtttgctatgatgttgaggtatctatggctcattgagtcactacatccattggtgtatatccttttagtgaagaatacccaatttattctgaatcaagtttcactgacgtattttccagaaacttaagaagctgcttttatatccaagaagaagagtacagatataatccctatatactaactcctggatatctctcatgtaaatcttggcattgattggataattctatttttgttattgggctaatgacccagaggatatttgttattcagctcgtggaccccaaattgtaagagaaaacagcactgcatggaatcactgtcattaactgctttatccatgtaatggtacatgcttatttgctcagtcctgtccgactctgcaaactcatggactgtagcccaccaggctcctctctccatgggattttccaggcaagaatactagagtgggatgccctttcctcctccaggggatcttcctgacccagagaccagacccacgtttcctgtgtctcctgcatcacaagtggattcttgactgctgagcccatggaagcccatggaagcccatttaatggtagtttgtcatagaccaactccatcatggttggtcacaacagctttttgtaggaagacctagaatattaaaagaggagtatttcctctgagtaacagaattctgcattttaaataaccactatctgttaaaataggaagactggcatcagtggaggatgaaatgtttagcatggtcaggataatgtatatttttttgagtttaggcttggtttaaacttttacatctggtattacttagtttgagtatcttctccccagaggttaaaataatctaataatgaattaagcacattctaaatatttatattttccccatttcatagaaaagacaaagtataaaattcctccaggcagctctactgtatgaaggcagtttataaaacagttgtgttagtctatattattcacatcacaaaagattcttctgttgtgaaaggatggagctcagggtttctttaaatctgagctcccattatgcatttaaaacatcatttaaattatccaaaccttcaggaataaatttgctctgtaaagtgacatatacttaccttatttgtgaactttggtgtaataagttattcaggaggtgattgacacaagtcttgcaagaagtcagaagtgtgaaagtccggaacttggaattcttgaaactgttgtacagcattatgtctgtttccttaagaacatttatgactattgttttgaaataatcatgttgatgtaatattttcaaaagtataaagtttacttttaatagttatatagaaacagtagacatatttctaatgaaaaatatactgattcattaagcaaatgtttattaaatgcatgttatttgagctgctaacaacctcaggtacttcagtctcccatttgatagatgtaaacactgagaacaagagcagtgatatggattgctcaaagtcaagtaataaaaatgcagaaataggagtaatggtctgagttcctaactgcttgcctttcgatcaccctctacaagcttcttatgttaattcactttattattgaaagagattgctttaaaaatattggtctgtct

SEQ ID NO: 63645 - DNA, 828 bp, Bovine  19866880966686
  misc_feature (1)..(1): n is a, c, g, or t
nccactctagtattctggcctggagaattccatggactgtataagtgcatggggttgcaaagaatcggacatgactaagtgactttctttttttttttcttttaatttaattttattttttactaagtgactttcaccttcaatttacatttcctttagtttcttacttggaaaaattcagttacttaacaaaaaatatttaaatgctctagctctgagctttttttttccttagcaactgagcctgtctgctgttttcattgattgtgtcttattaccaaaggaaactgcatggaaaagcactgcttcttaaagcctgccacgctgatttgtatctttagatgtatctgaggtgtgttctctggatggtctccgtggctggagaagagggttatagggcagctgggtcaaagcactatatggttggaatgaggtgagtgatagtaaagtcccatgaaggttggaaggagcggtgttgcatgtcagtctttatccctcgaggaagctccgatgaagggaaatgattgaaatggcatgtttggggtccctaggcatggagaaaggataaacaatgcctaggaattcaatgacatcaactcaatggaaagcctggaaacaaagggagctggggttggatagaagcctagctttcccgcagttggtgaaaggtgctagggagagacgttgatggcagagatgattacaaatgcctcatgaagccctggagccactgctccaagatgaaaagggtaccatgattagtaaggaaatccagggaaggaaaaaagacctgaaatgaagcaaattcttacaggaggggacatgtgg

SEQ ID NO: 63646 - DNA, 735 bp, Bovine  19866881019701
  misc_feature (1)..(1): n is a, c, g, or t
ntggtagagggcatgcttaatactatttcctattcttttttttgctatccaggaaatgatggtaaatattaatatgtaatttgcctttagcttgtgctcttatatgcaagtcagcaaaggcatttgaaaactctaccttcctaattaaaatgctgccaacatcttataccataagaagagggtatattttcaaattatatacacaaatgacaccttgactgataaaactctaacaccgcccccccaaactttgcaaattaggctgcattaacaagaacactttagaatcttgagtttttgaacctcacgtacattaaaaatttcatacatctccttatgcagtgacagaattatagaggtttcctatctctccttttacttgctggattcatccttcaaaggattgtaatagaataatggtttactgtcagaacactcaagccagttgcaaataaatttagagcttgctaatcatttactttcccttatgtgtcactcttttaaaaacaacactcttggaattcaaataaagaaaaacaaagctatagttcatgtttattcttgaagttggaagcccttaattaaattgaggaaactgaagaggcttcctaaattattttctgatgacaggtagaatcaaagctaatatgcagtgatatgatagtattttacttttatgatatgttcgattttatggttcaccttcttacagcaggagaatcttcaacttctgaa

SEQ ID NO: 63647 - DNA, 3299 bp, Bovine  19866881049522
  misc_feature (1)..(1): n is a, c, g, or t
ntcttccttccatttccctcacatttctgaattggtggaacttttgagaatgacttgccaagaatctaccactttatgcacttctctcaaagatggtcttaaaaaagaatattctgtcaataaatccaggtggtaagagaaagcaatgaaactcaaaggctctaggttgttgccgtttatgaaaatctgataggcgatgttaattttagaatgttgtgagagatttaagcagtcacgactcttcctaatacatagtgggtagtcttacataggtggggatttccttttcaccagcattcctgagctgaatagttttgtcagtgtggtcagctctcaactggtccatctgtgtgataaaacatttttcatgttataattccaggccattcaaaaacatcagctaagatattttaaaaatttgaactgattcaaggaaatctcctcgttaaccctaattcaaacatgacagagggtgaaaggaatgtccctctgacaggtagcaatgaaaaaccacagggaatgctcagaatttctaaaaccgggagctgccggttacttatacaagatagaaatattaattccatagaaatatgtacccaggaaaaaggcaccatagccctcaatccatattgtttctcacacaccctgagattagtcacccatcaatcttttcacctctgtccaagtttgaacatgaaacgcaggccaaaccatcgtcttttccaccccagattcttttgacaactgagtcatttgtgtcaaggcacactgacacgaggcaatggcagaatcctagtctctcatttaaatctgatggtaaagagacgttatagtaacattagaggtggtcgtttttgttgtgaaagggaacattctccttctattttatataggagttaaaatactccagaattatactgcacttcttatacttccttccattgccaagcatattcttctacattggccaaatgtttttgtatactagagtgaggatccatttaaaagttcctatataaaaaaaggattcacttataaaaattcctgtataaaatgaaaccagaaaagaaacctttatttttttttttttcagccaagaacttttcctttctttcctgcctttgactatcccatcaagcctcacagcaactcttcaaagttttattggcctcaatagttgttataaaataattgtccttttccatcagagatactttctaagtttagctttatttaacttacctttatggaaagtggaagaatgactgaggaaaaaaagatgatgattcccaggttcaattttctaacaagatattgaaccatgcagaggatggtaatgaactcattctacacaagatgccctaaattaagtcatcagagggagggttcaagagaatcatgttccctgagctatattgattgatgatgatttcacacaattgtcttaaacagcaattcttgtctcttgagaattagtggcttaggaaagtggtattgagtgtcttttaaaacaagataaaatcaatctcagtctatagaggcagagccactagattaagaaattaaccagagaaacacagagttagaaggaatctttgaggtcacttattaaaatatcctgtcatgtgcttaaattctatttatctccctaaaaagagttcatccagaacctgattgagcacttctacaaatgcagcaatctgttctatttatagatggactaattggaaatgctcatttaaagtgagctgcaattggtcttcagttcaacacattgcatttaatactgtttataaaataaatatttaggtagagagcctcctgtgcaacaagactataaaggaaggaaatctgttactacttactaattctgcagcttctgtcaaacaggcagggaactgctgtagccctgtctgggggcagagatgctgtctagcaccactgtttgggtgccccaggactccccttggcctgtcccatttaagctccagtcgccccaccaacttggcttgtggcccagcattcctcaaggactcccctcccaacctgtacccgctaagccagcctcaggtacagcatttcccagggactgttctggaccaggcttctccagtccagctgcacaatgtgacttcaggcatggcactccctagagaccatcctgggtctggggaccagccccagccagcttgccaaagcctctaagtacaagcaatctacaaagaagatcctctcgcacaacgccattcctttcgatcaggagaggtagctattttgccaaattcacaaaagcaaaacacagaattcaaacaaaaggaggaaacaaatatgctcaaaataaaatgacaaaataaaactctggtagtgtgtgtatggtgggggaggggttctcatgaagtagaagtggagataagtaattatctgataaaaagttcaaagaaatggtcataggatgctcagaggatttgaaagaagaatggactctgagaataaaaaagactctgagaataaaaagaaagaattaagcaggactgagtacaataaccaaaaaattaaaaaaaaaaataacaacagattagagggagttaacagtagattagatgacagagaagaataaattagaaatctagaagatagaatagtggaaatgacccaatcagaacagtaaaaagaataaacactttttttttttaacatgaaggacagtataagagagtctggggacaacattaatgatttaacattggcattatgggagtaccataaggagaaaagaataaaagggataggatggctgaaaaacattccctaacctggaaaaggaaagataaccaggtacagaatgcacagagagtcccaaacaaggtaaactcaaagaggtcaacatgtaattatacttaaaataacccaactcaaagataaagagagaatcttaaaggcagcaagagaaaaacaattaatcacatacaagggaaaccccataaaattatcagctgatttttcagtagaaactttgtgggtcataagggagtagcaagatacacttacagtgctgagaaaggaaaaatgacaacacagaatactacaatatatctggcaagatattcaaaattgaaggagagagagtttcctagacaagtgaaaactaaggaagttcatcactgttaaactggtcttacaaataaatgttaaaggatcttctttaaacggaaaaaaaagaccacaattagaaataaataaatgacaaatttcattggtaaaggtaaatgtatagcaaaggcagtgaattaccgcttaaa

SEQ ID NO: 63648 - DNA, 616 bp, Bovine  19866881068975
  misc_feature (1)..(1): n is a, c, g, or t
ntgactcttttgtgtacttgtcagctctcattgccattgtctcctggtgaaataaactccaggtttattaataatttcatgcttctattatccccactaaaaccctaagtttgaggatattggcacttgcagtcaacagaaaatttgcctcagacatgctagaattaaccattttaattaatatgactaatccaatagaacctaatttatatacataccattcagagtgcttctatcaatcaaattcgtatcaactggccaataacttccatctccatggcgacctgttcattgggaaaatgtatcagaatgttagtggacctataacatggaaacacaagtgaaacaaaacaaacaacagtatttaaaagtgtacaaacagtggaataagatgacttcatctacctcagagacagcctgaaaaaagtgataccattatactttgcaagaaaatgctattttctatgtgtgagaaaaatctgtcatgaaaatactcttctaaacaagctaaattcagttcctcactgaagagctgacccgtcacttcctctttgttttccctccagtatccttgttaacaggccaccagcaggtacaacatcagttgctagtccaa

SEQ ID NO: 63649 - DNA, 1644 bp, Bovine  19866881196308
  misc_feature (1)..(1): n is a, c, g, or t
naaaagaaaaatgctctaaactgaattcatcctgttcagttaatctgaaaaatagagtgatttcctcctaatccaataaaccttctatttatgataatcaagttatttttcttctcaaaccactttcatagatcttgttggtcctgagtcctaatccaatttactaatggcagagtctaaaaagttgctctttgaaagaatttcaggtttccttatttctaaaaatacaaaacataaattaagatttcaaaaagaacactcagagtggattaatttgcaaatttggttggcattcaattattttgtattttctttcctcagattcaccaaatgtcttttgttgataagataaaaataattgaaagcgcggttgatgtaaattatataggagagctgagctgggactgaagcaaaaatatcttttaaaaagaaaatctgtctactcagatcttagataaaaataatgaaaaactatacagaaatatgttctcttgttgtaatttaccatatcaattccttttatgtttagtaagattgtaattttgctggcagtgctaaaagtgtttacttcttttctaatgttaaaaaaaaggaaattcactaactatacaacttaatatatgaaaataaatttatctggtcacccttaaatgaaaacattagttttccttagtggttttagttaagttatcaacacctccccaatacaatgtgatttcattttccaacattaatttctgtaagacaagttgtttgcccattattattacttttagtcaaaccaatgttgttaagtataagcattctcttcaatcactttatgacagctttctttaaaatcatttagctcatccatatagttaatccaacacactaaaaaaaattcacccacacaacctaatttggtatcttcatcacatactcaataccatcataagtgaattttaaaagtaattatgtaaatacaaataaaacagaaaagcaatgttatgtaacattattcataggttaccatttttatttataacacctcaaagaaaactagagatgatgacgattttttaattttcacgtgtatctgtatggtatgaactgatcctttgtgggaagaaggtcaacagtttcctccccccacccccgacccctcaaagtgaaagtgaaagtcactcagtcatgtccaactccttgcaactccatggactatacagtccatagaattctctaggccagaatactggagtgggtagcctttcccttctccaggggatcttcccagcccagggatccaactcaggtctcccacactgtgggcggattcttcaccacctgagttatcagggaaactttttcctccaaatgaagacctaactctgagttcagtgacttgcacatttttcaattcattagctatttatgtgtcccctcctctatacctctccttgtgctgccacttcagtttagggcctcctgctgttttgtctttatagctgcccattatcttccatttcagatgttaaatcagcatgcctctgggcagcaactgtctgagtcagggcccattcacctaggtgcttgcgcactgggttggctcttcttgctttagactcttctgtccacatgccatgcacctggtttgttaggtct

SEQ ID NO: 63650 - DNA, 633 bp, Bovine  19866881262612
  misc_feature (1)..(1): n is a, c, g, or t
nctctgtcctgggattccccaggcaagattactggagtggttgccatgtccttctctaggggattttcccatcccagggatcgaattcatgtctcctgcactggcaggtggattctttaccactgagccacctgggaagtagttgtatgtcattatttaggtttcttatcttttaagggttcccttatgaggctaacattctatgattctataaagatagatctaaagtagttcacaggtatgaaagagctttgtaaatgttatgtgttaccatttctagtctctgtcaatgtacatataaaactttcaacccttgtacatgatgaaattcaaatgcaataatttatcatctaacattgaaggaaaatatttttatatgacttagtttattatgtgttctgcactcttataacagggtagcccatttgtttaaaaaaatgatgactgctgataatttttttatttgcaaattggggtcctgccttaataaataaatatctgaggctttcaaaagcagtcatggtaattttctacacacagtaattttttttaagaaaattatatagagactgtttctaattatgtttaacatttatgagagatgttatcctcatctcctgaaagttcacattt

SEQ ID NO: 63651 - DNA, 1105 bp, Bovine  19866881303070
  misc_feature (1)..(1): n is a, c, g, or t
ncaaaagcagagatatcactttaccaacaaagctatgtatagtcaaagctatggttttttcagcagtcatgtacagatgtgagagttggaccataaagatggcttagcactgaagatttgatgcttgtaaactgtgatgctggagaagactcatgagacccttggactgcaaaggagatcaaaccagtcagttctaaaggaaatgaaccctgaatattcattggaaggactgatgctgaagctgaagctcctatgctttggctacctgatgtgaagagccaacacattggaaaagaccccgatgctgggaaagactgaaggaaagagaagggggaggcggaggctgagatggttagagagcatcacgattcaatggacatgagcttgatttaactctgtgagatattaaaggacagaggagcctgttgtgctgcagaccgtggggttgcaaacagtcagacatgacttaggagaaatatatgagaaaaaagcttaagggaaaaaaaaaaatctgttagaataaagatatgtgatgctgcagtgcctctggagggaattcagtatcctcttgtgcttaaattctgtgaaagtcaaatcaaacgtggaaatcacatcagaggctgataccaggaggaacttgggcaagaagtgatgcaccatttgagggtctgtggaacatgatgttaagccttgattaagtggtacgttttaccatgctctgtgttctaatatgaaagatgctgatggtcctcctcttgaattctagagtctcaagttcctgaccagccaagctctcttcatgtgaggccccagaccaactgcatcatcatgagttggacccctcccttgaaccccagcattgtggtgcgaggctacatcattgggtatggtgtcgggagcccttacgctgagactgtacgtgtggacagtaaacagcgttactattccattgagaggttgggtaagtagctgtgaattttcttctcctaaggaaaagaaatgatttatatttaattattttctcttttggaaaattgctctttggaattggatgacagtttattacagatatccataactctttttctatccatcagtctactca

SEQ ID NO: 63652 - DNA, 1222 bp, Bovine  19866881366539
  misc_feature (1)..(1): n is a, c, g, or t
naattaaagtatctctaaagtatatatagcactttatttgactaataaatattttagctaataaagattttctgcagtcataagctgaaatgtataatttagaagaccctggaaataaacacctcttataaggtttcagaactgctccagagtattgatatcaagtagatatttgtgccacatttaatttaagcttcccgatgaatgaatgaatgtgaatgtgaagttactcagtcgtgtctgactctttgcgaccccatggactgtggcctaccagactttgtccatgggattttccaggcaatagaactggagtggattgccatgtccttctccaagggatcttcccaacccagagatggaacccgggtctccctcattgtagacagacgctttaccgtctgagccaccagggaagatagtgtgtatgaatgaagagaaattatgaatggagtaggaagttttacttgccattaataaaatcattctctgtggcatgtcggaactaaagcattggtcaaattggtgttggataacacagtgccatttgaagcctctgagagtgatctctagttagttagtaacaagtggagcttggggtgttattaagcagaattacaacagcagtgcaccgctgcacaaagaaattcgtggcatttcctctaaacagcatctttaaaagtctggctcctaaaactaatgttgtgaagcttcagttcttttgaattgagactccagggaataagagagagtgataattattagctagcaattgatgctaaatttgtttattcactggttttccactactttctatagtatgtaaatgagatctttacttagaaaaagctttcccactcagagacagttgacagctgttcaagcccaggggagaaagaaaacacagctttctcctcggccttttcttctccttcagcaaggcttccaaagcctcgtggagttttcccagaatcccctgcacaggagctttcacattctgattgactagtcatcatatcagggcttaccgctttgcagctccctggctgccaattgaatagtatgaactgggcccagaaaatccgcttgctcagcaccactggggttgtgggctgtttagcaagcgatgtctaattccttatgactctcaccagtaaagatgacatcagagtgatatgattagcatgttttcagaaagaatcctggacacctcgtcaaagtt

SEQ ID NO: 63653 - DNA, 1122 bp, Bovine  19866881448456
  misc_feature (1)..(1): n is a, c, g, or t
ngggaaaagagagattccttgctgaattccttgttgatgagctattgatttgatgctcagccttacagctatacttttggcaaattcaaacattttaaaatatgtttttcctatgataaaacagcataattctttgaaaataatttaaaaactatgctttattaaataaaaataaaatgtggaattctgttcccgggtttctttgtgcaaaattatctacagatctgccttcgtgtaaatacattacatctatttactttgtataaaagttagtttgttttcatttcctccattcaagctgtatgtccacattaccagttataagggaaactcagacattcgaaagcattagcctgaccaatgacaagtctgtgcagtgtggatgttaataattcctttctgaatcaacaaattatcacatgctttcgggtactgaatatatgttcagccaaaaattagacacgtgagggggtgaaaaaaaggatacaaatgatttttctgtcccaaagaagttgagaatacatgagagaatagtatttctttaagaagctaatcattattttggacttctggagcctaaagttggcaagaaggtactcatttcctgagtcttctgtctctataagcagggtgtgaatgttgactttttaggagatcaggttttgcaacagtgatctttgaaacgtttgagcagtggtgcagcgtgggcactggccatcagaatgggcgtggtcatcttcagcccttgtggcctcaccagcaccctgattcccactgtccccagccatagccctgatgtctgtgcagagcacagatttagtacttgataaatatgtgcttaattaagctctacaaaacagataagtctttagcacctcttggtaaccaaagaagagtttataatctaagagttgctttttttttctggttgaaactccattaagctattatagtaatggattatacactgtcgattacaagtagataaatgttttcaaataggccgttactttaaaaatcaatagtgaactcagttcagccagcattcaaaatatctgcggttatattatcaaaatgttgatattttagattaacgaccaacagaaaatttatttttaaatt

SEQ ID NO: 63654 - DNA, 1402 bp, Bovine  19866881648288
  misc_feature (1)..(1): n is a, c, g, or t
nctagaatactggagtgggttgccatttccttctccaatgaggaaagggcagtggcctctaaagagaccagatgggctgctaaactttctacaatacacccgtcagctcccttgacaaaaaagtatccagtcatccagctcaaaatgtcagtagttgcgacactgagaaaccgtgtggaggtgcagcctttggggaatgccacagcaccctttgcttacctctttttctttttacttattaatcttccacggttctaagaaaaaaacccagcaggaacagggcttgtacagacccaaatacatgtatgctaccatgattgatatttacaaaaactcttcacacgtatgtaaaatactgaaaatgtttgtgaatgctgtgttccaaacccagtacccttgtgtaagaatttttacataagtaaacactctcactgctcagcaacaatcacccagaacacacgctggccataagcacgaaggatagccttggtggtattcagaccgtctaaagcagatgaacacgtatgtgtggggagagaccaggaggaccaagaacagtctagaagggttaggaaatggctgtgtgagaggctttggaagacaccttcgcttgttcagacaaactctcacactttctcgagggaaatcagataatataacgagtcttcacagcccaggaatcaggcatttttagacctcattggttttccagagcagtctgcttaatctttatcccctgttgcaaacaaaccagtagacgggcaataccgcccaacaaaagaataaaatttgtccatctatcattaagataattgttattgattagtctccttgtaattttctgctttttgttttcagaagttggttataaatcacacccacaacaggcaccgagcctgtgtttgtgtctattatgtggtcctgataaggctgggcagcgttttttgccttcctgatggaagttattgagattgattgaagcgctttgctggttctatcctagacactatgtaattaatgtttcattatgttaatacatgcaaatgtaagagtgtgtgtttgattgggaggtgagagaacaaaacaggattaaagagttcacgccaaagtacaaattaatttattgcattgctaactgccctctgaggaatgagggagtaggcttcaaaatgaaagaaaaaaatgcaaataaagaaagagctgttgcatgtctatgtcattgagaggtagttcccttgacaatgataaaaaggatattcagtcatgtgacagagttcttacccacgctgtggttttcagcagttcacatctccctctctagttaaagggtttaggatgagaaaagtcacagattattttttctttacatatgcaagcatttatacctatacagaatgtgcga

SEQ ID NO: 63655 - DNA, 1102 bp, Bovine  19866881845364
  misc_feature (1)..(1): n is a, c, g, or t
nacttgtcatcttttagccatcgaatgaatcttggttcactggcaacaatagtcagtggtttcgctgtcaaattatagtttctaaaaaagatagccattcctgtgtttggaaagctccaccccagagctcagctctttccccacatgcctccagcaaatggaatagcccctgactcacctctcccctaccctgtaactcacagcactaggaattccatgtctgttggaaagtgcaatcacaaaccaataaggcattaggtgacgtcaaactgggaatacggtggagagaagagaatgctttaatgctagcacagcttccctctttcaaaagcaactatctgtgacaagggagactgaacacagaaggcacacagatcagccctgcccatagctgctggatggagctgggacccttggctaggagtggcatccatggagatgaaactgcagtacatgggggattcctttgttcagaggagtcactctccccagcattaaacatctcattaagcgtcttccttaatttttgtgatgtccagaagctttcagagataatctgagcagtcagtgaactgatgtgtctgccagggcatgaatagcaaagatcgttgcgtgtttgccctgggtctatcagcagcaataaattttaatcggttaggcatttttcaagcaagctactgtttgccaaacactatttttggcaggcatctgtaacaaagcctaatgcattatgcatattatttccacagtatttcattgtattagcacatgtagtatttgtatggaatttttgtaaattcattaccaaagtattatcatattaatgactctggtttaaaaaagtatttgaaaaaatattaatattcatagaaagttacatacatcctatggtggggaaatgggactcagctattatcatttgaatttcagaaagaaatattagcatgtgtatggaaaaaataactcaaaaatacatagcaaacatgaaaaaaatcttaaaaacctgaattcttttgatgtttctttgaaggctgaatgttcattttcagcactgtaatgataataattattatagattaaattatagtgaaggattagtttt

SEQ ID NO: 63656 - DNA, 1037 bp, Bovine  19866880455228
  misc_feature (1)..(1): n is a, c, g, or t
ntacatagttggtcaaaagctggatgaccacatgaaaatggatattttagggggagttcttgaagctgaactaggtgacctctatgatactctacaggtgatcctgtacaacccatgcccccaaccctatcctgtgtgaaaattgtatctttagactaaacaaagagtatgaacaaagcccagcccatctccctcattctctccaaactctctccaacccagaaagatcgtactattcaccctccaacactctcactctttctttctcttttctttagtcaaagaaaccttaccgctcccttcatattccatgctgtaatatggcatctcacaagagtagcgagtgatggaaccaaatagagtactttctggatcttcaactctaccatgctgaatgggttcaggagcgccacagtccacggctacatgaggaagacaggagagagatggtcaggatagacacttcttcccaggaagagtccctgggccagtccatcctcccagctctgatcctcactccttccctgcctcccccatccataagcacatctggggtgaatcccccacatcagcttctgtggccatgatcatctccccagcctactgagtcctgccacttcaaatggcccttagaacacggcaagaactaacctgcttcccagtggttggtgaggcctctgtagaaatggacccatagaatgctattaactctactaatctcatagcccctttctttctaagaaagctgctagtctggcaggcctggggtcagatcaggactaggattctacgactgatttcccttcaaaacccaatccactatctcacaagcctaagaagaaaccatgcatttgtatctcagtgccttaatctttccatttcctttgggagaggggaaattattcccttctttattcttaagggaaagaaggtttattcagtagacagactgtgggccatctcagaaggtgagaggcaccagggttgtgagttttcataagactgagtaatttcataggctaatgagtagaattatt

SEQ ID NO: 63657 - DNA, 1092 bp, Bovine  19866880456146
  misc_feature (1)..(1): n is a, c, g, or t
ntatctctgctgttatgcattggtgtgtaattgtggcacatgggcttcagttcataagaaggaccatagtaaagagctgggactccttggcctgaccctatattttattctccttttctctttttcttccttagtcaattgcagtggaaatgtattcaccacaatgactggggaggttgaaagtcctaattaccccagtccatacccagagagctcaaggtgtgactatcagatccagttggaggaggggttccgagtggtggtgaccatgaggagagaagactttgatgtggaaccagctgactccgagggccactgtcccgacagtttgctcgtgcgtgatggatgatcagttttcttccaactcactcagagagagttctccctgaagatgcattatctagctttctgtcccttctttttttctttctctccttcttattttattttacttttatcccttccgtgttacctttttcttttcgttctttctctcttctgatttccccattttgattctcttcagtttgtggcaggagaccagcattttggtccttactgtgggaacggctttcctgggccactaacaattgaaacccagagcagtgctctgaatatcatcttccaaactgatggatcagaacaaagaaagggatggaaatttcgttaccatggagatcgtgagtaacctagaagctgccctctggttggtgggaccagagtccttgcccaaggtaaaatcaaaacagtgaattgttgtagggatggatatcctgagaacacagcagctcctcagcaccatgtaaacctgttagtggttgtgagaaaccctcaacttttaggaatccttcaactggattttcaaatgcagatggcctggaggtggttagttagtaatgtcattattctattttatttcatttcatttcactgtcagacttgcgagattttagttccttgattagggatcaaacctgtaccctcaacagtgagaacgctgattcctaagcacaggatcgccggggaattccctgccatattattttaaccacctccatgttggaatgctgggtttcaggactgaggatagtc

SEQ ID NO: 63658 - DNA, 2329 bp, Bovine  19866880612451
  misc_feature (1)..(1): n is a, c, g, or t
ncattgcaggcagacgctttatcctctgagccaccagggaagccataacagctctatgctgctgctgcttctgctaagtcacttcagtcgtgtccgactctgtgtgaccccatagacggcagcccaccaggctcccccatccctgggattctccaggcaagaatactggagtgggttgcctcgatcccatggactacagcctaccaggctcttccgtccatgggattttccaggcaagagtactggagtggggtgccattgccttctccgtaacagctctatgctgctgctaagtcgcttcaatcgtgtccgactttgtgctactccatagatggcagcccaccaggctcccccatccctgggattctccaggcaagaacactggagtgggttgccattttcttctccgatgcatgagagtgaaaagtgaaagtgaagttgctcagtcctgtccgactcctagcgaccccatggactgcagcccaccgggctcctccgtccatgggattttcagttatacccaaattaattaatttaaagcagcctatttagccttaaatgctgctgtaggtggaaggcaaaagtgggtaaaatagaaaggaaggggcaagaaaagaagaaatgaccagaaaagtggaaagaagggagtggctatagttgtcttggcatttggtagagcccctgttcctcaggaacaagttgtaggattgcaaaccccagtatgatgcatttgaactgtggtgttgggagaagactcttgagagtccctggacagcaaggagatcaaaccagtcaaccgtaaagaaaatcaaccttgaatactcattggaagaactgatgctgaagctgaagctccaatactttggccacctgatgcgaacagccaactcattgggaaagaacctgatcctgggaaagattgaatgcaaaaggagaagagggcaacagaggatgaaatggttcgatggcatcacctagtcaatgggcatgaacttgggaaacttcgggaaatggtgagaggcaggaaagcctggtgagctgcagtccatgtggtcacaaagagtcagacattgttgttggtgactgaacaaaagcaacaggaagaaataaagaatagacaatcagcaatgaacaacgttataacttagattaaaaatacactagagggaaacaatagtagattctcatggaataatctcctcttaaaccatactcttatatcttcagaggttcctaaggggatgaaggcaaccctagatgccagatgtaggatcaaaacatcgattctacttctttctccaggagaatggccaggtctccaggtgcagctagaaaaagaaagaactgttgtttcctgtgaagggaaataaaaaacctgtatttaagagtttaagacaaattaatgacctgcatctcagggccccaaatgatgtaggttacattaccacatgtattgcttcatacttaaccctaaatgttgaggcaagaatgcagttgttggctttccacatttctcatttatccgatcatatgagaaataaggagagtttatagtggcacaattaaatgttttcgaatccatgacattatcttccctcactccactgtaatataaataccatgaaaagaagaatctttgttctgtcctctattctatctctataactctgaataatacctgaaatccagtgagtttgtcaatatttgctgaataaactgatgtagttctcccattggaacattaatatgtgtaggttcttctggagactttccttttacccttgtttggttcaatatgtgcattttctgtccaaggaaggatttgtggtctgaatatggcttttattaatcttctactcaactgccttgacaactgattttttaatactgaaaaaatatctcgaggaatgctttccactaaaggacttggagttttaaacttcatgtagatttggcaacaaaataaaacacacacacacgatttggggtatgtgtcttacataaatagaactggtaatttgtcatccctataaaacacagatggggatcaaatttgtatcaggataaatgataaagtgtgctatgctgtataacaatcccacagaactcagtcatcaatagaaaaccaaaaattcctttatttttttgctcttactacttgtccatcatggttctcctgtgaattggctgatgcaacagctgttatttgaaaggttgctagcagatgtggtatagggagaaattatgtgctctaccctagaaatgatagaaattgttctcactcattcctattcactggccagaacttgtcactggctagattacattt
